United States Patent Application Publication US 2011/0183924 A1 - sequence listing, part 151

SEQ ID NO: 389986 - DNA, 4002 bp, Homo sapiens
gcaagaagggaccttgtaatttttaacacgtgacacttagtggcagatgagacctaatgaagccaggcccaccttccacaccagattataaattcccctggagcagagattaaatgttttattcaccaacatgcccagatccctcgcaatgcctacgcttgacaaacacctgttgtcaacaagtgcacgaggcagcctaggaggagaattagtctccacgaggagaattactcgggcctagcagctagagtatttcgaggtcatcctaactgggttccacttttgaatttttggtttttgggttttttgtttttttggagacaagatctcgctccacttgggagcaaggtctcccaaagctggagtgcagtggtgggacctcagcctccgggggtagctggggccaaaagtgcgcgccaccatgcccggttcttattttgggtttctggtagagctctcgctattgtgcccaggctggtctcgaactactgggttcaagcaatcctcccacctcggcctcccaaagtactgggattacaggcgcgagccactcgcccggccgggttccacttctgaaagcttggggagccgctgggccttccaagaaaagtgctccacctcccgacggcaggcagagcccctggcccggctatctttccagggccgaaagctaacagtcaagacgcgaaacgaggaattcgggtcagggtggcaaagcaaagcgcgatgacagtgaggacgacgtctagacgcaaacatacatcaaatcgggccgaagcccgctgtcgccgcgcgggctgaacctggcacccggagcaacgcgcgaccccgggacgagacgctctcgtccgagccaaactacatcccccggcgtgcactgcagcgcccgcccctcgccggccggcggggcccgggaggaaggcggccgcgctgccagtcccgcaggtcccctaggcccctttcgctgcggcctttccccaacccggacccggcacttctcgggttccgcgactgccgatcgccccggcgcggcaccgctccctcaggagtcgcctaggccgcgcagtctcccgacttctcgtcaggctttcgcgccggcgctccagcaatcactggctggagaaggtgggcgttccggctcgagaggaccctgccgcggctccggaagagcctcgtcctgggcggcggtggtgcggcggtcgccgttatggccactgggctgggcggctgaccgccgggctaggaaagggcccagggccccgaatctcggtggccgctgctccagcgcggcctgcgccatggcctcctccgccgcctcctcggagcatttcgagaagctgcacgagatcttccgcggcctccatgaagacctacaaggggtgcccgagcggctgctggggacggcggggaccgaagaaaagaagaaattgatcagggattttgatgaaaagcaacaggaagcaaatgaaacgctggcagagatggaggaggagctacgttatgcacccctgtctttccgaaaccccatgatgtctaagcttcgaaactaccggaaggaccttgctaaactccatcgggaggtgagaagcacacctttgacagccacacctggaggccgaggagacatgaaatatggcatatatgctgtagagaatgagcatatgaatcggctacagtctcaaagggcaatgcttctgcagggcactgaaagcctgaaccgggccacccaaagtattgaacgttctcatcggattgccacagagactgaccagattggctcagaaatcatagaagagctgggggaacaacgagaccagttagaacgtaccaagagtagactggtaaacacaagtgaaaacttgagcaaaagtcggaagattctccgttcaatgtccagaaaagtgacaaccaacaagctgctgctttccattatcatcttactggagctcgccatcctgggaggcctggtttactacaaattctttcgcagccattgaacttctatagggaagggtttgtggaccagaactttgaccttgtgaatgcatgatgttagggatgtggatagaataagcatattgctgctgtgggctgacagttcaaggatgcactgtatagccaggctgtgggaggagggaggaaagatgaaaaaccacttaaatgtgaaggaacaacagcaacaagaccagtatgatataccaaggtaataaatgctgtttatgacttctttaaatttacatagtactgtagcatattaataccctgtgaactgcaaaaaaccaaatacatttacagtagtattggtcaccaaaatagaggggaaactttacaattgtgagaatgtgtaaatgttctcattaaggcagtattgacccagacaaccatttagtattcatctatcccctcaatgcctcataattctggaatgcctgttgtgaaacatgtcagtgcacagtgtctcctaaattctcacacgtgcttgattttctgattcatctggtgaactgggagtaggaagttggtcatagacaatatgccctccttctcttgtctgaccaaagcttgaagcaatcacatctactgccaggttagctgtagtcttcgcctcttcctctgaggtggccaactgaggattgacttcaacaagatccagtgctgatagcaaccctggaagaacaaagtgtgacaaaacctcaggttcccttgctgctactctcagtgagggtcatcccactgggacagggagaacaagccaaagtaaaaacaagagtccattttatagtagaaaatacctatttttaggaagccccttgcacctcatcctcttggccatgaatttaagttaaaacactgttgtgctatagtagattaaaagaaaccttttaagataatgaaataaaccatccctgttcaactaacataacaggcataattgtcaggcgttctggaaaaggaaaaggcttggtgttgggtgggggaggttttcatcctgcttgttggcaaaatgtatgccacctccagtatgactaggaaccttccagatgcctgcctggaaatgaatcaagtatgaaggcagaggaaatctgccacttgcactagccaaactgcattcccacttttgaactctaatgtgttatctgtatctgttagagcaccacaccatatgccctgaaatgtagttattactgcaaacttcattctcacccctgcaggcctgagctctggaggcaggttccacatctaacaacatctttttgtctcccagcagactgacccagtgtcttgtacttgatcaagagaaaattcagccatatgttaattattttatctggacttcagttaccttctgttaaggtttgagaacttgtgtcaaagttctcggtagtgttcctttggcctggagcaagtggaagggaagcttaaaccagaagaacctatccagacctgctactatgctcacccctctaaatgcctcacttctctatagaatttaactttttagttggttattctggatgaagggtgatctgaacaagctagtattcaggaatacaagtatctaagaatatttagggtggccataaagtctggaaacacaggcaaatgtacctaatggtttattgatattacactatagtacatgatgtgctgaatgccatcatgtccgttcagcatcttcccttattagcaatgcatagttgagtgtacagtgccaaactgcaaccaacaggtgtattactgtagcatttccatcatttcctgcacatggacctgtgttcctgatttgtctctgatttccactgactaaacctgcacctttagcatatcccagaagtggtcatcaaagtttgcactattagaaatatatacatgacttatgtttccagactattgccaccctataaattaagcaaactgctttatgtatctagttgacagcattataacagtgcagtgagccgtaatcatgccacttcactccagcctgagtgagactgtctc

SEQ ID NO: 389987 - DNA, 2651 bp, Homo sapiens
gcaagaagggaccttgtaatttttaacacgtgacacttagtggcagatgagacctaatgaagccaggcccaccttccacaccagattataaattcccctggagcagagattaaatgttttattcaccaacatgcccagatccctcgcaatgcctacgcttgacaaacacctgttgtcaacaagtgcacgaggcagcctaggaggagaattagtctccacgaggagaattactcgggcctagcagctagagtatttcgaggtcatcctaactgggttccacttttgaatttttggtttttgggttttttgtttttttggagacaagatctcgctccacttgggagcaaggtctcccaaagctggagtgcagtggtgggacctcagcctccgggggtagctggggccaaaagtgcgcgccaccatgcccggttcttattttgggtttctggtagagctctcgctattgtgcccaggctggtctcgaactactgggttcaagcaatcctcccacctcggcctcccaaagtactgggattacaggcgcgagccactcgcccggccgggttccacttctgaaagcttggggagccgctgggccttccaagaaaagtgctccacctcccgacggcaggcagagcccctggcccggctatctttccagggccgaaagctaacagtcaagacgcgaaacgaggaattcgggtcagggtggcaaagcaaagcgcgatgacagtgaggacgacgtctagacgcaaacatacatcaaatcgggccgaagcccgctgtcgccgcgcgggctgaacctggcacccggagcaacgcgcgaccccgggacgagacgctctcgtccgagccaaactacatcccccggcgtgcactgcagcgcccgcccctcgccggccggcggggcccgggaggaaggcggccgcgctgccagtcccgcaggtcccctaggcccctttcgctgcggcctttccccaacccggacccggcacttctcgggttccgcgactgccgatcgccccggcgcggcaccgctccctcaggagtcgcctaggccgcgcagtctcccgacttctcgtcaggctttcgcgccggcgctccagcaatcactggctggagaaggtgggcgttccggctcgagaggaccctgccgcggctccggaagagcctcgtcctgggcggcggtggtgcggcggtcgccgttatggccactgggctgggcggctgaccgccgggctaggaaagggcccagggccccgaatctcggtggccgctgctccagcgcggcctgcgccatggcctcctccgccgcctcctcggagcatttcgagaagctgcacgagatcttccgcggcctccatgaagacctacaaggggtgcccgagcggctgctggggacggcggggaccgaagaaaagaagaaattgatcagggattttgatgaaaagcaacaggaagcaaatgaaacgctggcagagatggaggaggagctacgttatgcacccctgtctttccgaaaccccatgatgtctaagcttcgaaactaccggaaggaccttgctaaactccatcgggaggtgagaagcacacctttgacagccacacctggaggccgaggagacatgaaatatggcatatatgctgtagagaatgagcatatgaatcggctacagtctcaaagggcaatgcttctgcagggcactgaaagcctgaaccgggccacccaaagtattgaacgttctcatcggattgccacagagactgaccagattggctcagaaatcatagaagagctgggggaacaacgagaccagttagaacgtaccaagagtagactggtaaacacaagtgaaaacttgagcaaaagtcggaagattctccgttcaatgtccagaaaagtgacaaccaacaagctgctgctttccattatcatcttactggagctcgccatcctgggaggcctggtttactacaaattctttcgcagccattgaacttctatagggaagggtttgtggaccagaactttgaccttgtgaatgcatgatgttagggatgtggatagaataagcatattgctgctgtgggctgacagttcaaggatgcactgtatagccaggctgtgggaggagggaggaaagatgaaaaaccacttaaatgtgaaggaacaacagcaacaagaccagtatgatataccaaggtaataaatgctgtttatgacttctttaaaaaaaaaaaaaaaaaaaaaaaaaaaaaaaaaaaaaaaaaaaaaaaaaaaaaaaaaagaaaaaaaaaaaaaaaaaaacaaaaaaaaaagacaaaaaaacaaagaggaggaggcggcgccccgaacgagagcactcccgacggcagcgagcaaaaacgagcagccacctcaccgaaatgagagaaagagggcaacacaagacaggggcggcggcgacagcaacgacgagagagaggggaagaagaaaaagagagaaaggagcgacgggcgaagaacgaggcgcgtgggaggcgacccagaagcgagagaaagacgcaaccacggagcggggacgaagaaacaacgagggagaaagagaagaagagaaaaagaagagaagagacggagggcgcacgtgacgacagaaaggaaaggagagccc

SEQ ID NO: 389988 - DNA, 5053 bp, Homo sapiens
gcaagaagggaccttgtaatttttaacacgtgacacttagtggcagatgagacctaatgaagccaggcccaccttccacaccagattataaattcccctggagcagagattaaatgttttattcaccaacatgcccagatccctcgcaatgcctacgcttgacaaacacctgttgtcaacaagtgcacgaggcagcctaggaggagaattagtctccacgaggagaattactcgggcctagcagctagagtatttcgaggtcatcctaactgggttccacttttgaatttttggtttttgggttttttgtttttttggagacaagatctcgctccacttgggagcaaggtctcccaaagctggagtgcagtggtgggacctcagcctccgggggtagctggggccaaaagtgcgcgccaccatgcccggttcttattttgggtttctggtagagctctcgctattgtgcccaggctggtctcgaactactgggttcaagcaatcctcccacctcggcctcccaaagtactgggattacaggcgcgagccactcgcccggccgggttccacttctgaaagcttggggagccgctgggccttccaagaaaagtgctccacctcccgacggcaggcagagcccctggcccggctatctttccagggccgaaagctaacagtcaagacgcgaaacgaggaattcgggtcagggtggcaaagcaaagcgcgatgacagtgaggacgacgtctagacgcaaacatacatcaaatcgggccgaagcccgctgtcgccgcgcgggctgaacctggcacccggagcaacgcgcgaccccgggacgagacgctctcgtccgagccaaactacatcccccggcgtgcactgcagcgcccgcccctcgccggccggcggggcccgggaggaaggcggccgcgctgccagtcccgcaggtcccctaggcccctttcgctgcggcctttccccaacccggacccggcacttctcgggttccgcgactcctccgccgcctcctcggagcatttcgagaagctgcacgagatcttccgcggcctccatgaagacctacaaggggtgcccgagcggctgctggggacggcggggaccgaagaaaagaagaaattgatcagggattttgatgaaaagcaacaggaagcaaatgaaacgctggcagagatggaggaggagctacgttatgcacccctgtctttccgaaaccccatgatgtctaagcttcgaaactaccggaaggaccttgctaaactccatcgggaggtgagaagcacacctttgacagccacacctggaggccgaggagacatgaaatatggcatatatgctgtagagaatgagcatatgaatcggctacagtctcaaagggcaatgcttctgcagggcactgaaagcctgaaccgggccacccaaagtattgaacgttctcatcggattgccacagagactgaccagattggctcagaaatcatagaagagctgggggaacaacgagaccagttagaacgtaccaagagtagactggtaaacacaagtgaaaacttgagcaaaagtcggaagattctccgttcaatgtccagaaaagtgacaaccaacaagctgctgctttccattatcatcttactggagctcgccatcctgggaggcctggtttactacaaattctttcgcagccattgaacttctatagggaagggtttgtggaccagaactttgaccttgtgaatgcatgatgttagggatgtggatagaataagcatattgctgctgtgggctgacagttcaaggatgcactgtatagccaggctgtgggaggagggaggaaagatgaaaaaccacttaaatgtgaaggaacaacagcaacaagaccagtatgatataccaaggtaataaatgctgtttatgacttctttaaatttacatagtactgtagcatattaataccctgtgaactgcaaaaaaccaaatacatttacagtagtattggtcaccaaaatagaggggaaactttacaattgtgagaatgtgtaaatgttctcattaaggcagtattgacccagacaaccatttagtattcatctatcccctcaatgcctcataattctggaatgcctgttgtgaaacatgtcagtgcacagtgtctcctaaattctcacacgtgcttgattttctgattcatctggtgaactgggagtaggaagttggtcatagacaatatgccctccttctcttgtctgaccaaagcttgaagcaatcacatctactgccaggttagctgtagtcttcgcctcttcctctgaggtggccaactgaggattgacttcaacaagatccagtgctgatagcaaccctggaagaacaaagtgtgacaaaacctcaggttcccttgctgctactctcagtgagggtcatcccactgggacagggagaacaagccaaagtaaaaacaagagtccattttatagtagaaaatacctatttttaggaagccccttgcacctcatcctcttggccatgaatttaagttaaaacactgttgtgctatagtagattaaaagaaaccttttaagataatgaaataaaccatccctgttcaactaacataacaggcataattgtcaggcgttctggaaaaggaaaaggcttggtgttgggtgggggaggttttcatcctgcttgttggcaaaatgtatgccacctccagtatgactaggaaccttccagatgcctgcctggaaatgaatcaagtatgaaggcagaggaaatctgccacttgcactagccaaactgcattcccacttttgaactctaatgtgttatctgtatctgttagagcaccacaccatatgccctgaaatgtagttattactgcaaacttcattctcacccctgcaggcctgagctctggaggcaggttccacatctaacaacatctttttgtctcccagcagactgacccagtgtcttgtacttgatcaagagaaaattcagccatatgttaattattttatctggacttcagttaccttctgttaaggtttgagaacttgtgtcaaagttctcggtagtgttcctttggcctggagcaagtggaagggaagcttaaaccagaagaacctatccagacctgctactatgctcacccctctaaatgcctcacttctctatagaatttaactttttagttggttattctggatgaagggtgatctgaacaagctagtattcaggaatacaagtatctaagaatatttagggtggccataaagtctggaaacacaggcaaatgtacctaatggtttattgatattacactatagtacatgatgtgctgaatgccatcatgtccgttcagcatcttcccttattagcaatgcatagttgagtgtacagtgccaaactgcaaccaacaggtgtattactgtagcatttccatcatttcctgcacatggacctgtgttcctgatttgtctctgatttccactgactaaacctgcacctttagcatatcccagaagtggtcatcaaagtttgcactattagaaatatatacatgacttatgtttccagactattgccaccctataaattaagcaaactgctttatgtatctagttgacagcattataacagtgcagtggcacaatcatggctcactgcagcctcaacctcccaagtagttgggacacctggctaattattttttgtagaaacggggtcacactatgttgcccacgctggtcttgaacccctggggtcaagtaatcctcttgccttggcctcccagagtactgggattataggtatgaaccactgtgcctagccccatgagtgtcttttggagtaaaatattgtagcataggaacaaagagacaagccatgccatatataagtgctagaggttattaacccctgctctaagtggtgtttttaggaagcaaagcagagaattgaacccccaagttctctggccaataacctaaggaccactggcaacatctaagattgcagatctgagaattagaccagtactgcctgcctttttgtactgcctaaggttctggcaggctgtggcgctaaggagaccatttctcaatgtgagtttctatcccagctagtcaagggttctctatagccctgaacctttcaatctggggtctctatctataccctagttccatcagatggttactgaagcagtatgatttggtagttctttaaattttggaatgaaaggtcatttgaagtagctttaaaaccagaagctttctgacagaaatggaaactgtttgcaaacaagtatgagttttggaaaagtagccagtcttgataacgtagaattcatcttagtactctttccatcagccattctcatctaactgtatcccccttattagaaatcctttcaggctctagtacaagacctaccctacataaaggacccaagatattgtccagtttgcagatttcttcaagagatcagctttagctccaaattcacaactcccaatgaaccaatctcttagagtgcaaattacagccttgcactcttatcttatcttgccttcttatcttaatctgcctttagataactcaaagaactgcatcagtttgacaatttattcttgtatttaattgtttaaatatacaattttttactcattattaccttagtgtaatttggtaagagccatgtccaagcatgactctaaaggactatatcctttttattagcatggccatataatttttagctacaaaagtttaagcaaaaacaaactctgcaatgatgtggaatagcagaaaagatcctttgcaggcaagagactctagcatatttacctatgtagttaacaggctgcagacctggttgctacatacctgtattgtgtattttcctcagcaatatacatgccttctcgataggttagtcccccgacaacaggagttcctgtggctggagccagtgtagggtcaaatgcatcaatatcaaaactcaaatggattggtctttgtctcctaaaaagg

SEQ ID NO: 389989 - DNA, 3496 bp, Homo sapiens
gccctgtacgccggcagtatatatgggagcggcgccgggcagacgggacacagtgacaaccaacaagctgctgctttccattatcatcttactggagctcgccatcctgggaggcctggtttactacaaattctttcgcagccattgaacttctatagggaagggtttgtggaccagaactttgaccttgtgaatgcatgatgttagggatgtggatagaataagcatattgctgctgtgggctgacagttcaaggatgcactgtatagccaggctgtgggaggagggaggaaagatgaaaaaccacttaaatgtgaaggaacaacagcaacaagaccagtatgatataccaaggtaataaatgctgtttatgacttctttaaatttacatagtactgtagcatattaataccctgtgaactgcaaaaaaccaaatacatttacagtagtattggtcaccaaaatagaggggaaactttacaattgtgagaatgtgtaaatgttctcattaaggcagtattgacccagacaaccatttagtattcatctatcccctcaatgcctcataattctggaatgcctgttgtgaaacatgtcagtgcacagtgtctcctaaattctcacacgtgcttgattttctgattcatctggtgaactgggagtaggaagttggtcatagacaatatgccctccttctcttgtctgaccaaagcttgaagcaatcacatctactgccaggttagctgtagtcttcgcctcttcctctgaggtggccaactgaggattgacttcaacaagatccagtgctgatagcaaccctggaagaacaaagtgtgacaaaacctcaggttcccttgctgctactctcagtgagggtcatcccactgggacagggagaacaagccaaagtaaaaacaagagtccattttatagtagaaaatacctatttttaggaagccccttgcacctcatcctcttggccatgaatttaagttaaaacactgttgtgctatagtagattaaaagaaaccttttaagataatgaaataaaccatccctgttcaactaacataacaggcataattgtcaggcgttctggaaaaggaaaaggcttggtgttgggtgggggaggttttcatcctgcttgttggcaaaatgtatgccacctccagtatgactaggaaccttccagatgcctgcctggaaatgaatcaagtatgaaggcagaggaaatctgccacttgcactagccaaactgcattcccacttttgaactctaatgtgttatctgtatctgttagagcaccacaccatatgccctgaaatgtagttattactgcaaacttcattctcacccctgcaggcctgagctctggaggcaggttccacatctaacaacatctttttgtctcccagcagactgacccagtgtcttgtacttgatcaagagaaaattcagccatatgttaattattttatctggacttcagttaccttctgttaaggtttgagaacttgtgtcaaagttctcggtagtgttcctttggcctggagcaagtggaagggaagcttaaaccagaagaacctatccagacctgctactatgctcacccctctaaatgcctcacttctctatagaatttaactttttagttggttattctggatgaagggtgatctgaacaagctagtattcaggaatacaagtatctaagaatatttagggtggccataaagtctggaaacacaggcaaatgtacctaatggtttattgatattacactatagtacatgatgtgctgaatgccatcatgtccgttcagcatcttcccttattagcaatgcatagttgagtgtacagtgccaaactgcaaccaacaggtgtattactgtagcatttccatcatttcctgcacatggacctgtgttcctgatttgtctctgatttccactgactaaacctgcacctttagcatatcccagaagtggtcatcaaagtttgcactattagaaatatatacatgacttatgtttccagactattgccaccctataaattaagcaaactgctttatgtatctagttgacagcattataacagtgcagtggcacaatcatggctcactgcagcctcaacctcccaagtagttgggacacctggctaattattttttgtagaaacggggtcacactatgttgcccacgctggtcttgaacccctggggtcaagtaatcctcttgccttggcctcccagagtactgggattataggtatgaaccactgtgcctagccccatgagtgtcttttggagtaaaatattgtagcataggaacaaagagacaagccatgccatatataagtgctagaggttattaacccctgctctaagtggtgtttttaggaagcaaagcagagaattgaacccccaagttctctggccaataacctaaggaccactggcaacatctaagattgcagatctgagaattagaccagtactgcctgcctttttgtactgcctaaggttctggcaggctgtggcgctaaggagaccatttctcaatgtgagtttctatcccagctagtcaagggttctctatagccctgaacctttcaatctggggtctctatctataccctagttccatcagatggttactgaagcagtatgatttggtagttctttaaattttggaatgaaaggtcatttgaagtagctttaaaaccagaagctttctgacagaaatggaaactgtttgcaaacaagtatgagttttggaaaagtagccagtcttgataacgtagaattcatcttagtactctttccatcagccattctcatctaactgtatcccccttattagaaatcctttcaggctctagtacaagacctaccctacataaaggacccaagatattgtccagtttgcagatttcttcaagagatcagctttagctccaaattcacaactcccaatgaaccaatctcttagagtgcaaattacagccttgcactcttatcttatcttgccttcttatcttaatctgcctttagataactcaaagaactgcatcagtttgacaatttattcttgtatttaattgtttaaatatacaattttttactcattattaccttagtgtaatttggtaagagccatgtccaagcatgactctaaaggactatatcctttttattagcatggccatataatttttagctacaaaagtttaagcaaaaacaaactctgcaatgatgtggaatagcagaaaagatcctttgcaggcaagagactctagcatatttacctatgtagttaacaggctgcagacctggttgctacatacctgtattgtgtattttcctcagcaatatacatgccttctcgataggttagtcccccgacaacaggagttcctgtggctggagccagtgtagggtcaaatgcatcaatatcaaaactcaaatggattggtctttgtctcctaaaaagg

SEQ ID NO: 389990 - DNA, 271 bp, Homo sapiens
cacgaatgcatttttgaccttgtatttctgacaaaactgtaggattatatgattgacattaaaggtaaaattaaaattaatatataaaataaaactcaaaattttcaagccatttggagcttgtcttgagctaatgaggtaaagctcatgtcctcaagaaaaatgttttactctgctgtttttaagggtgcttctatagaaagagtttgagaatcattaatatggattatagaaaattaataatgcttcatttaaaaataaatgtatttaa

SEQ ID NO: 389991 - DNA, 394 bp, Homo sapiens
cttgccttgtttttgggatcaccttattatgcaacatctgctctgaatttcaaatgtgataaacagagtatgagtgtcggtggcagatggctaatgaccagcagcgacagggcattcaagcctgccttgttttctgggaagcgatattttcatgttaatttgctctgtgtcctgcaaagatgagacaaatcacctgctcgtaattcaggcaaaatggagaccaccaggagctgagaggggccatggcttgattcctttaggagtgagaagagaagaagatctgagaggctttcctcatctgcagtacagggaccagtcagtcactttgcattatgtcaaactgagaaagatgaatcagccctgggcatcccatactgacatcagagccactgtt

SEQ ID NO: 389992 - DNA, 275 bp, Homo sapiens
gtgagccaagattgtgccattctactccagcccaagcaacaacagcgagactctgtctcaaaaacaaacaaacaaaaaaaaacctcaccaaaaaccaaacaaatgaaaaaaccagaaaacaaaagacttggggcatagtggcacactctgtaggcccagctactcaggaggctgaggtgggaggactgcttgagtccaggagtttgaggctgcagtgagctatgatcatgtcactgcactctagcctgggcaacagagggaaactctgtctcagg

SEQ ID NO: 389993 - DNA, 713 bp, Homo sapiens
ggtctggctctgtcacccaggctggagtgtgcagtggggcaatcctggcttactgcagccttgacctcctgggctcaggtgatcctcccatctcagcctcctgagtagctgggactacaggtgcacaccaccacacctcatttaaaaaaagttttgtagagatggggtcttgctatgttgcccaggctggtcttgaactcctgggctcaagcgatcctcccaccctggcttcctgaagtgcagggattacaggcgtgagccaccgcacctagccaaggttggagcatttttgcaaaaacacaaaggacgcccccttgcaagaggggctcatcaactctgcacagatgagggactgtcagatgcgcggatgaaagcacagaacatgtttttcagggaagaaacaaaatcttggcaagtgagggcacgtggggccaaggacgcctcctggcccccatccagccacgtgcatacagttactgtgtaggacgttcacagggtcatctgagtggtcagctgtgagttggttttggctttcctcttcacccctctttatggggaaaataaacaaatgaagaagctaaggtcctccaggaggacagggcctgcacctgcagggctggggagttcggtagagcccattccaacgctggcaacacaaccagcaccagatgccctgccggcccctgctgctgggtcccacggggttttagatc

SEQ ID NO: 389994 - DNA, 195 bp, Homo sapiens
agatttcacacaatgttgaacaaggacggtagctatcaagggttcacaatacttactattctctctacatgtttgaaagcttccataataaagtttaataaatgaaaaggctaggtggttagaaaaaaataaagtttaataaaatacatatagcagtctgacagaaagccacataaagcaggtggtatttaagct

SEQ ID NO: 389995 - DNA, 367 bp, Homo sapiens
tcaagaccccagcatacagctacactggaagggagctaaatttctattattggaaatagacacagtattgctgtcaggttggttgccatgccagctgtccaggtaccatgcttgatgccctgattaccacaagacttcccccttccccctgcttttaattatccttctgtagtgcagtgtatggtaactgatgggctcaaaactggcccacatttgccagtctccctatatgctcagcacttgaaaatgagtcttctctgctgtaatttaaagctagaaatccaaagacattgagtcaccagcataggtattttccacacagctgcaagtgaaacttcacaatggacttggccgctatttgcttaca

SEQ ID NO: 389996 - DNA, 845 bp, Homo sapiens
gttgaacacaggtgtttttacaagaggcacacaaaagagagacacagagagaagatgagaagactgaggcagacattggaatgacgcaaccaggagccaaggaatgcctggatccatgggaagcagaagaggctttctcaccatgtgatgcattctgctatgttatgatacagcaagaagggcctcacaagatgtgacctcttgttcttggacttctcagcctccagaatcatgagaaaaaaaggctcagcactgtgaagactgattgccacctcccccttccccagcaatctcgtggagatctggtcagagaagctgttccatctcccacaaacctcgtggctcagaagcagaggtggaggctgcagacctcatgtcaggactgggtcgactaaaataaaaacagtccccctagtctggatgccctgtgtaccttgcaactgagaaaatgtgaatgaaaccatgaaatactatgcagccataaaaaggaatgaaattatgtcttttgtaggaacatgaatggagctagaagccattattctcagcaaactaacacaggaacagaaaaccaaacaccacatgttctcacttataagtgggagctgaagaatgagaacccatggacacagggaggggaaaaacacacaggggcctatcagggggtgtggtggggggaaggagagcattggaaaaatagctaatgcatgcttggcttaagttctacgtgataggttgataggtgcagcaaaccaccatggcacacgtttacctatgtaacaaacttgcacatcctgcacatgtaccccagaacttaaaaataaaaatgaaaataaaaaatattagat

SEQ ID NO: 389997 - DNA, 814 bp, Homo sapiens
ggaatgagtgccctggaaggaggctctggggtggggagaagttggtctcatgggtccccaatttctttctttctttcttttccttccttcctttcttttttcttttcttttctttctttctttcctttttttttcttcctttttttctttcttctatttcctttcttcttttcctttattttctttctttctttctttctctctttctctttctctctttcctttctttttttgacggagtcttactttgtcgcccaggctggagtgcagtggcgcgatctcggttcactgcaacctccgccatccgggttcaagcgattctcctgcctcagcctctcgagtacctggggttacaggtgtatggcgcaacgcccggctaattttttgtgttttagtggagatggggtttcaccatgttggccaggctagtcttgaactcctgacattgtgatccgcccgcctcggcctcccaaagtgctgggattacaggcgtgagctaccgcgcccagccccgagttctttctagggtgggaggctgtgagtctgtgacatcacggggatattcttgggctggttccttgtctgtaagagcaacgaagggactttgtaccctgcaaagtgcaacttccggggatgattgggaagttgaggggttgaatgcattcacaccagagtcactctcagcccagactctccgggtcacctctaaggctgtgcactaggtgggcgtcagaggtattacaggtaaaggaatggcggctcagagggaaggagagacttgcctaacttcagggcaagctaacgcttgatttca

SEQ ID NO: 389998 - DNA, 349 bp, Homo sapiens
gatagtttatttgtatattattttatttataaatatccagcaggtcctagcaaataggaaaggaatatctacaaatgtttactgttttaggtagaagaatataacagtcatgtccaaactttttgaaagagcaaggatgtggtggaaggattgggaaagaactggcagttaagcctcagggaagtggcatttaaactgtcatccacagagccctaaggtttcgacagaggtgacttaggactcagtacagggaaggcaggggactctaaggtgggacactgagccattccccactatctttaacccaagtggctttacttattggacttctgggagtctgctgatattt

SEQ ID NO: 389999 - DNA, 210 bp, Homo sapiens
caggtgagcaggaaaaaagatgtgagaaagtaggttctgaagagagacagactagtgctaggaagggctgatctgcaaaggggtggagatttatatgcaggttttccaaaggaaatgccaaatggtatatttcttttaatcacaaagtagtgtctgcttactacagagagaactgaaactacagccaagcaaacagcaaaaacaagtaaa

SEQ ID NO: 390000 - DNA, 517 bp, Homo sapiens
aggtttatggggaagctgggtggggtggctcatgcctgtaatcccaacactttgggagaccaaggcagtcagatcacgaggtttggtggtcgagaccatcctggctaacacggtgaaaccgcatctctactaaaaatacaaaaaattagccaggcgtggtggtgggcacctgtagtcccagatactcgggaggctgaggaaggagaatggcctgaacccgggaggcagggcttgcagtgagccgagatcgcgccactgcactccagcctggtcaaccgagcgagacactgtctcgaaaaataaaaaataaaaaataaattaaaaaaagaaggtttatggggaaaaaaaacccagaagataaaaagatattacataaaatccataaatactcaagaccaattaaacagaatagagagcccagaaataatgccaccttcctacaaccatcagattttttacaaagttgacaagaagaatgtgggaagatttttctctgtaataaatggtgctggaataa

SEQ ID NO: 390001 - DNA, 406 bp, Homo sapiens
acacacacgcacaccaccacgaaatatgctatatgtatcttttcataatgtatttttaaaaaataattaaacccccttctctcttcagagtaaagatgatgttggcctattgtggtggctcatgcctgtaatcccagcacctggggaggctgaggcgggtggatcacctgagatcaggagttcaagaccagcctggccaccatggcggccccatctctactaaaaatacagaaattagctgggcgtggtggcatgcgcctataatcccagctacttgggaggctgagctggagagtcatttgagcccaagagatggaggttgcagtgagcagagatcatgccattgcactccagcctgagcaacaagtatgaaacatcctacaggagtgtgaaactccatctcaaa

SEQ ID NO: 390002 - DNA, 122 bp, Homo sapiens
gtgctttattggttgtccctgaggactttagccctctctcactgcagcacagacactgtgctttctcctagtttctgtggcaagtgacaggagcccacctcaaactaaagcaaaagggactt

SEQ ID NO: 390003 - DNA, 386 bp, Homo sapiens
gtgtgtgtataaaatcacctacaaatgctcctgtagcccaggaaactgtttgaagactcctgggagatagttagggctagcatgggcctgggagccacactggccccaccatgtagaggcttatgagtcttggtttcctcctctgttgcatggagaaatgataacgtctacctcataggattgttgtgaggattaaatgaaagaatcccaacagagtgactggccctgtggctcaaaaagtgtgttcctatttccaatatcaccccactctttcctgcttatctaactctctggcttcccccgtcagtccagcaatacctgaattttctccctttttcctcctctgtgatgtgagagtttccttttgctatacagaccccagaact

SEQ ID NO: 390004 - DNA, 133 bp, Homo sapiens
tttattgtgtcacttcatttaatgagcacgtcaatttggtaactaaaaataataaaaccttaaaaaaaaatagaacaataggccgggcatggtggctcatcccagcacttttggaggctgaggtgggcagatc

SEQ ID NO: 390005 - DNA, 448 bp, Homo sapiens
caagcaactgattataaactgaaccaatctcatcatggcattttctaatagaaaacttttcaaaggcttcccattgcttataggataagcttggactccttaacctggctctaaaggtcccacacggtctggcccccacctgcctctctggcctcattctattggcttatccccttgccacactctgtccacataagcctcttttcatttaccacagaagccatgttttctcctgcctcagtgcctttgtgcatgcagcccctgctgcttgcaatgttcaccgccccctttttttcacccagttaattcctcctcttctttcaactctcaggaaaccactgggcagagggcactccagcctgctgcccatctccttcttagttttacataaaaggagggggaactgatggtaggattacttagtgccagtgagattgcttgagacgtg

SEQ ID NO: 390006 - DNA, 522 bp, Homo sapiens
gatcttaattttgaaattgacatgaaagtgtcatatcagtaatctgtgaaccaccagtccttggtacctatcagagggtcaaaaatcacgattaaatataaccaaaaaactttatagtgactgattcaaatttgaatactggttttagctaatgtagtagtaatgaactggtttgggggtaagatttttctggtatcttattgctgtagaaatttttctttaacagttacagtgttttcttccaaatccttcacttctctgtcctggcttgtaaagaaaacatctgaggactgaggggtcatatttgaattgctctttataataccatagactactcattgcttagactttactaagctagaaatcacaagagcataagctactcttaaaatttatattatgagaatgtaaaagatacctgacttcaaatatcttgaacctcactttggctcaagttttctgtttaactttttctttaatactgatattttaatttttacaacagatacatgatttgcaaaa

SEQ ID NO: 390007 - DNA, 434 bp, Homo sapiens
tacatgtgcagaatgtgcaggtttgttacataggtatacatgtgccatgatggtttttaaaagatgattctagcttcatatagagaacaatctctgtggagaaaggagatatcttttgatgaagggagactagttggagcctagttcagtatttcaggaaaaggataaacgtggcttggataaagtggtgggacttgcaatacaacttgagatatgtctaagaagtcgaaagaaccagatttgacattcaactggatgtgagggatgagagaggtgtcaagtataattttcaggtttttcacatgagtaacttggtgaattttggcatcatttactgagaaagaaaatgccagaaaagggcctatttgacggggcaaaggaaggttgtgagaatcagaaagaagatgatcaattcagctttgcaaatgctgaat

SEQ ID NO: 390008 - DNA, 383 bp, Homo sapiens
atggatcattcactctttcatgattgtgtgaaatcgtgcatcattcaattagaaatattggttcagtgagttatgtaactcttttaagcgtcgacacatttcattatctaagatcaaaaaatcacattcattagtatcatcaccaatcctatcaggaatgccttaagtattgggaaatatggagacacattttccaacgttgacaattttccaaatttgcttgaattttatcattggccaaaaacactgtcagttcttgaagtggcaggctcattgcatttattatctctgccatcattggtctgtcagtacttcttccatgtaaaaataatgttccatgaaaaagagttgctggttcagctcacagttgaatctcagatgca

SEQ ID NO: 390009 - DNA, 273 bp, Homo sapiens
tacttactggcgtgcagatacttcatagccgtgaaaacataaggtcactgacaaagtctgagtagcgtgggtccacctgacctcagcgttgtccattttctaaagtgatcatcactggactttgaaacacaggtggtgccctccaagccacctgagtgatctgtccccagaattccctagtgaccatttcaggactttgggatcctgtgtgtagtccccataattctgactgcttctcttttacattataaaagtcttacgttttcatcatta

SEQ ID NO: 390010 - DNA, 208 bp, Homo sapiens
gaggagaggggctgtggggacacccagatctctcaagattgagtgctggctgaatgtaggaactgatctttttggggggctggtgggagaagtccgagtgaggccctagagggtctcccggctgacttccttctcagaggcctgtggcccttccctaaccttccttcaggaggtggggtgtgccccaggctgtggaagggccagggga

SEQ ID NO: 390011 - DNA, 321 bp, Homo sapiens
taactttttattcctcattagtaaatctcatctttcaattgtaataacctacatttttggtgggaagtttctatcttttctttttagtagtattccttccttttggtatatataactagcattcatggctgatagataacagagcaccaaggacataggtccaaaattttaaggacctgcctaactgtatagagttcatacttaagagctgaatctgtaatcaagtaatctttgcaagagtttttattcacaatgcaatctagataagagaatgtgaatggggggcccagaccagcctactgctacccatagaaaactgat

SEQ ID NO: 390012 - DNA, 715 bp, Homo sapiens
tgcagtgactcatacctgtaatcctagcactttgggaggctgagacaggcagatcacctgagcccaggagttcgagaccagcctgggcaatatgaggaaactccatctctagaaaacacagaaaaattagccgggcatggtggcgcccacctgtagttccagctactagggagactgagatgggaggattgcttgagcctggaagatcaaagctgcagctgagtagtgagcatgccactgcactccagtctgagtgacagagcaagaccctgtctcaaaaaaagaaaaaaacaaaaacttgtaagtaaagagactataatcaaagtcagataaaaagtacccccatatttgtcactgcacttaaagtatgctttggattatctttataacttagtccatcttccttaaagtatcctcattttgatccatactagcagtgtccatcagcatagcagatgcacaaaatatttgttgagcaaaataaaaaccactgctcagaggcagaaacaacccttgagaggatacaaaagcttacctggaaaggggagctttaaaaagactgcacactttggacataattgtggaggactagcctagaaatgtgtaagtggagtattagcttctcagcttctaaagagtaactgtggctgggcaacggtggctaacgcctgtaatcccagcactttaggaggccaaggctggcagatcacttgag

SEQ ID NO: 390013 - DNA, 472 bp, Homo sapiens
ctctggcagctatggcctgccgggggcaggggtggcagcagggagaccaggaggggctgctggagggagcccgaagctggatgggaacccaggcttaagtggtgggaggggacccaggcttgagtggtggcagaggggtaagaggtagccagatcctggacactttcaggaacttgagtcagatctgccagtgagtgggtcgtgggatgtgagaggtggaagaataacctctgaatagataaaacatacaggctaatgcctgctttacagatgggaaaactgaagctcaaagagctgaagtgacttgcaccaaggtcatttagttaggaagttagtgaagcaaggacattcacccaggaattttcactccaggctccatgactttccctcgtccatgtttcaagtctcttgcccctggcctctgccccccatctcctggccaggactgagtcagcccacccatgagcgcttc

SEQ ID NO: 390014 - DNA, 257 bp, Homo sapiens
tagctggaactgcaggtgtgcaccaccatgcccggctaatttttgtatttttactagagatggggtttcaccatgttggccaggccgatctcgacctcctgacctcaagtgattgacccacctcagccttccaaagtactgggattgcaggtgtgagccaccacacccggggctggatttttttgttttaagagacaaggtctcacactcttgcccaggctggtttacagtggtgcagtcactgcagccttcacctc

SEQ ID NO: 390015 - DNA, 321 bp, Homo sapiens
agtttgagtttaatgtgttatgcagaagatcttttagcatagtatctgtttgagatctctgagctttccatatctagatgtctaaatctgttgatagacttgggaagttttcagatactatttaatttgttttgttatccctttcattttctctttaccttctggaacactggcgaggctaggacactggcgaggctaggacactggcgaggctaggacactggcgaggctaggacactggcgaggctaggacactggcgaggctaggacactggcgaggctaggacactggcgaaggctaggacactggcgaggctagga

SEQ ID NO: 390016 - DNA, 269 bp, Homo sapiens
tctctttcatattaaagtttgggaaggcaatccagagcccatatgacattatgcagggtcagggatccgggttctttctatattgttcctccccattctcaacctgtggctttttttttttttcttttaatgagatagggtctcactctgttgcccaggctggagtgcagtggcacacttctggctcacttcagcctggaactcccgggctcgagctatattctcccactttagcctcagcctccagagtacctgggactacaggtaca

SEQ ID NO: 390017 - DNA, 389 bp, Homo sapiens
tatcaaatacagggttgggtatctctttgtaagagatagcagtgattttcagtggataattaagggaattagcacttcacatttttttcatgatatttttatgtcacttagaatttttcacgaattattccttgtatgattgtagataattaaagccccatatgctttgcagtagtagcagcagcgcagattatgatgcagatggaattggtaagagcagtaggttttgaaatgaggttgtagacgggctgctgagactgatttttggacagcataaatgaaagcagtattctgatgtcagcatttggagtttaaaaatccctagccatggatcctgtgctgagtcattggtacttcaggtaaaccaattccaactctatgtaagctag

SEQ ID NO: 390018 - DNA, 430 bp, Homo sapiens
atgacacacctatgaggcagttttagcctatcttaatatactgaaattcattagctatctgtttgaagtgagagaaaaacttctgtgaagagagtaactgtgctacgttgcagtgccctaaaatgtaattccaggctgggtgcagtggctcatgcctataatcccagtactttgggaggccaaggccggcggatcacttgaggtcaggaattcaagactagcctggccaacatggtgaaaccccatctctactaaaaaaatacaaaacaattagccaggcatggtggtgggtgcctatagtcccaatgactcgggaggctgaggcaggagaatcacttgaacccagcaggcagggttgcagtgagccgagatcgcactactgcactatagcctgggtgacagagcgagactcagtttcaaaaaaaaaaaa

SEQ ID NO: 390019 - DNA, 436 bp, Homo sapiens
aaaataataataaaaagagtctataatggtaagaggccctggaggatgagatgaatgctgagctgtgtgtctgggcatgtattttgtccacacctaatcctttctgtcatgttttaactactccttagagtggaggtcagcagtgtctgattacctccagagttcctctctcttatcgtatcttgtccctcgctccatttccttttctggcattattggacagcaagtgttacaacttaaaatcaatacgaagcaatttcatttgtttataactatgaagatgagcgcttccagcagagcactgtactttcaagtaaagtttaggttttttttttttttctactttttctgtctggtgcccaaaatgcattaatttttcattgtacgagtttgcttatgttatcccgctttgatctaaggccttgttaccatcatc

SEQ ID NO: 390020 - DNA, 1359 bp, Homo sapiens
ccctcaacagtgttcacgccccgcgtcatcggcacagctgtggccaggtataactttgccgcccgagatatgagggagctttcgctgcgggagggtgacgtggtgaggatctacagccgcatcggcggagaccagggctggtggaagggcgagaccaacggacggattggctggtttccttcaacgtacgtagaagaggagggcatccagtgacggcaggaacgtggacaagactcgcagattttcttgggagagtcactccagccctgaagtctgtctctagctcctctgtgactcagaggggaaataccaacctcccagtcttccactgcccacagggatagggagggtgttgagaatcctaaactcgaaccgtttcactgtcagcctgccctcggcgacccatcactgggtatgctattgtacatagaggaaacctgggctagccccacccagagcgcagaggagggggcaccgacagcgctgcgagccaggctctgggtagtggctgaggccagaggcccatcgcctgcccctgtccaactgagatggccttcaggagcctaggtttgaacagcagatgctgtcccaggaagggctagggacatcggaggggacctgcccccgcaccctctgctcagcccctggactcagccttgcctgtcttttcctgctgctcccagggggaggtgtcagacctcgggaggcagacgggaccagagccaggctgttcactgtgggcccacttgccccactgtgctagggcgcgggaggagagagcactgtggtcgccctctgcagccactctggctcccaagacttccctgactcccccactcccctccttgccaggggcacacccggaccccacacggcaggcccctctcttgggaggggcctttggaatgatgaaattccaaccctgctgcccggtcagcggtaccgtttcctgccctctctctgagaggccctttctggagtcctgggaaggtgtctgcctggccgcgctgccagatcagtacatcttttgtaaaaaccctgaaatgggcagggaagaaacacagggatttcccctctctagatccctgccaggtccctctccaggaggcccctctgctctcctgaagggtggtccctgagggtctgaccagccttggcacgagaggttggttccagcccctggcagggcttccttccaagggcccctgcagcctacaaactgggcctcgggcgactcaaaataagtgctcttgggggtggctctaccccattacctccccagccacaactctggccttcgacttccggctgggttagccagaccctggtttctctaccctgatgttgcatgagacctgg

SEQ ID NO: 390021 - DNA, 529 bp, Homo sapiens
gtgctaggattacaagtgtaagccaccatgcctggcctcttttcttttcttttaaagggaggctgggaaagccggagagctagtaggagccagggcacatagagagtgaggtagtagcatgcctaaggtacacctcagcagttccagaattctgctgcgagtggtcctccatcaaactacttcacctctctgaagtctagttcgcttacctgtaaaggaaagataataaccaactctaacctacttcaccaggttgtcaaggattcaaataagacacacatctgtaaaagcactttgtatgtcttaatggaaatgttagatattgctttcacatatgttacagataactggctattgtttcaatcaagtcagcggttctaaactttggctgcaaattagaagcacccggaagcttcaaaaaatccaaatgcccgggccacaccataaactaagccagaatctcttccgtgggacccaggcccagtactactttgtgtgtgtgtgtgtgtgtgtgtgtgtgtgtgagatg

SEQ ID NO: 390022 - DNA, 462 bp, Homo sapiens
caaaaatgcatttaatatgcctaacttactaaacatcatagcttagccgagcctaccttgaacatgctcagaacactcatataagcctacggttgggcgaaatcatctggtaacacagtacactgtagtgtattggctgtttacccttatcccatggctgaacgactgggagctatggcttattgccactccccaggaacacaggagagtatcactagcccaggaaatgatcgaaattcaaagtatcgtttctacttaatatggattgctttcacaccatcataaagtttacacattttaaagtcaaaccatcataagtcagaaactgtctgtagttatacatagcagtcctcatgaatacattaatgccattatcacaggaatgggttccctattgtcagagtgggtttaccccctcttgttcattctgtcttttcaccatgtgatgccttctgtcctgtt

SEQ ID NO: 390023 - DNA, 455 bp, Homo sapiens
gctaaagatagggatttttaagaggagcaaaattagagcaggattatgtgctgcctggaatgatacagtagataagggatgtaatctgaatctaccgcataactgaaggagttgctcttagacaggaacacaattcatcaatagtaacaagagtagagaccacatatatggcttcaggtacaggtaggaagagagacatgatggtggaatcacatggaagctttcttctcatttattccattttctcagcaaaatacaaagccaggtcattgacgaaagtgaggatgggggaggaggacttgaacatgtgatgagagaggagaaacaactgtgaatggtcctctaggaaagtggagaaggaaagaatcagagaaaatagtgtgattatctggaagcatgaaaggaccaactctgtggccctgaacctcaagtgagaatgctgagcaagtcgtgca

SEQ ID NO: 390024 - DNA, 260 bp, Homo sapiens
gcttaccaggtgaggttgctgactttcttctctagagtctgtagagtagagtatctacacaatattccatttgtgaaaatttgcacaatagactagataaacaacggattacggagaaaacagccctaatactcagaccctaaagcagtgctaggttaacaacaaggtgcttacttgcttggggtgccagccaaagtcagaacaatgaggctttcatggacttatccagaattttataactgataaaaagaaatcatttt

SEQ ID NO: 390025 - DNA, 319 bp, Homo sapiens
aatgttaaagatgacccctgggagtaactagcactacgggcatgtgcccccatcttgagaacatgccatgatgcacagacagaaggtatactaggtggtgcgtgcacaagtgaattactcccccagatccagccgtatgtcatatagtacacatggaggggtcaccaagatattacggcacaggcaaataagacacagtaagcattatcatttccattttcaagataaggatattgagctgaggtcacttgcagagttggtaacagctgaaccctgagctaacgactttgtcttgcacttgaaaacctgtttctctccc

SEQ ID NO: 390026 - DNA, 224 bp, Homo sapiens
agaccggctactgaggctcccagcacgctctctccacacatgatctcccctctgggtgtttgggtttttctgtgttttcatctttttttttttaaacctgttcagtgctgccagtcaaccgagggtctgtgagtggcagcgtgggatcaggcagcagggatttttccccacctccccctgctttggttccttctcaggactgagccaccgggctgtgggggaag

SEQ ID NO: 390027 - DNA, 577 bp, Homo sapiens
tgcaaccttgaccccaggacttaagcgatccttccacctcagcctccctagtagctgggaccacaggcgtgggccatgatgcctggctaatttttgtatttttagtagagatgggggtttcaccatgttgcccaggctgatctcgaactcctgaccccacgtgacccacctgcctcagcctccctagtagctgggaccacaggcgcgggccatgatgcctggctaatttttgtatgtttagtagagataggggtttcaccatgttgcccaggctgatctcgaactcctgaccccacgtgacccacctgcctcagcctcccaaagtgttgggattacaggcctgttataagttttgatgttgaaagcacaaataagtctttgtgcttagagagaactggtctctacaaaaacaagaaaaaaaaatcagccaggcacagcagcatgtgcccctagtgccagctactgaggaggctgaggcaggaagatcaccggagcccaggagtttgaggttacagtgagctgtgatcactgcactccagcctgggtaacagagcaagaccctttctcaaaaaaaaaa

SEQ ID NO: 390028 - DNA, 1214 bp, Homo sapiens
aataataataaataacattaaagttaaactcgactctaattttcagtttacagaaaataaggatgatggaagaacaagctaaatgacaccatagatgctaactggaaaaacgtacctattaaaaaaggacattgctgtgacaatcaggaaaagttgaacataaagtggctatcaaatgatacaataaaattgtcgtcaattttcatagatttggaaatggagttatatttaaaataagttcttaactgtcagagatactactgaagaagtataagtgacatgataggatgtctgagacttcttttaacatgctacaggggtaaaaggagtgtgaaaggtaacaaaaagggcaaaatgttggctgatgcacatacggatacatgcatacaaaatgctgactgatagatatatggagggggttgttatattgtttctctaatattatgtacatttaaaaattgccataaattttttaaacttaacaaacaaaaaagacagaaatcacaggggaaaaaaaaaaagaatgagttcatatctggaagagcaattaaggatttttttttttttttaatatttctaacctgaagtcacaaaacctggtttacaaacagggctttgctacttacaatctggcctagataacctaaatcaatgtatttgtacataaatacataaatgtccatatctgtagcatgaaaataattgacttacctactacaaaaatatatagtatgtaaaaattaactataaactaaaaaaaataaaatacagatatcttcaatatattttgtgtttaccttcatgtcacatgtgtatgcattatctcttcaaccaaatagtaaggtctctatgagtgaagtccatgttccattcctttaaccagcaaacattcaatgtacacttctagtcagtctactacgtgtcaggcatttcttactaagaggttaagaacacaaaggtgtaagtcgtaggctgtggaatcaaatgcagagatggagtaagatacataattattatgattcatactccaaactacataagcaaagaggcaaaacagttatgtggccaggtctagagtgaggagaagctttctagaggagggaatgtatgagccatatataaacatggaaaaggtctgcaaaactcatgtaggaagaaaaaagagtcccaggcagaaagaccaaaaaacaaacaaaaacaaatgaaaaaaaagc

SEQ ID NO: 390029 - DNA, 356 bp, Homo sapiens
acctcctgggttcaagcaatcctcccacctcagcctcccaagtagctgggactacaggcatatgccaccatgcccagctaatttttacattttttggtagagacagtgtcttgccatgttgtccaggctggtctcaaagtcctgggttccagcaatcaacccacctcggcctcctataaagacgtgagccactgcaggaggctgaggcaggagaattgctgacatatccagtttcttagaaaaaaacatttaatagagacttacaaacagaagctatgtctgggtctcaggtggcagtgagacaagatggtagctttaccccccaagaccaagggccacaggggaggggtgacctc

SEQ ID NO: 390030 - DNA, 304 bp, Homo sapiens
ggcgttgttattctgtgattaatgttactgtcatgggaaccaagattttaagcagaagaggaaagtgatacaaacaaaatcaaagattttaagtaaaaatcctgtaatttttttttttttttttgagatggagtttcgctctcattgcccaggctggagtgcagtggcatgatcttggctcaccacagcctccacctcctgagttcaggcgattctcctgcctcaacctcatgagtagctgggattataggatgcgccaccacacctggttaattttgtatttttagtagagatgaggtttctc

SEQ ID NO: 390031 - DNA, 413 bp, Homo sapiens
gccgagggaaacacaataatgtttgtcagatactgtgtaaactattagctcaaggtaattcacaatttcaatgttagatttcactacattccttttgataatgtcctatctttgtgaagctgagttttccgaacttgctgtataatttggaatctggataaataatttctctattttatctgatgctttttctattttttaaaagtgtttttcatctttcactgtattttccatttatttgcagatagaaacagactaaatgtgagtttgaggaagccctgaagccagtttcaagtatatggtgacatctctctggtggtcaggtggacctgatttttttctatatagcatttcacagtgagtatttttcttcctgtgtcttagccacaatttttaaaatgttttcttttttt

SEQ ID NO: 390032 - DNA, 825 bp, Homo sapiens
aaaagtcaccatttaaggggtctgcagtccaattcatcagttgtctttagtttactcagcatcagctactaacatacctgaacgaagatcttgttctaagacattgtatgtgaagatgatacctgcaaaagacatggctaaagttatgattgtcatgttggcaatttgttttcttacaaaatcggatgggaaatctgttaagaagagatctgtgagtgaaatacagcttatgcataacctgggaaaacatctgaactcgatggagagagtagaatggctgcgtaagaagctgcaggatgtgcacaattttgttgcccttggagctcctctagctcccagagatgctggttcccagaggccccgaaaaaaggaagacaatgtcttggttgagagccatgaaaaaagtcttggagaggcagacaaagctgatgtgaatgtattaactaaagctaaatcccagtgaaaatgaaaacagatattgtcagagttctgctctagacagtgtagggcaacaatacatgctgctaattcaaagctctattaagatttccaagtgccaatatttctgatataacaaactacatgtaatccatcactagccatgataactgcaattttaattgattattctgattccacttttattcatttgagttattttaattatcttttctattgtttattctttttaaagtatgttattgcataatttataaaagaataaaattgcacttttaaacctctcttctaccttaaaatgtaaaacaaaaatgtaatgatcataagtctaaataaatgaagtatttctcactcattgcaagtata

SEQ ID NO: 390033 - DNA, 859 bp, Homo sapiens
ttttccttttagtatccaattatctgaaacttaagaagagtgtgcaccgcccaatgggtgtgtgtatgtgctgctttgaacctatagttgagatccagagaattgggagtgacatcatctgtaacaataaaagagcctctcttgtgaagatgatacctgcaaaagacatggctaaagttatgattgtcatgttggcaatttgttttcttacaaaatcggatgggaaatctgttaagaagagatctgtgagtgaaatacagcttatgcataacctgggaaaacatctgaactcgatggagagagtagaatggctgcgtaagaagctgcaggatgtgcacaattttgttgcccttggagctcctctagctcccagagatgctggttcccagaggccccgaaaaaaggaagacaatgtcttggttgagagccatgaaaaaagtcttggagaggcagacaaagctgatgtgaatgtattaactaaagctaaatcccagtgaaaatgaaaacagatattgtcagagttctgctctagacagtgtagggcaacaatacatgctgctaattcaaagctctattaagatttccaagtgccaatatttctgatataacaaactacatgtaatccatcactagccatgataactgcaattttaattgattattctgattccacttttattcatttgagttattttaattatcttttctattgtttattctttttaaagtatgttattgcataatttataaaagaataaaattgcacttttaaacctctcttctaccttaaaatgtaaaacaaaaatgtaatgatcataagtctaaataaatgaagtatttctcactcattgcaagtata

SEQ ID NO: 390034 - DNA, 379 bp, Homo sapiens
ttcatgatcagcaagcaaatttaccgtatttttatttagaaataaattaaccagggaagtatgtggttctccctcccctacccaccacttttagttgcacagaaaaattcatccttgtcactacctgtgtccaggtggtctgcatcttcagaactgtggatatggataattggaataagattacttttgcaaatataaaactcatcagattacccacttgaaataatgtaatttgaaacacttgatagtaatttttgccccataaaaatcctacgtgtttgaaccttttgctgtttgccttgctcattttaaaaccaaagtttgtttagtcctatagctaatgtttgtcataggcagcatttgttacaaaatgatttta

SEQ ID NO: 390035 - DNA, 2224 bp, Homo sapiens
cagcaattctcctgcttcagcctccccagtagctgagattactggtgcacactgccacgcctggctaattattttagtagaggcggggtttcactgtgttgcccaggctgttctccaactcctaagcccaggcaatctgcctgtctcggcctcccaaagtgccgggattacaggtgtgaaccgccacacacaaccccaatttttgtttaaaatttgcatccacattaacaaaacttttattagaaaaattcatttaatatctaggcaaaattatatcactttcaaaactttttaagtaaattcagtaacatatcaattcagtttattagcatcaaatttgatgaagcagtgcataaatggaaacaaaacagtttatcaatacaatatatcattcttcagattttgcttattttttgcagccatttattacatttaaaattttgtgcatattgtctcatttgaaaaatgtgagttattctgttttatttgtattatgaaatgtttctattgtaaataaattcttttacctgtctagccaggtcacaagtttttcccattttaggagcttcaaatttagcttgttcatatgcagcgtgatattagggagaaaatgtgaatcacagtgctactttttgtctttgattgaatatttggtaagcatttcttttgtttcaaggaaatcttgaattggattttctagtacaggaaatccttataaaattcttttgtaagtcatccaggtaacattggtaaagaaacaagatcattagatacattgtcttttttttcagaagtttcataaactgtcaacattctatagcttttgtgcatatgtactgaagaattataacacatgtatccgtgactcgttcttggagtctgcttcagaaaattgaacacaaatattttcagtatgtatcatgcatagaatagagcaatgagggaaaagttatcctcttgctttaaaattccaacatggatggtcttttgacttaacttagctggagttccatccttgtgatagaaactaacttttctgtctctaactgaaattctttgacagatggaagattgtcaaaaatatctgccatgagtttgagcctttaggcaatgaattcacatttcattgcctttacatgaatcgacattgtaaatttggaggttctttgagacagaatatacccagagttttctttgggcagtgtcttgtatcaaacagttcatctaaggctaaagaaaaatacttgaaatttttcaagatttgaattaattggtctttattattaaaatataaatattctattagcaaaaatatattctgttcatgtatatccaagagcaaaattgtttaatggtttcattgacgttttcagttttcatgaatgtcttttaaggtcttttcctcataattttctaaatacgataaagtgataatttcttcatctctccatctaaggttctttgtagatgcatgtgtaagaagctattttatagcttgccaggtttacaaactcagacccttttaaaagttgtttaaattgttttgttagaaatttcactcgcagttcatatgagtaattttgtgtattcttttttgacttacactcactaaatggttgctaaaaattacatgtcttaaatattgtcttaagtattatctactatgtatctttaacacttttgaatagaacaaacagcttttccattttgctctgctgcagtaaattgcaattgccattcatcattaaatgtgcactatactgtctctagtcttcttgactatgccagttgtagtaccagcttctgtatctgcactgaattctgcctcagtaatatgcctttgtttaaaatttaaatattttttcatttttttaacctagaaaataattataatgaaaatattaagtatctcattttaggattctgatttacataggtatcactgtaacttgtgctgtttgcataggtatactctatcttgtgctatctgcataaaatatccaagtaaacacattgtgattttacatccgtgcatagaaaaaaaaatcatctgaactcaaatcaatctgttgatactgactagattggtgacgtgtttatgtgtaacactagtgataatgcacgttcctgtacaagcattataatacaacagtgtcctatgcaatgcagtggttaaagtgaattgtagttctatcaaaataaagatacgtttagtggaaaaaaa

SEQ ID NO: 390036 - DNA, 173 bp, Homo sapiens
gaagacaatactgatgccagctctttgtaattgtgaaatctgtacccaaacctctggattagaatctccagttgtctactgtaaatactggaattacagcaaaggatatggggactgggctgcttttctgtattgtacaagcactattctagatattaaagaaatttaaccgc

SEQ ID NO: 390037 - DNA, 143 bp, Homo sapiens
cttgtaaatttgcgttttctggcatctcctaggtgatactgctggtcttggggactatcgtttgagagctactgctctggcactgcaagcctggaggtggctctcagcaggccctcctattagcttttgaacatttggacttt

SEQ ID NO: 390038 - DNA, 305 bp, Homo sapiens
tatgagtgagcatgatctggtgatgagcatgggtaacactgaagaactgtcatttatctttccataacgacaaggcacatgacctgtttgcaacttttctgtagtttcagaatgtacactcactcctcatcaactcttcagcaagcccgctccataggacaagcctcagtctactgtgactcaaggaaggcatgaaatccacctcaacgtcattgtcccaaaagttcgctgtattgttctgaaggaacttgtctcaaccagcctggggaaccctcatctcacagatcactgaccacccgcatccc

SEQ ID NO: 390039 - DNA, 370 bp, Homo sapiens
tgagagctggggccagtttgattcagctccgtgtccccagtttgccatctctcctgtacttgctaggtgcccagtaaacatttgctgatagaatgaaggaagaaaagtctgataaactaattgagatggtgttactgtgatttaatatgtcatcccacactgtgagctactttttaagttccagggagaagataagatttaaatcataatttaattctaccatttaatcgtaatgatagaattcaaggacccatgataagtaggtgggatagagacactgaacaggtgtgaattctacccaaaattccccagatatctacgttggtacctgggggctctgccagccacagtcaagtgcagctctgcagag

SEQ ID NO: 390040 - DNA, 531 bp, Homo sapiens
atagatggagtcttgctatccatctatggagacagcctagttgcccaggctggttttgaactcctggcctcaagtgattctcctgcctcaccctcccaaagtgctgggattactggcatgagccactgcaccagcctcttaaagcgcctttaatcaataggttccctgcctcttttcttgtttatcccccctacctcttttttatttgtggaggagtctagtcatttgttccccggagcttcccacatgctggattttgctgactgccttcctgtggcaatctgcgtcttcatccccagaatttccaggacacttgtagttaggtctagaagctggacttgattcaggcttaatattttttagtaagtatacttgatagcaggtggtgtacacatccatcaggaggcacacaatgttcagttgtctctcttttatgacacaaacagtcactgatgatcattaactggatctattctttcaataacggtttgtaaaatggtaaaattctatcattccctcttcatctataag

SEQ ID NO: 390041 - DNA, 680 bp, Homo sapiens
ggtcaggttgcagtcctgatcagtcaggcattcaaactggactgataattatcaaagtggaagttcacagaaagagttattataattgaggaagtaaaaaatcatgtaacttccacattcaatactgtaatttaaaaatagatttttttcacaataaccatatacaaaataatgtatttaacacataaaaccaacaagagaaaacccacaattctttctgatcacacaaaaatctatttagaatgttaaaattattattttttctctatgcctttgttgttctacttaaagtatacaaacatcatactgacatagattacttattcacttaccaaaaaggagatgtagacaatagaacatctaaattgactgaaaaatctaccaaggcttttatatttaaatcacaggcaaaatggtacatgttatcttcaaattagggtgactaaacattttggtttgcccaggactgtcccatatttggcatgggaagtcccatgtccacaacacccctcagttccaggccaaacaagacagctggtcaccctacctcaaacaacagcacaaacaaccagaataattatgttctttaaactctcaccttatatacaatttataaataataacaatgaattcattgaataaagaaataaaatattgagttggctattttacattataga

SEQ ID NO: 390042 - DNA, 287 bp, Homo sapiens
aacacatggacacagggaggggaacatcacacactggggcctgttggggggtgggggctagggaagggacagcattaggagaaatacctaatgtagatgaagggttgatgggtgcaacaaaccaccatggcacatatatacctatgtaacaaacctgcacgttatgcacacgtgctccagaactcaaagtattatatatatatgaatgaaggtagattttatttaataagctaatttcttgtagtctatattattgcaacaataaaatatatataaagttgaaaaaa

SEQ ID NO: 390043 - DNA, 328 bp, Homo sapiens
caggacgtagccttccgggacgcattactagggcgacggccggacgcctccgcgttacgggatgaattaacggcgggttccgcacggaggttgtgacccctacggagccccagcttgcccacgcaccccactcggcgtcgcgcggcgtgccctgcttgtcacagaatcatggtgtcatggaaagggatttactttatactgactctgttttggggaagcttttttggaagcattttcatgctgagtccctttttacctttgatgtttgtaaacccatcttggtatcgctggatcaacaaccgccttgtggcaacatggctcaccctac

SEQ ID NO: 390044 - DNA, 415 bp, Homo sapiens
cctatgccccaggaggaaagccagggtcttctgtatcccagtgtgtgctgaatgatgttctatgatcactggccctgacacatttccctgactttgccttccaaggtcctcatatgcccaggactgccaaggctcctgagctaatcatgaaaatggcaagaattagatcagaagacacaaactgcctcccatacacagacttaggaattaaattgtgctgtcaatcagaccctgcaagggacaagcagtagaggtccctcaggccttccaatggcaacttttccagttactgtgttgaaacatttttttccataatctttgtggacatgctgaccaataactttgactccttgtaggactagaaccctagccaaagacccatctaagcccctctctcagggtcttgctgccatcc

SEQ ID NO: 390045 - DNA, 303 bp, Homo sapiens
aataggaagtatggtttattcccccatgctaatctggctagattaccctctggactattggtcacatcctgaccataccgtgttagtttttacaaaaaatagcatttacagctcaacctgcattacaaggaaaaaatgactatcaagacttcacaatagtggtcttcaaaacattacaaatttccaaatgtcaaaaatcgtgagacatctccaaaccacatcaacagttaacagaaagtcatatttgtcccttgaaactgcctctacaaaattataaaagaggaaattatgtcagtggaagaa

SEQ ID NO: 390046 - DNA, 228 bp, Homo sapiens
tctccctttcccattgcaatttgcttattatatcatttgcttattatatctgcattgctagttatatgggattcaaaagtattgtgtgtgccttttcttctcccctcacacgtttcccgcacagaacacttagtagtgcttatcactgttgaattcttacatttattgaattaattattaaaagtgtatccataatctgtttccctccctgagcttcctagaggaggc

SEQ ID NO: 390047 - DNA, 295 bp, Homo sapiens
atggccaagaccaggttttagtgccaaaacaggttatggaagggagaaatgaagagacttggctagaaggcgtggtcttgtctagaggaatcctcacagacagcagctttcagggagaatagaagtgtgtgtgcgtgtgtgtgtgtgtgtgtgttttccggacttttaaaagtgtccaactctcagttaatctttctaaatccagacaagggaaggcttcattaatgaaggtctctccagatgcaaattttcctcactaaagacagctttgcagggacacttctgtttgctgacc

SEQ ID NO: 390048 - DNA, 1917 bp, Homo sapiens
  misc_feature (1)..(1): n is a, c, g, or t
  misc_feature (3)..(3): n is a, c, g, or t
  misc_feature (7)..(8): n is a, c, g, or t
  misc_feature (1461)..(1461): n is a, c, g, or t
ngnacgnngagccagcaaaccagctcccactgcccctcccctgcccgctgagagtggcggctagcagggtgggggggcaggaactgaggggtgcggatccgggccccccagcctgcgaagcgcactcgcaggtcgagcgggcgtcgtccacccttcggagccccgctttcatgcgtgaaattcccagaagtcgcctgcgaccgcctccctgcttcaaacaccagagagggcccggggtcctggccggagacaggccgaacctccggagctgcttctgcacccggtacattgatcgatctgatgggctgcgcgcccggaagagctggagagatgaagccagcgtccagcttctcccccaaaccacagcacgccgagctttgtccccggggagcgtgaagtcaccagctccgggaggcgacaatatgagggcgatggacggggcagggacccccggaagccccagcaatcctcagggaagtgggggtgccggaggagtcggggacaccctcaggcctctccaagcccggagcatccccagcgcccgcagccctgtgagacgccgggtgctctggtaatgggccctgccgccaggcctcggcgctttgtccccggcccgcccggggatgctaccacgctagagttgtacaccaaggtttgtcttcccaggaagcgctggcggctgcctttgggccgcctggcgcggagccccaggctgcaggcgccgcgtgtgcgggcgggaagttcccacagttgcaaagaggcagcgaagtatgtgttccaaactttccacggttccaaactgagcgcttccattaagagaagcggtgtgcgggggaaaagcattctgggtattagcatgcaaatgaacgggcccggcttccaactccgctcgggattcccaccgctgcgcgccgagctcgcgcccagccacgcgcgccctgaggcttccgggcgttgccctggcggatgatccgagttcaaaatcgagacctctgccttctggtttcgtgtcctggtgcttagtcacttggcctccctgagattcagttaaactgtttcttaacctgtgcacagggacagcagcacctgtcctgcacacctccgctctagggcatagtacatgccaaactcctgttggagagaatgaattagaggcatgaagaaagttccctggacacgaagccaggagatctgtgttctaagcccagactcactgtcaccttaggctagtgcctccctctctgagccacagctttcttgggcggattttgggaactggcacgttttatttttgagagagctgctgggaacatccacaaagaaagagaaaggggccgggcgcggtggctcacgcctgttatcccagcactttgggaggctgaggcgggcggatcacctgaggtcgggagttcgagaccagtctgaccaacacggagaaaccccatctctactaaaaatacnaaactaggccgggcgcagtggctcatgcctgtaatcccagcactttgggaggtcgaggcaggcggatcacctgaggtcgggagttctagaccagcctgaccaacatggagaaaccccgtctctactaaaaatacaaaattagccgggcgtggtggcacatgcctgtaatctcagctactagagaggctgaggcaggagaatcgcttgaacctgggaggcggaggttgccgtgagccgagatcgtgccattgcactacagcctgggcaacaagagcgaaactccgtctcaaaaaaaaaaaaaatacaaaattagccgggcgtggtggcacatgcctataatccgagctactggggaggctgaggcaggagaatcacttgaacccgggaggcggagttgcggtgagccgagatcgcgccattgcactctagcctgggcaacaagagcaaaactgtttc

SEQ ID NO: 390049 - DNA, 1443 bp, Homo sapiens
tacagacgtaagccaccatgcccagcctggatattttatttagttggaattatacaatactgtatgtgaccttttgagtctggcttgtttcacttaacgtaatgttttcaaggttcattcatgttgtagcatgtataaatactttgttcctttttatgactggctgaatgatacaccattgtatggatatactacctttatccattcatccattggtggccttttggttattatggatagtgcaactatgaacatttgtgcacaagtatgtatttgagtgcctatcttcagttctcttgggtgtatacctaggagtggaattgctgggtcatatgatggttctatgtataacttactgaggaaccaccaaactcttccacagtgactgtaccattttgcattcctaccacacatgtttttataaataattttagtgctggtcaaacctctcattttatgaatgagcatgctgaggcccagagaggttaagtaacttgcccagggtcacacccttagtcaggatccagactaaaaccaaactttcctgagttcctagactttcaaacactaagagcctcccatgtcacctttaaagacctcgactacttgcccgagttttcattaattgacttagaaacctgcctggtgaacaactgagttagccgtatttatgaagctttttttctctcaacatctattgaaagaacccaccgccatgttccggatttctaggccacaccttgaaaacatgcagagctcacaatccctgcatctgcctcctgctgctggcctgtcgggccctcttctgttgccatggaaaccatgcacctcagttttggcagcagaccagctggacagcgaactgagaatatccttgtctcctaggctaagcagagctgtcaaggtcatgtattcattaactagatttgtatttattgatcacctactaagcaccaggcttttgttttgtaagatgctagggatacagcagtgaacaagccagaccacagatcctgccctcaaggaacccgtagtctagaggagacagacaaaaaccaaggaacaaaaaaggctttacctggctcctctccctagttcacattctcccaaccttccaggctgtgctaaaatccacttcccctggaccatccccggaagagcccaaatgcaggtgatagctcctctcaggatttacattgcattttttgttgttactccctgattgtaaaagtgctatgtgcattgtggaaaatgtaggagatacacaaaagcacaaagaagaaaaattaaataaagatctgtaatttcaccaccaagaatgccttctgagatctgccgagggcctcactcaggtgcggagcaagtggttctgtctcggccatgggatacctgtgtctgacctttttttgtgccggggtaaatgccggtccctatgggcttcaa

SEQ ID NO: 390050 - DNA, 1678 bp, Homo sapiens
  misc_feature (1)..(1): n is a, c, g, or t
  misc_feature (3)..(3): n is a, c, g, or t
  misc_feature (7)..(8): n is a, c, g, or t
ngnacgnngagccagcaaaccagctcccactgcccctcccctgcccgctgagagtggcggctagcagggtgggggggcaggaactgaggggtgcggatccgggccccccagcctgcgaagcgcactcgcaggtcgagcgggcgtcgtccacccttcggagccccgctttcatgcgtgaaattcccagaagtcgcctgcgaccgcctccctgcttcaaacaccagagagggcccggggtcctggccggagacaggccgaacctccggagctgcttctgcacccggtacattgatcgatctgatgggctgcgcgcccggaagagctggagagatgaagccagcgtccagcttctcccccaaaccacagcacgccgagctttgtccccggggagcgtgaagtcaccagctccgggaggcgacaatatgagggcgatggacggggcagggacccccggaagccccagcaatcctcagggaagtgggggtgccggaggagtcggggacaccctcaggcctctccaagcccggagcatccccagcgcccgcagccctgtgagacgccgggtgctctggtaatgggccctgccgccaggcctcggcgctttgtccccggcccgcccggggatgctaccacgctagagttgtacaccaaggtttgtcttcccaggaagcgctggcggctgcctttgggccgcctggcgcggagccccaggctgcaggcgccgcgtgtgcgggcgggaagttcccacagttgcaaagaggcagcgaagtatgtgttccaaactttccacggttccaaactgagcgcttccattaagagaagcggtgtgcgggggaaaagcattctgggtattagcatgcaaatgaacgggcccggcttccaactccgctcgggattcccaccgctgcgcgccgagctcgcgcccagccacgcgcgccctgaggcttccgggcgttgccctggcggatgatccgagttcaaaatcgagacctctgccttctggtttcgtgtcctggtgcttagtcacttggcctccctgagattcagttaaactgtttcttaacctgtgcacagggacagcagcacctgtcctgcacacctccgctctagggcatagtacatgccaaactcctgttggagagaatgaattagaggcatgaagaaagttccctggacacgaagccaggagatctgtgttctaagcccagactcactgtcaccttaggctagtgcctccctctctgagccacagctttcttgggcggattttgggaactggcacgttttatttttgagagagctgctgggaacatccacaaagaaagagaaaggggccgggcgcggtggctcacgcctgttatcccagcactttgggaggctgaggcggcggaagagcccaaatgcaggtgatagctcctctcaggatttacattgcattttttgttgttactccctgattgtaaaagtgctatgtgcattgtggaaaatgtaggagatacacaaaagcacaaagaagaaaaattaaataaagatctgtaatttcaccaccaagaatgccttctgagatctgccgagggcctcactcaggtgcggagcaagtggttctgtctcggccatgggatacctgtgtctgacctttttttgtgccggggtaaatgccggtccctatgggcttcaa

SEQ ID NO: 390051 - DNA, 477 bp, Homo sapiens
tttaaccatttttaagtgtacagtgtaaggcactgaaaccgcctttgcaaaagtataactgaggaaattatgacagtgaaagaaatcagacctaactgactctatcttgcttctaacccttaagctgtccttgttcgttcctgggtgtaggcggaactaactttgggaaggaattccgttcatgatttgactctgaaacaaagttgctaacagccctttcctgaaaaagactcccttcttgcctggggtccagtctgcctttgcaggactaacaaattagctacaagattagaaattacagtttaggggtcttgctgcttccggatccaagagtctgaacctctccaaatttgctcctgtggataacatcactattgtaaaacctaagagcagtgcttgagatattttgcagaccctgcactcgatggatcagctgacaccacctggaccagtaacctggcccaaccagttctgcca

SEQ ID NO: 390052 - DNA, 463 bp, Homo sapiens
gcgatgaacacacagtacgtgtgtctttttggtagaatgacttactttcccttgggtagatacccagtaatgggattgctggctcaaatgttaattcaattcttaggaagacatggtgcatctataccatggaatactatgcacccattaaaaagaatgaaatcatgtcctttgcagcaatatagatgcaagaggaggccattctcctatgtgaattaacacagaaccaggaaactaaatatcagacgttctcacttcttactgggaggtaaacatcaagtacagatggacataaagatgggaacaataaacactgagcaattcaatggggcaaggaagggatggggcaagggttggaaaactattgagtgctgtgctgactacctgggtgacgggatccttgtgctccaaacctcaacatcacacaatatacccagggaacaaacctgcacatgtacccccg

SEQ ID NO: 390053 - DNA, 798 bp, Homo sapiens
caggtgcatgttttaacttccccggagaccaaggatctggctggtttgtctcccccaacttctcccttaccccatgatcttcaggagatcacctcatgatcttcggtagcttattctagtattttggccaactaattgtcagaaagttcctccttaagtttaatctgtgtttcttctattttaatttaaacattatttggatttattttagctggtaaataaatatctgtctgagatttcttagcccgacataacaaagtacaatagacttggtggcttaaacaacagaaatttaccttctcacagttctggaagccggactttcaagatcagagcaccagtagggttggtttctggtgagtgctgacacagccttttctctgtgcaagcaggcggagagcaggagatcaagctttctggtgtctctcttcacatgggcccgctaattctgccagagcagagctgtacccccatggcctcatctaactctaattaccctctaaaggaccatctttaaatatcatcacattgggagttagggctttaacacataaatttacatttagtccataacatcatcctatctctgtatttctttcctttaggtttaataaatcagaaattctaaatatttcagaagacttactttatattctttgaaaaaaattaattaatgactttctcttagtcctgtgtatttctttcacctttttaaacatgtgatgctgcacaactatatttaacacatatatacacaaacacatatgcgtgtgtactgtctagctagcacccaagaaa

SEQ ID NO: 390054 - DNA, 391 bp, Homo sapiens
cctcaccaagtgcccagatgcactctgggtgttgagcagcaccatcactttccttgttcaggacccagtgctggacacaatgcttcttagtgtgtcctatcattgcatttgtcaggtatttactgagcatttaccaagatgctgtgagggtgtgtggggataaagaaattaatcagtcaagattctacctttcatgtgctcatattcttggtgaagaatagaaagggaaatatgggacaaagaaatagaaagcatgtatccacagcattaattcatgacagaaaatatggcaagataggtaaaaatgccttgctgtgggaggaagaaattacgaaggaggacagggaaggcttagtgaagtatatgaactaggctttgtgaagagtgaaga

SEQ ID NO: 390055 - DNA, 430 bp, Homo sapiens
ctcagcccctccctgcttactccctccttcacgggctccatgtcaccatctgtggcacagtccctctctgtcactctccctgccaccccctcattctccttcctccctcctgcctctctctgcatctctccctctcacccgtgtctcctctcctctctttccttctcgtcttctccctgtcacgcatctctcatcactccccctcattctgcctttcctcctactcacggtctcctctccctctccctctctctctctccccctccctctttctctctctctctctttctccacctcctcccgaccccctttcccctctatttctattggcttctgtgtcccttgctcccctcttctcttcctcaccctgggaagcttctcccccctatccttgcccctgcccccccaggatgtgtcctggagatggggg

SEQ ID NO: 390056 - DNA, 398 bp, Homo sapiens
tgggtgtgctgggttctcctgggtgtgctgggtctttcctgggtgtgctgggttctcctgggtatgctgagttctcttgggtgtgctgggtcctccctggtgggctgggttccctcaggtgtgctgggtccttcctggtatgctgggtcctcctgtgtgtgctgggtcctccctggtgggctgtgttccctcaggtgtgctgggtcctccctggtatgctgggtcctcctgcgtgtgctgcgtccttcctgtgtgtgctgggttcccccaggtttgctgggtcctcccaggtgtgctgggtccccccgccaggtaacccctagtcctcctggggcatgctaggatcatttctcacaccagacacaaaaagcctcccccagggtggcctcctggctgag

SEQ ID NO: 390057 - DNA, 335 bp, Homo sapiens
acctgcgcaggtcaggccacagttttctaccagccctctgtgggctatggttacaatcgttttcacgctgtttttgcaatgctatttggatgtatcctgcctatggccctaccagtagtttgtgagttcagtctttgatgtgctgattaggaccaggtccatgtgcatgcagcttgaggggatcatcctaggagtttgtaaacagttttatgggttagcttttctgagctcctttctcttcttagtgtctctggttctttccagttccctggggctccaaaagggagaaaatacggtaaactcgccaccattttggtgatagtttaaattttggt

SEQ ID NO: 390058 - DNA, 172 bp, Homo sapiens
ttttttaatcaaaacctaacttggtccgacctaccccatggctgaccacccaggcacttgcttttgacttaagggtagcaccatacgatgtcttctttttgtttttcattttaacaacctgtatttttcacatcacaaaacctttctagatattcactgtagaaaattcaga

SEQ ID NO: 390059 - DNA, 731 bp, Homo sapiens
cggatgcagagtgtccgcatgtaagtatacaaggtctctggatgcaaagtgtctttcgtcccaaagtattccagctggtctttcttattaggaagaaactactagactaacagtttgcgaacttgtttcctctccagacccgactaagactgtgtctggttggtcgcagttacttgaccttttaatgctgaatccttttttctgaggaatcaggctagcagtaccttccttgcctacttcacagcgttatcagagcaagtcagataatacgggttaaagtgcttgattattcaaatgggatatttcaaaaatagtggctttcttgttttcaggttgtgagcatggggaaaaaaaaccggaaacaaaacaggaacggaatcagcagcaacattaaggcagtgagccattttacaggaagaatgagcacagggcaggaataaatgctatttttacttttgatttgtggctatcacagtgtattaaaggttcttaacaaactgctgttttctccgcttacgttactaggaaatgtagagatggaacagtaaagcccagggtgcagttcttatctaatatttgtaaccctgtgaagtaggtgctgttatatattttatatgtgagggaacatgattttagaggttaagttacttgcacaggatcacatggataagtatgcattgtgaatttggttgtgactgaggacattttaagcaaattaacatcttgtgctt

SEQ ID NO: 390060 - DNA, 385 bp, Homo sapiens
gtagctggatttacaggcacgcaccaccatgcccagctaatttttgtatttttagtagagatgagatttcaccatgttggccaggctggtcttgaactcctgaccttgtgatccgcccgccttggcctttcttatattttttcttgctattggaatgtgacagtttctacctgcagttgtcttggtgatgttctgagtcgcatttctccttttgacattgttttcccatttcctaattgtaaacacctctattatcagtatatttgggacatcaattaatgtcaggatacacagatctcatttaaaagtagtgtagtattccactgtacttattcacacagtagcttgttggtggcacagtgtagcattcctcgaactttttttc

SEQ ID NO: 390061 - DNA, 458 bp, Homo sapiens
taggcttttgtggattacatacttcattgacagtgactggttcagaaatgagtatgtaatccaacaaaagccaaagagaggccaggtgcggtggctcaggcctgtaatcccagcactttgggaggtcaaggtgggcaaactgcttgagcccaggagtttgagactagcctgggcaacaaagtgagaccccatctccacaaaaaaataaaaaaaatagccaggtgtggtgacagagcaagactgtctcaaaaaaaaaaaaaaaaaaaaaaccccagagaccaataggggggggcgggccagaaccctgggggggttacgaaccctttaaatggggtttggcccaacggggaaattatccaaggcttgaggatccttggggattgggcaaactcgttttgaaaaaaaggtatatagatcataaaaatttttaatggggaaccttgtggcccaaggtcaag

SEQ ID NO: 390062 - DNA, 248 bp, Homo sapiens
tgttacttgagactgtctgtccttccttcttcagtgcctctttctttaatacgatgttaaaaccaggtactgtgattgctcacctgagttttggttcttaagaaggtacttttttgtgtgtggatagttgttcaatatggtgttcgtgcatggagaatgattgcttgaggcttctatttagccatcttgctccacttcctctcaccaggtgtttttcattatgaagggaatattggattttgccaaat

SEQ ID NO: 390063 - DNA, 239 bp, Homo sapiens
tggagctgaaaagtaaaataattgaacgaaaaattcactagaggaactcaagagcagatttgaactggcagaagaaaatagtcacagaaaatacagcaaggtctttctgatccagtctgagaaacaaaatgaaggtgaaaaaggagaataacaaggagaagaagaaagagggggaagaggaaaaatgaccaggaaacaataagaaattaataaggacataatattaaggacataataag

SEQ ID NO: 390064 - DNA, 544 bp, Homo sapiens
ctggacatgggcagtttctccagcacatccacacatgcacatacagtacacacacagggtgggtggagcaggtaagtggaaccactccacctgacttgcacccccacgggctgtcagcacttggcaggacatcccagtcctcagataccagaggtttgagggtaagaactgaacacactggggctgggactagcccagcaatgggactgagggcctgggtggcgggggcaggtgaagggggcaaggcttaagtccagaaggcagtgacagctcccaaaccaacagaccctagagcaggaagccccagggtcagggatgggacaagcaagatgggtaagctctctagtggctgctgggagccttgagtcctagagcctcctgtcccgttccccttttcttgctttcctggtatagccccaagctcggcccacttttccctctcccctgaagcctgcctaaacaccactaccccttggggaacctttaccctagaatgtcatcttaccaaagctccctcctcaccacccacgcctggcacccaagc

SEQ ID NO: 390065 - DNA, 505 bp, Homo sapiens
gccagaaagggtcaaggcagcagacaggcatcaggggttagctgtgaccttttgttcctattattagatcctcagcagccatctgtcccattagcctccagcttgtggtggtgcttgggcctcaccaactcctggtacctggccagggctagggtgtggtcaggctgttgcccaggagcccagttaccaacctcagggtagggctgccacctcccagcctagaaggccatgagtcacccttccaccagcagctgagggtccccagcgagtttctaaaattaggaggcccagtccaggccttgctctctctcccagggctgaggcccagctcacgcagccgcccctccagagaggagtggatggggcccatggcttaggtaatgccccagaaaggaaggccctgcagtgcagatgctcaggcggcctccttaccccctgggtctcctgctgcttagcagccccaaagccctgtcttcccccagcccagcccccacccccacacaag

SEQ ID NO: 390066 - DNA, 175 bp, Homo sapiens
attcaggataatttctgattctgcctctcttcccctttccccatagtgttcattttaatgtttctgccattcatttgttcattcagtatttattgggaagacttgtcaagcaccatgataagtggtggaaaataatgattctgacacttgaatggtgttttacaatgtacagatc

SEQ ID NO: 390067 - DNA, 253 bp, Homo sapiens
tcccactgcttcaacgagggtgatgaattttcctggcctcggtctcttgcttggcatattgggaatgacctgagaaggtctggatgccacagaatccttcatgcctccattctgacacttcccccacaaaacaattcagcacatgaaatcaggtccacactggtttgccccgcgtcccaagatgatattccgtggtggtgacgctgccatgcctgtcactcccacctgcccacatccctgtgctgtttcctag

SEQ ID NO: 390068 - DNA, 1842 bp, Homo sapiens
ttttgtatttgaatgcgcatgtgtgtgtccttttaaaactctttccatttgtacaatgacagatttcagattggagttaatctgagcatggaagactatgccctgacgtttggaattaatcccttcattgccttgatgattcaacccatcgtgacgatgactgtggttgacaaccaaggactggggcttcctgttgacattcagcacaaagcaaagccctcgccaaaagccagccagatgctgccacctgatcttggacctcccagcttccagaacttattaagtccatctgagaaactagagccttgggacccagggatgaggaaacttaccgtacagacatgcgggctgaccttcattcaccctgcgggccatggcctctgccatccaactgcacaggcttcagccgaaactctctccagcactgccctaaacagaccaagtgtgagggagggagcatgtaatgaaaagtccacagagaacaagaagccacaagattcggtgctctgaagccattctagatggtttcaggggaactagcttcccacctctgacagggataccatggcaaataccactctttgcctaggattataattctttgtgcacaatgcatcccatcccaaagacagtccacagcaggacttgctccatctctgaactggtcttacccccttaaacctgcctttatatctaggagtttctttattttattttatttttttgagacagagtctcgctccattgcccaggctggactgcagcagcgtgatctcagctcactgcaacctccacctcctgggttcaagtgattcttgtgcctcagcctcccaagtagctgggattaaaggcacgtgccaccatgactggccaatttttatatttttagtagagatgaggtttcaccatgttggccaggctggtctcaaactcttgacttcaagtgatccacccgcctcagcctcccaaagtgctgggattacaggtgtgagccaccaggcccagcctatatctaggagtctcttgatgagcattggtcgacagaaagaagtctcttctaaaaattgttaatgcttttatagactactcatagtctgcgtcataaaacatcatttgcctttcaatttataccttccaagtgaatatgattattgaggattatctaattattatctacttttctctctaggtataaaaaacaccatagatcctatacacacaaaaatggtctttctatcagaaatggactcactcgcctggcaaaaggacacagattagattattctaatctcaaggccccttaggcttatgaattcaaaaaaaaaatagaagaaatgaacaaaaacataaatcacagtttgttattaagtaatatctgaaatgaattagaaagaaaccataagccttaacaatactccaatcacagttaaattaatttagacagaaaagcaaatagcaattgacttgaaaataagaagtggggccgaaggtggatacaagaaatccaggagggctaagatatatcccaaatccaatgttcatcaatgcctacacattcagtacaacctgatggcattaattctgtggttggggaaatgtgaaagtgaaatcgataataccacagttctaaatgtgcactgttggctgaacttatggtgtggtggggggtggtaaaaattaggcttctaagaaaggatgggactctgccctccaggcaaggagtaaatggccccagcagatggaaaactaaagcaaatgtaatcacctgcattttgaaaataggtgtgtttctgagaatttgtttgaattagttctttgtaaataaaacaggattttgaatgc

SEQ ID NO: 390069 - DNA, 1131 bp, Homo sapiens
attttacagatggcttttggcttgcccaaggtcaccaccctctgaactgaggcgtccccaacccatgccgggagctggtggaggaagtggggaagggtttcccgcttctccactgggggtggaggtgggagaaagcattttcagggtgttttgacatttaacaaacagtatgcaaatcacatgcaaatcgcatgcaaatcaccacccatttcttaagcctcgacagcgctggcatgttctgaaataataatgttggacctgtcccttgatgatgacctgggtcgggaggtgcacggccttttccttcctccgtcttcccttcccttcccttcccttcccatctgttctcccttccttcgcccccttcctttcctctccctccctatcttccatttttctcttcttccttcacatcatttgtccaagacctccctggcctgagataaacataagttgcaaaagtggcttcctgcagcccattttccaggttgggaaactgaggcatgggcctaaggtcccacagccacaccgaggaaagcagcccccactgaatgtcaccatgcaccaaagtgcatgttcctcgtgacacaaagaggggagatgacagtggctggagttgtcagagctgctttgaggaagctccaggcctgataggcttgacagggccaaggggaactattgtggaatgtcttggccttgaatgacaggctgctgattttggatctggagaaagctcacactgactcttcctgctcccccagtctgtttttctcctgctactccatccatgtatccctgagtttgggccacagtccctccacttggtttgcatgtcccaccttctttgtttggcaagctcctattcatccttcaaagccctagcttcaatacctgctacttcatgcagccattgcttatccttcaaggagagcctacttccctcaaggaccctgctgcttccagtctcaccttctgactcactcgggatccactgaactgggaggtctgtgtctcctcccagcagagtcatcactacctttggggccgcaggatcacccagcttggaactagatacagaaatgctgttttgagagtgtactgaataaaagattacatgtttgaaaacaaaaa

SEQ ID NO: 390070 - DNA, 448 bp, Homo sapiens
atatttataccctttgattcagaaatgctacttatcctcaaaacatccttccccctgggggaaaaaaactcaagagtaatgtttactatatcactgttcataatagccgagtggtaacaaccaaaatgtctagcagtgaaataatagtggctaagcaaattaggtgtagaagccaggcaaaatggctggcacctgtaattccaccactttgtgaggctgaggcgggtggatcacttaaggtcaggagttcgagaccagcctggccaacgtagtgaaacgttgtctctactgcaaatacaaaaattagcttggcgtggtggtgtgtgcctgtaatcccagctacttgggaggctgaggcaggagaatcgcttgaacctgggaggtagaggttgcagtgagtcaagattgtaccagtgcactccagcccaggtaacagagcaagatgcca

SEQ ID NO: 390071 - DNA, 292 bp, Homo sapiens
ccacttttaaagtgctttgcatggttctcaatatggctctttgtgttttggttgtatgttttatcttttaaaatttttatttaggagggattcctacataactagattagcagtgagagtagtggtctcagaaatcacgcgtggatttaggattcaggatggctatattaattcagaagtaaaaatacacatatgacagagacaagagtttcatgagtcagaaaaagaaaattccaggtaagcctggctttatagctgtctaagtggtgtgctttgaggtgagtcaacacta

SEQ ID NO: 390072 - DNA, 311 bp, Homo sapiens
ttcagaatattttcccaaaacttaaagatccatttttatttaagattgaaattttctaaccaaaacaaaacaaaaaaatcagcagcttgacttggggtgaatcctgaagcattttctggaactcagtaaagacagggatatattctattaactttgaagaattcttttcttgcttttgaattttgtccttgcttacatctttatgagggtaagaaatgtgcatattataacaaacaatgaatagaaaaacaaagtgaataaacaccactcataaacagtttgaattttggcccaaatacagaatcttgatc

SEQ ID NO: 390073 - DNA, 498 bp, Homo sapiens
ttctctttaagctgtagctgtggtttctgcagcaattttgtttttgccttgaaagaggtgctctggattatcacacctccatgtatgacaatttgtacctgcatggaattgaagactcggaggctgtaagtattttcatagatagctaattccctctcccctcctcttcctcctcccactatcccctccacccccccgcttcttatttcttaggcaacgcagggaacatggagcagaaagctaacatcattctggggcttgctggctgctgtgtaaatgttctctgtgtagtttataggtaactaaaattatttattgtcaagcaaaaaagaaattagggtgatggcaaagcattcaagagtgtaggctgtttgaatttatacattaccgggtccacgtttgatctcaccaggggtaactgctccttgcagactggtttaaactatgcagaaagtgcctatgttttccaatagcagggttcatagaaaagcctcattc

SEQ ID NO: 390074 - DNA, 1353 bp, Homo sapiens
gcactccggccgggctctgctggctgcggcgggagctggacgcgggaggaggcggcggcggcgctggaacagtgaaccatggagctgtatttcggtgaatatcaacatgtgcagcaggaatatggggtccatctgagactcgcaagtgatgatacccaaaaatcaaggagttcccagaactccaaggcaggctcctacggtgtcagtattcgggtccagggaattgatggtcacccctatattgtcctgaataacacagaacggtgcctagcaggcacatcgttctctgaaaatgggccaccctttccacctccagtgataaataacctgcctctacattccagcaatggttctgtgccaaaggagaacagtgaagaacttcagcttccagaaaacccatacgcccagcctagcccaataagaaacctgaaacagcccctgctccatgagggcaagaatggagttctagatcgcaaagacgggtctgtgaagccatctcacctgctgaactttcagaggcatccagagcttttgcaaccctatgaccctgaaaagaatgagttgaatttacaaaatcaccagccttctgagagtaattggctaaaaacgttgacagaagaaggcatcaacaataagaagccttggacttgctttcccaaacctagcaattcccagcctaccagtccctccttggaagacccggccaaatctggtgtgacagctattcgtttatgcagctccgtggtcatagaggaccccaaaaagcagacctcagtgtgtgtaaacgttcagagctgcaccaaggagagggtgggagaggaggcccttttcactagcgggaggcccctgactgcccacagcccacatgcccaccctgaaaccaagaaaaccaggccagatgttcttcccttccggcgacaggattcagcgggacccgtcctggatggagctcggtcccggaggtcctcctcgtcatccacaactcccacgtcagccaactctttgtacaggtttttactggatgatcaggaatgtgccatccatgccgacaacgtcaatcgtcatgaaaacagaaggtatattcccttcctgccaggaactggacgggatattgatacaggatcaattcctggtgtggatcagttaattgaaaaatttgatcaaaaacctgggcttcagagaagaggaaggtctgggaagcgaaacagaattaatacagatgacaggaaaagatccagaagcgtggatagcgcctttccttttggcctccaagggaactcggagtacctgattgaattcagtaggaacttgggcaagtcaagcgaacacctcctccggccttcccaggtgtgc

SEQ ID NO: 390075 - DNA, 582 bp, Homo sapiens
tgttaagatattggtatttctgagaggaggggagatttggacattactgtttaatggggatattgtttcagttttggaagatgaaacgtttggaagatggatgctggtgatggttgcacaacactgtaattgtacttcatgccactagactgtgcactaaaacatgcttaagctgaaacattttatgttagcatatatgtaaacacacacacaacagaggaaataccatgtttgaggtcagatggtgggtaaatggtagaaattgtcaaatgacaatttgtctatatctttaaaaacaatttcagagaattttttttgtgtgtgtgtgactgagttttgctcttgttgtccaggctggagtgcaatggcgcgatctcggcttactgcagcctccgcctcctgggttcaagtgattctcctgcctcagcctcctgagtagctgggattacaggcgcatgccaccatgcccggctaattttgtatttttagtagagatgggctttctccatgttggtcgggctggtctccaactcccaacctcagatgattcacccgccttggccacccaaagtgctgggatta

SEQ ID NO: 390076 - DNA, 399 bp, Homo sapiens
  misc_feature (7)..(7): n is a, c, g, or t
  misc_feature (17)..(17): n is a, c, g, or t
  misc_feature (37)..(37): n is a, c, g, or t
cgctctngaactagtgnatccccccgggctgccaggnattcggcacgagagtatgttaacaataattatttataacaatattttgtattggatagcacattccatctgaatatttcaaattggcatggtcccttctaactggcattaattcattcatcttgcatccccaagtaataaagttattcccatttttaaatggagaaatcaagattcatgcatttcagtgacagatgttcaaattcagaagaaaatctctgtttgagtttgtctttgccttgtaatacgtatttgtcactaggcctccattattaaataagaaattgaaccttgcatttagtcctatgatctttacccacccaagcacggaggtaacaaggtaactgtgatttaaaaaaaaaa

SEQ ID NO: 390077 - DNA, 672 bp, Homo sapiens
ttgttgagacggagtctcgttctgtcacccaggctgaagtgcaatggcgtgatcttggctcactgcaacctccgcctcccgagttcaagcgattgtcctgcctcagcctcccaagtagctgggattacaggcatgcaccaccacacctggctaatttttgtattttttagtagagacaagctttcaccatgttggccaggctgatcttaaactcctgacctcaagtgatgcacctgcctcagcctcccagagtgctgggattacagacatgagctactacacccggcctaaaccttgcatttttaagagtggaaactttctctttgtgtaggggacagggtaagaggaagataaatgagttcttcctccttttaattctctttgatctcctggtgatgctgaaaaaagaaaaacgaattaggtactcttctgcctgaaaaaagaagaggttttctagacaagcaagacctttaaaaagtatcagaattctttatgcctttacacccaaaagataattaacatatagatttgactcacattagcctatgaaactgcaaacattttcatggcctcagcattctcatatttctaggtaaggatatactttcagaagtactccatggtagcacttagccctattgtgatcatttacttttctgtctgccttctttt

SEQ ID NO: 390078 - DNA, 259 bp, Homo sapiens
ctgcctcagcctcccaagtagctgggactacaggtgcccgccaccacacctggctaatttttgtatttttagtagagacgaggtttcactatgttggccaggctggtcttgaatttctgaccttgtgatccgcctgcctcggcctcccaaagtgttggggattacaggcgtgagctaccacgcccggccaacttgcttttctctaatggctggcgatgttaattttttcactggcttatttaccgtctccttctgtgga

SEQ ID NO: 390079 - DNA, 330 bp, Homo sapiens
agggccatgagggtgcacagcctggttgcactcacttggcaccaacagaggttggctgatatgacactcaagatgggcctggagtctaaggggccctgggggtgtgagagagcctatgggttaggagatctgtgcatggaaccaccagccttctgaggagccctgagccacagctccttcccacccgcccaggcctcccaagaggcttgagtctgtcccttctgcgagctgcttgcctctcttggtcaccctaagagcaccaaccgagtcaggctgggtttagagaagccacttggccggtgccagggctgggaactgggaaggttggta

SEQ ID NO: 390080 - DNA, 223 bp, Homo sapiens
cttgtcccagagtaagacctatggaagtgtgcactaccttgtcacctaggagaccataaccctgtgagggcaggaatgatgtgtcttgctcctgctctatcccaggtgcacagagcacaaccttcagtatttgttacaggaccatattctgttcctactctgtgccagacactgtcttaagtgctgaagatgcatcagtcaactaacagaccagcatccccct

SEQ ID NO: 390081 - DNA, 478 bp, Homo sapiens
aatcctggaggatgctccttacagattaaaaaaaaaaaccttttgaaaaaaaacaacaacagaaaggcaaaaacaggtacaggcactgtgatatgcaagggagtttgtaacacttaaaaaatatatgtgctgggattacaggcgttagccaccgtgccctgccggtaggaataaattataactcaaaatatgaccattaagtgtaaggtagccccgacaggcatcactccactaaacacagtaaaagaatggacattcatagggaattaatttatcaacaaagtaaataagtattaagaatattctaagaaagcaggaacatttttataaagcagttagaattttttaaagttgttttgttttcttgagacagagtctctgtctcccaggctggagtatagtggcaagatgatggctcactgcaacctcaaacccctgggctcaagtgatcctctcacctcagccttctgagtagctg

SEQ ID NO: 390082 - DNA, 464 bp, Homo sapiens
tcaggttttgtgcccagggaacaaggcacccaggggtgggggtggattgtagtaggaaggcaagagtttggatttagagatgtggcactggaggtgacaatgggccattcagatggggatgttcagtaggtagttgcagccatggtggtggcaagcaagggcacacacccagatttggaattcattggcacagaggtgggaaatgaatgcatgaaagcagataagctttcagagctgatgactgaacctgaactaggaaaggctgatcctaagtcttggagagcatccacactgagggagcaaggggaggaagaggtggcattagagggaaagtaggaagggcggtgagcgtggtgaaagaactaggaaaacaacacaggcaaaaagtagcaggagagaatcctcctcgaatgaccaaatctgcaaaatgaaacggagatgttaaaggaaatggtgaacgacat

SEQ ID NO: 390083 - DNA, 1212 bp, Homo sapiens
cgcgcagaccgagcagactgccgcagcgactcatcctatcgataaggttcagttagccaaggtggaggatgggaaaagaatggaactgtcccagctactcaatgagatcagggcaaactatgaaaagatcctcaccagaaatcagatagagacggtgctctcaacaaggatccagctagaagaagacataagcaaaaaaatggacaaagatgaagaggctttgaaggcagctcaagcagaactcaaggaggcccgacgccagtggcaccacctgcaagtggaaattgaatctctccatgctgtggaaaggggccttgaaaactccctacatgccagcgagcagcattaccagatgcagctgcaagacctagagactgtgattgaaggactagaaaaagagctacaggaagtaaggcgcggcatcgaaaagcagcttcaagagcacgagatgcttctcaacacgaagatgaggctggaacaagaaatagcaacttatcgccacctcctagaaaaagaagaaatcagatattatggttgtatccaaggtgggaaaaaagacaaaaagcctaccacaagtagagttggtttgttttaccatcagccattataaatgaaatatcttttactacaaaagtcccacaaaagtatgagaatgaaaatgtagaaacagtaaccaaacaggcaatcttaaatgggagtatcgttaagggagagcactgaagctcatggcactattcagacagagaaagtggatgaagttattaaagaatgggaaggttctttctttaaagataaccctcgattgaggaaaaagtctgtttctcttcgatttgatcttcatttagcagccactgatgaagggtgtttagagactaagcaggataatctaccagatatagaagtcaggcttatcatgagaagatcatgcagtattccctctatcaaacctccatcaacagctaattaatccaaagatagtatttgacttgattggaaaatgttaggatggaccaaggtgggccataccaactccctctgtcccaaaatgtaagttattacgtatgtatggaaaatgttatgatcaatatgtggttctcttcagaagaaaaaaacaataaaggacatttctctgaatctaattatggagatagacatatatatatatatatgaatgagagggagtagcttaaaaataaaatcacaaatccagta

SEQ ID NO: 390084 - DNA, 1294 bp, Homo sapiens
cgcgcagaccgagcagactgccgcagcgactcatcctatcgataaggttcagttagccaaggtggaggatgggaaaagaatggaactgtcccagctactcaatgagatcagggcaaactatgaaaagatcctcaccagaaatcagatagagacggtgctctcaacaaggatccaggtaatgatttcatacagacaggcaccttccagaataaggagacagtccatgtctacccaattcctgtcccggcctctctgagctagaagaagacataagcaaaaaaatggacaaagatgaagaggctttgaaggcagctcaagcagaactcaaggaggcccgacgccagtggcaccacctgcaagtggaaattgaatctctccatgctgtggaaaggggccttgaaaactccctacatgccagcgagcagcattaccagatgcagctgcaagacctagagactgtgattgaaggactagaaaaagagctacaggaagtaaggcgcggcatcgaaaagcagcttcaagagcacgagatgcttctcaacacgaagatgaggctggaacaagaaatagcaacttatcgccacctcctagaaaaagaagaaatcagatattatggttgtatccaaggtgggaaaaaagacaaaaagcctaccacaagtagagttggtttgttttaccatcagccattataaatgaaatatcttttactacaaaagtcccacaaaagtatgagaatgaaaatgtagaaacagtaaccaaacaggcaatcttaaatgggagtatcgttaagggagagcactgaagctcatggcactattcagacagagaaagtggatgaagttattaaagaatgggaaggttctttctttaaagataaccctcgattgaggaaaaagtctgtttctcttcgatttgatcttcatttagcagccactgatgaagggtgtttagagactaagcaggataatctaccagatatagaagtcaggcttatcatgagaagatcatgcagtattccctctatcaaacctccatcaacagctaattaatccaaagatagtatttgacttgattggaaaatgttaggatggaccaaggtgggccataccaactccctctgtcccaaaatgtaagttattacgtatgtatggaaaatgttatgatcaatatgtggttctcttcagaagaaaaaaacaataaaggacatttctctgaatctaattatggagatagacatatatatatatatatgaatgagagggagtagcttaaaaataaaatcacaaatccagta

SEQ ID NO: 390085 - DNA, 590 bp, Homo sapiens
gaataaatataaactgtacaaagggcataaagaccaaaatgaaaacccttctcatctccatatcccactctccagatgttctctttctcatttcattttttaaagtttgcctcccactcttttttcttcctttcattctaaaaatttctaaatatttctgtgaattagtcatgcagcaaaaacatacatcttaatgggctaggacatcaaagagtctataaaactatgttaacatttacagatttcatggtaaagggatatttatgttcagaacataatgtatatttaagaatttttaaaataagacctcatagcaaagcatgaacataagtaataattaataatgactataactacttagagtgagctagtaacttaaattctaggctgttggaagccattacataatctttggtgttatctttttatttaaaaaaatataagagctttttgacccttttaaaaaaattaacagtgtgcagcctggccaacatggcgaaaccctgtctactaaaaatacaaacattagctgggcatggtggtaggcacctgtaatcccagctatttgggagactgaagcaggagaatca

SEQ ID NO: 390086 - DNA, 476 bp, Homo sapiens
  misc_feature (2)..(2): n is a, c, g, or t
  misc_feature (41)..(41): n is a, c, g, or t
  misc_feature (49)..(49): n is a, c, g, or t
anctagaggatccccaaaagtgcactcttctatatctactncagaaagnaggtgaaaatgtggaggctttgagaaatttgtcatttgacatatatgagggtcagattactgccttacttggccacagtggaacaggaaagagtacattgatgaatattctttgtggactctgcccaccttctgatgggtttgcatctatatatggacacagagtctcagaaatagatgaaatgtttgaagcaagaaaaatgattggcatttgtccacagttagatatacactttgatgttttgacagtagatatagaagagtgcacttttgaaaagtgccctctttctaatatctaggtcaaccagaaaatcgtttctcccaataacttattgtgggttggatcctcagccaggaggcacaggcccctacaagatcccaggcttccaacacggacacctggaccctcccatttgactgcagccttg

SEQ ID NO: 390087 - DNA, 517 bp, Homo sapiens
  misc_feature (2)..(2): n is a, c, g, or t
  misc_feature (41)..(41): n is a, c, g, or t
  misc_feature (49)..(49): n is a, c, g, or t
anctagaggatccccaaaagtgcactcttctatatctactncagaaagnaggtgaaaatgtggaggctttgagaaatttgtcatttgacatatatgagggtcagattactgccttacttggccacagtggaacaggaaagagtacattgatgaatattctttgtggactctgcccaccttctgatgggtttgcatctatatatggacacagagtctcagaaatagatgaaatgtttgaagcaagaaaaatgattggcatttgtccacagttagatatacactttgatgttttgacagtagaagaaaatttatcaattttggcttcaatcaaagggataccagccaacaatataatacaagaagtgcagaaggttttactagatttagacatgcagactatcaaagataaccaagctaaaaaattaagtggtggtcaaaaaagaaagctgtcattaggaattgctgttcttgggaacccaaagatactgctgctagacgaagctacgagcgcactgga

SEQ ID NO: 390088 - DNA, 515 bp, Homo sapiens
tcctgctcgtcaaggacaggactgtgagcattcgtaaacagtgaccggaaaacacaccctcctcactgctcgagtttggaggctgccacgagacccactcaggattttcagacatgggcaaaccgaggaagagaatcaagcatgacactgcctttctcataagcgctgtttgtgagagtaacaagatagttgatcttggattccttcccgttatagaaatggtcctgctaacacatggagaggggctgatgggactcgaagagctctgtttttaaccctgatgagagaatctagtcagtgatcattttgagccttcgcaacacaaaaaagccacccagagagcaggggttcgccttaggccttgctgggaagtctaagctgcctctgaccaggcctctcggtgagcacccagctttcagaagaacgggggacagagccttgctcgtcagcaccagggtgtaatcagcaaagtgcagatgacccgatgtcttcagctaataaattatcggggtggg

SEQ ID NO: 390089 - DNA, 380 bp, Homo sapiens
ccagagggaaagaacttagtctaattttaataaaacaagtgtttatttagttattcagttaaaatggtcaacatttttgcactttgttacattttctcctacatatttcaaaatatacactaaattaacttttttaatatgttggatttatggattcttgcacatttccattgcagatcaaccacttaccggcaaaaatgtgccctccaattcttccacattgcctctttgtccaggtgtccagcagcatttcttccctatggtatctctctcacccctcccataagatctggatcctctctccttgtgacttcaggctttgcttcctccacttcacttacatcactgaccttacctctcagtgtggaattctctaatgc

SEQ ID NO: 390090 - DNA, 141 bp, Homo sapiens
gtaatttccactcactgtgaagcttcaggccaccgggtcctccccagttctctactccagggtggggaggccccatcgccagtcctcaccatgagcatccagagcctcttcactgtctccctgtgtcctgtggaagccaca

SEQ ID NO: 390091 - DNA, 527 bp, Homo sapiens
cagttattactaagtatatgatttaaaatccctaattagggttcttaaacaagggagaagcactctcatacccctagaacaagatgaacaaaagaaggaggaaaaatcttgacctccgtaagatccaggatggcacgtgcaaggcactgacacagcatctgccggcatcactgactctcctggaccccagaagcccagttccccaggctctgaaaccctgcagcaatgaaaaggaagcacaggcaaaccataaggaagataatttttctactaaaaaataaatagaaatgcatccttagaggcaggtttcatgaggacacagagaatccggttttgtgtgtgcctgatttcgtttttctgtcaaagagatacaaaacaatcaactgagttatcttgaacttacaaagattaaaaataatcaattcctgttactattttcaatttttcccccattttacttctttaggtatgaagaaatgtagcctattaaaacctggattaataaaaacctttcattaacttttaaa

SEQ ID NO: 390092 - DNA, 322 bp, Homo sapiens
gtggcatgcagtcctgaataaagctcctgtggatcaggcaagttcatttttgggtcactggcacttatgtatccaccattatcttggcccaatctcattatattatgccaactttgagggaagaactgagtcatcaccttcctttgtaatttcctagacaatgctccactcataatgggttttcagaaacatatctacctgatcaaagtcactcgcccactcattcaccacaaacctctgatgatgagatttgttttattccttgtgattcatcttggtgaatgtaccatgcggttttgaaataaatgtgttataatgcaga

SEQ ID NO: 390093 - DNA, 205 bp, Homo sapiens
tggaaaccactgatgtagtcaacataaaccaacatttttacacttagctagatttctcccattgtgtataaacacacaggtgatgtttttaaaccagtattttaccattgcctcctattaaatttcatctccgtgaacgtagctatagttaaaacttgagatcttcttgaatcatgattctgtcatccaagggattagctttcct

SEQ ID NO: 390094 - DNA, 160 bp, Homo sapiens
gctcttaaatgttcatccacttttaattatttacaactaataaaacatgtaataacacggtcaaaattatcggagtaacttcctttcaaaaagcacatgtttgtacagtgattctttatataccttgaattcaacataatctacttttgcatctccctgg

SEQ ID NO: 390095 - DNA, 240 bp, Homo sapiens
catttttgttctcatagctgttttattcctcttctctgtatttcttactttacttttatttgtgtctctcaggtaccctgtgatttagttttcatttttagatgattttatcttttcagtatattgcctatgtttgttcaactctcattttacatcttactattgagtttaaaaatttttatttgctgtgttcttttatatgtgcaattaatgatattcatgttggagtgttgtatatta

SEQ ID NO: 390096 - DNA, 319 bp, Homo sapiens
ccctttcaagttcccaggccttctcctgctgggaaaggctttctcatgtctactcacatacctttgctgcatactaaacccatttccgcgtgtccgccggtcactctgccctgaatgataaccttcgataggtttacaaatgctcattaagtcacccttcaagtttatcttcccggagccgataatcacaatgccttcagcttcctccgtgttacaaaaagcaaagcgaagcaagacagctggggaagcagggaggcctcctttatctctggctccagctggactcaggaaaggctctcccaggttgtgcctccccaca

SEQ ID NO: 390097 - DNA, 419 bp, Homo sapiens
ttcctttaacatgaggttccaaattggtttcctttatgatcgacctcactaagtaatgaaaaatttcagtttctctaagtatgtttttctggactttatgccctattcttttgcatttctatctttttgtttgggtaagcttttcattctagttaaaaactagttctttcctaaacacagtcttcagaacaaaaaaccttaatcaaatagatatcctctaatatatcttaggtatatgaaaagtggctcattgtgacatccaattgctggtggagaagagccccaaaaaggaacgaagatatgaggccaaggtgggcagatcacctgaggtcaggagttcaagaccagcctggccaacatggtgaaattctgtctctattaaaaatacaaaaattaactgggcatgatggcacatgcct

SEQ ID NO: 390098 - DNA, 892 bp, Homo sapiens
gagcggccaggtggaggaggagcgcggaggcgaccgcagcatctgcctgcccttctgccatccgagcgccctgactgcgccacactgcaggccatggagaatgagctgccagtcccacatacatctagcagtgcctgtgccaccagcagtaccagcggggccagtagcagcagtggctgcaacaacagcagcagtggtggaagtggccgccccaccgggccccagatttctgtgtacagtggtattccagaccggcagaccgtgcaggtgatccagcaggccctgcacagacagcccagcacggccgctcagtacctgcagcagatgtacgccgcccagcagcagcacctcatgctgcagaccgcggcgctccagcagcagcacctcagcagcgcccagctccagagcctggcagccgtacagcaggcaagcctggtatccaatagacaaggaagcacttcaggcagcaatgtgtctgcgcaggccccggcccagtcatcttcgatcaacctggcagcctccccagcagcagcccagctcctcaaccgggcccagagtgtgaactctgcagcagcctcaggcatcgctcagcaggctgtgctcttgggcaacacgtcttccccagccctgactgcaagccaagcacagatgtatctgagggcacagatgctcatcttcacgcccacggccaccgtcgctactgtgcagcctgagctcggcactggctcccccgcccggccccccacccccgcccaggtacagaacttgaccctccgaacacagcagacaccagcggcagcagcctcgggccccacccccactcagcctgtcctgcccagcttggccctgaaacccacgccgggcggtagccagcctctgcctaccccagcac

SEQ ID NO: 390099 - DNA, 741 bp, Homo sapiens
gtttcaccatgttggccaagctgatcttgaactcctgacctcaagtgatccgtctgcttcagcctcccagatgctgggattacaggcgtgagccactgcacccgaccaatatttttactgcctcttttctatgtttagatacacaaatccttaccattgtgttaccattgcctccagcattcagtacagtcacacgctacacaggtttctggcctaggagcagcgggctagaccacacatagcctaggtgtatagtaggctttaccatctagggttgtgtaagtacactcttatgatgttcaaacaatgacaaaatcagctaacaatgcatttctcagaatgtatccttgttgtcatcaagtaatgcatgactgtactctaaaattggcagtgtttttgtttgaagcaatctggtaggaattttttcacttgtattcttgatgaatccaagctcttcacttgactagctgtgcctctttgggcaaaactacactttttaaaacttgcagtgcccttttctatcagaagtggataatacctatctgctggatttgttgttagggctgaatgaactaaaatgccctcacacggtggccagcagtaggtgctcagaaagtgttagcttttttttttttttttttttttttttttttccctgagatggagtcttgctctgttgcccaggctggagtgcagtggcctgatctcggctcactgcaacctccgcctcccaggttcaag

SEQ ID NO: 390100 - DNA, 889 bp, Homo sapiens
aagacctgcagactgcgtaagtgacagaagaaatgggcttccctacataacttcatatttgtgacagttaacaccagcagttttcaaatctgtcaaactaatataatggtttctaaattagtcatggtgatagactatattattgttactaagcctgtattccttcctgttgaggaatataaaatatacctcaccatcctattgatgtcagacatggccaacttgctttgcccaatgaaccatatatgtcttccaggtggaagtgtttggagccaaaattgtacttcttagctctcttttctatctcaaaaccagagatcttccatatagtggctgctccatcaacatgtattccagaagaaaggtgtaattcctaaaagattattccacatagacacatgtgggcacatgagtcaggctattcccatttctactcttagttaaattattatgcttgggagcttaaaaaattattcaacaattcatgcataaaaagcaaatcatctactaggggaaatggaaaagaatctggctggcttgcatgagacttctctactgaaacattactcagtgctataagactgaaattatgccaattgtatcaaaaactccagaatcaaggaggacattctaaaaggttactagagaatatagaacaataataagttataaaaaagtggttgaaaaactaagtatgaatgttacaaacatggacaatgtaaaaatagtaaaatgagtaaatattaggatgtgaggaggagaaaaatgagaaatgaaactgctaatgtcataccaaagcatggttaaatatatcccacctaaaactgaaacaagattgtaataacagtatctgtaattttttttcttttttttttttttagaatttgct

SEQ ID NO: 390101 - DNA, 707 bp, Homo sapiens
gtatgtgggccaaatacagcttttggagtggttgatcgtactagcgttaaaatgtcgccattggtgtaaataattcctctactttgttggctgtttcttttttttcttttaattttagttctgtttaggcatggagaagttgtaagtggttttcttttgttcatttatttggttagttttaagtttggattgtgaccccttcatccagagttttaaaattggaagtcagctctcttgagtcacataatcttggtatgaagtttaagatgaatgaaatgcaagcatacttgggaaaaaaaagaattttttttactggggacctatcgttcttttcttaccaaatgttaagagtatcccccaatatttttatagtaattataaaatcacaaatttattataaccccacagtaggtcctagagactaactggaacagaaagcaatattgttttaattgtttgatctttgagctctagtaaacttctctatcttttcttattttcttttaaaattacaaaataatgcgtacatattataaaacatttgaaagttacataagaaaatcaaaataatgtcactacttgagagaaaatcacgttagtacatacacttcctgtttgtttttaggcaatgctagttttttttttttattgaacataatgttctataatgtgatttcccctaaatatactgtgaatactttcctctg

SEQ ID NO: 390102 - DNA, 489 bp, Homo sapiens
ctagagttttctgtagattgagagaaatgaataggttgacttgtgtttctgtatgtctactgggtcaaaggaccattcttgagatgtgaaagtaccctaaagagtggcacagctggtaagtgttatgagttgtcctttaaaaaaaaaatggggttttgagataatagtaattttgctaatcattagcttattccattttatgcctatattgtgatttgattctctcttcccctcttcatttagtttttccgttttctttcaagcttcattcccatttgccccatgctaccagttctttcttctcctggaatatttgcctgctccaccatggacagactcttagttatccttcacaatccacctccagtcccacctcctctgtgaacctttcctactgcctcatttatccattcttctcactaatttgttttctcccttttgcatccacacatcctactgatagtatcaataaagctgatattccactga

SEQ ID NO: 390103 - DNA, 322 bp, Homo sapiens
aatattcaaataataacaaaagattacatttaaaaacaggaatgactcaggcgcgtactcctccctgaactccggagagtgaggcacactagccagcatggtccctgcagtgcccagttttgaatttagaattcatagcttgccgttttctccgtgaatggtaaatactttaatgttacgtggaatactatttgtacaacatttttgtctgttgtaagcctaaggtgggtctaaatttcatcatcgctagaaatacccttttcctatacagacagtcgggcttaggactgtccggctggcatgagagtgacacacattcagt

SEQ ID NO: 390104 - DNA, 608 bp, Homo sapiens
agagaggctgtccagcttgcccaaggtcacttaaggaaggcccatctggctctaatgcccagactcttccattccactaggctggctaaaaaggccctagaagtcctgccagcattttcactctgatattctttaactccttcacagcttttaatcctgccctgtaggaggaccaaacattactgtctcctctttcacagccccgctactagagcaagtaaatgacttagggattcctccatcacctgaaagcagcaaaagaagatggtacagcattcaattttctccttcctccataaagaaattcccgtcctttatagccagctctgcccaccccttcctcattccccttttcttagacaggcagatattttcttttctctttccctttggcttgtgattatcaggtaaatatccctggtttgagggaggagcagaattttgattaggttaaaaaattatctttacccatagcctttctatgacatagaaattccaggtaggagtaaaccatatatatatcggtatatctctatccatctatatatatatatacacacacacacatacatatacacacatattataatgatataattatatatgta

SEQ ID NO: 390105 - DNA, 367 bp, Homo sapiens
gctccctaaaataaatgaataaataagcagctgaagctgattctctcctgcttcatttcttctcttccccgtctgaaccgtctcacctgcactcacctttgcctcctttgatcccctcctcccactcttgctcttctagcttaatctcagaaacagcgaatatctggcagaggaaagcccaccttagtttatcagccatcatcaaaagtaaaccttaaagacataagagatttcctggctaggcacagtggctcacacctataatcccagcattttgggaggctgaggcaggaggatcacttgagcccaggggattgagaccagtctggccaacatggtgaaaccccgtctctacaaaaaaatacaa

SEQ ID NO: 390106 - DNA, 478 bp, Homo sapiens
ttgtgctaggaggctttgagtcttgagggagtgagtaaagggtggaagacagactaaatacatagtttctaagaaactgatcctttgtctcaaatgttgggaggtcagtagtggaatttaaataaggcaacctataaagcattttatacggggataagccgatatctttctagtgagcagttcagactcttaatagggtaacgggaaaacacttagtccatggtaatcgagtttctagaattaattttttttaattaagtttagaaaagtttctttagttataaaagtaatcaaatcccttttcacaatggaaagttctacatgatcttaagaactaaaatatcatgatttgaaaagcaatatggaaagttatttgcagtacaaactctatcacattcacttaaaaagcagccaaagttgcttttttctaggtatacaggcaacattccacaccattcaatactacctcccttttgtg

SEQ ID NO: 390107 - DNA, 233 bp, Homo sapiens
aacgttttagtgagttacaaggaaaatagccatcaaaagtccatataggttactctgtggatgggttggggagccatcttctggtcttcatccagacttgattgacttaaaattgagtatataagagtgtaaaagatggtaagtgataggcttgaggcagagacacaggcctgcagccagaactggaaaaaaacccacaagtatgaaaagtataggcaaaactataaagcagc

SEQ ID NO: 390108 - DNA, 1449 bp, Homo sapiens
ttgatggtcctgcatagggagtagaagaaaaaggacggaggaggacatgagatggtcagatagcctagggcctgtaagccattataacgattttgtcttttaatatagagaaatattaagaggtttttgttttaactttttaacatagaaaaatgtaatcatatacaaacacagaatagtataatgagcccccttgcactaatcactcagctttaacagctttcactttgggaggatatggagtgaaggagtgataagacatggcatggcatgacatggcttgaacaggatcactcaggaaaataagccatggggagacaggacaagcagaggaaacacaggagcaaaagcttaggagacagatgatggtggctggaaaccaagggagtagcagtgaaggtggtgagaagtgatcagatagaggatatttttttgaagatttgaattaatattatatatattatactttaaagaagaatttgaaaatgcatgtagtgtagtaaagatggtaagaaatacagaaaagaggccaggcacagtggctcatgccagtaatcctagcactttaggaggcttaggtgggaagctcccttgaggccatgagttcaaggccagcccgggcaacatagtgagactctgtctatatggaaaaaaaaattaaccaggtgtggtggcatgcacctgtagtcctagctacctaggaggctgaggcaggaagattgcctgagccaggaggttgagtcttcagtgagccatgatcataccactgtactccagcctgaatggcagagcaagaccctgtccctttaaaaaaaaaaaaaaagaaagaaagaaaaagaaatataagaaatggcactagaatatcagtattatatacattattttctgtttaaaaatccacacaactggcaaaaaaaagtgacatacatgaacatttataagacagtgcatttataaattacaaactctctgctcctcccatattattttgcagtgatgaatgattaggccatccaaacgtaaagatttatttgtaatttgctaatgatggaatgacacctgttgaggtacaagttcccagcaattcttggaattagcaatagtgtgttacttctttctcgaaagaagcatgatttgtaagcagctatatctgatgtagtaaaactgaaagttaaaataaaaaaggaaaccgtgggtcaaagtatgagggaaaagataaaactttcagagcaaagttatacatagagattttattcatcgtctctgtgtaactcacgagaacttcttagcttatttattatgtcaaatggcagtttgctcttctaatcccagcctgatatcatgagccatatatgctgttggtcattcaaaaagggcactaaacaaggtgaaagaatgtcagtgaatcaatgcaactccatgagtactaccaggaaaagaaaaacaaaa

SEQ ID NO: 390109 - DNA, 565 bp, Homo sapiens
tatataaacatatgacaaataagaatcttgattatttgggtgaagaaagaaaacaaaatcacgaatttaaatttccagggctctattttatgtttttcagcaaggtcatttgaatataaaatatttaataaggacctcaaatcatattctcttgttcaagtactttaaaagttgattccagagcccttaaaatgtatgaaggatgcttttccagactgagtcataagaagtcctaaaagccaaagaatttaaagggttgtaaagcaaatagccagagaagtgtcagacctgttttatttttgatgttaccttctgaaggaatttctcctgggaagtttttccatttgtatttcgatctcaaaactaaatttggaaaaatcatcttgttcatattatcagtctggatgtgcatattcatatctcaaaagtattaattggaggcagatcaccagtagaaattaaattcaaatgaaaaataatgttgatacactttatgcttttgctattgattttttagccttaaaagattggtaaaatattagtattttcctttttcccttgcatg

SEQ ID NO: 390110 - DNA, 864 bp, Homo sapiens
gcactaaaagcttcttaaaattagtcagaggaagacaagtgggaaggtgtagacttctcacttcaatagtctgctaaagatggaggaaaaatatggtgctattcaaagacagtctagacttaaagatttagaattttggatggaaataatccggtgaaatagcaagaacatttgaaagagaacttgacaaaccactgctgcagaaagctgaattccaaggaaatatgcccaatatccatgaagctgagaagtaagtttctgaaatcatgcctttctatttttttttaatttttcatttgcctaaaaaatgtcaaccacttgttgaggcaagcggagtcttgctactggaatgtataaattaaccaaatagagtattatgcaaataatagtagattcggatatttgtttagtggcccttttatggagtattagaaattgccaacttttgactttgagaaaagaatatgtgtgttgtcagtaatattttgattctgtgttttttttttaaaaaaaaccttttaaacatttgtcttatttctattaatgtcacttgatttttctggtttccaattcctgtttcattcatagaagcttctagaagtaaatgtcttttttcattttaaacatgaacgcagatgaataaaatgaacttctaatacatttaatgtcacacttgagacaaccatattgagattcttaaaaaattgcttgtatggagaaaagaagattatcattttcagggccaggcacaatggctcacacctataatcccaactctttggaaggccaaggcagacagatcatctgaggtcaggagttcaagaccagcctgaccaacatggagaaaccctgtctctattaaaa

SEQ ID NO: 390111 - DNA, 677 bp, Homo sapiens
gcactaaaagcttcttaaaattagtcagaggaagacaagtgggaaggtgtagacttctcacttcaatagtctgctaaagatggaggaaaaatatggtgctattcaaagacagtctagacttaaagatttagaattttggatggaaataatccggtgaaatagcaagaacatttgaaagagaacttgacaaaccactgctgcagaaagctgaattccaaggaaatatgcccaatatccatgaagctgagaaagttgtctgcaaaaagtttatgtaatatgcctgaaggttatactaagaaggaagcatttcagaaatgattgaagctgtttatctgtgtgcaaaagcctgtaagtgtgtttgtgtgggcctgggcacgtgtatatgcctgtgattcacacatttcttttcacaaaagatttgaggtcactcaggatgtcattcatcctgggtaaaagccacctcagattacaagcagttaataggtcagatgctacataatgctctcttcaacttagatttcttaaaatcttacaagttgaaggaggtgagagcctgggacttttaatttgcactggggcaaaatcgttcctttgtgctgaaaacatgtggctgacaagatgccactgggaaagccaagcttttttagaagagtttgctgtataattcataaagataa

SEQ ID NO: 390112 - DNA, 464 bp, Homo sapiens
caggggacccaggaggcaacatcccaacagactgtgagcagcactcagggagtgagtgcctggtcttgaggtgaggccagggcctgaccaatcagttgcgggttaggtgctcccccgtctgggggtctgatgaagccctcctaaggagatctcaggaggaggaagaccccaaggtctgcggattcctggaactgaggaaggggcaggaggacatgtctcaggtctgagagaatctgacgtgggcccagacatggggagggtcccaagtctggtgaaaccaatggagagttcttcagggtctgaaaagggctggtggcagtccctgatctagggacgacaggtcatggggaggaaggacccaggccttctccgagtcatgaggggcttccggatcccagacgggccggtcacgggcttcaagtctgggagtgttcggggtccgccaggagccggtcacgacgggc

SEQ ID NO: 390113 - DNA, 598 bp, Homo sapiens
tgaacctttaccattgaaagaacaaaggggtggggcccgagggacccttccctgccgtcccgtggtgtgtagtcagggatgctcctgcagacacacaggtgggctctgactgccagatcgcaggggcggtgccgtggtcctcacctgccatgtcactagcgtgctgacgcagacaccggcgagagctacagtgctcggcccggcacatcccagacaattcctctgtaaatgctgcagcagccagaggccccagcaccttgaggttaagcaaagagaaggaatagagttctccagagccccaaggagcgggagggtctgtcccaatggatgggctcagccaatttcaccctctcctccccctgccaacactgcggcctgcagcctggacctggcccgggttgtggaggggaccggggatgcagctgccacctgctgggcggacgtgggcctaggtggtcctcagccctcatgacaggagcccccgaagcactgttgcggcaccctctctgacattgggtgggagactctgggagccgagtgcagagccagggcccagcacgaaggccttgggctccagtccgtgtgccccacatcccta

SEQ ID NO: 390114 - DNA, 525 bp, Homo sapiens
ggcctgtgaatacagctgactgtatacagggttactgttggggttattgtggggcagtgtaaggtgatgaagatctcactgacttagtgttgatggcttgagtttgagtcctggtattaccactcgtttgttgataatcttaggtaaataaactggcattgctaagccccagaaaaatgtatttagtggaacagatgaaatatgattcagtggttaggaagttaacttctgaagacagacaaacctaagtttgaatcatggttcaccccttagtggctttgtggccttgggcaagtttctttaattttcttatctatactgtgaacagtacttacatcataggtttggtctgaagattctgtgagataatgcatatcaagtggttagcactttgccaggcacattgttaagtgcccaataaatgtgggccaaatgtgatagctcacccctgtaatgccagagctttgggaggatcctttgagatcaccctgggcaatatagcaaaatcccatctctagcaaaaaa

SEQ ID NO: 390115 - DNA, 592 bp, Homo sapiens
cctcctcagcctcccaaagtactgggattacaggtgtgagccaccatgccctgccggcttctccccagagctttatgccatgcctttgatgggcacctcttacctcctcccagcctaggaacttgcatgaaagggaactatgtccaagtcagttttgtgtccctagcaccagggaagaggatgggggttgctgagagggacaggaaaggattggggttgtgctgtgtgccctggcgcctctaccaagcagaaaccagccttccctgtctgctactgtgaaagcccaaggttgcccttctttgggggagttgaaagaaagcgggtgtttgttcagcacacttgggagcactgtgtgccagggctgggagatcttgggtgagggtactcaccatgctcattaccttgtaatggggttaggggtagcctgtccctatggaagcttgtccttgttcccagggagggtcaggagcatgggttgtgaagtcaggtagatctgagcttgaatcctggctctgccttttcatagctgtgtgtgcttgggccagcaatgtggtgtctctgagccttggtgccttattctacagagggatga

SEQ ID NO: 390116 - DNA, 483 bp, Homo sapiens
ggcaatttcattcctcacagtaagtgacgttttttgcagttcttctcgttgtctacccttcaggaatgtcttcgttcagttcatccacttttcatctgaattattcaaaaaaatgcaatagcagactggatgcagatgataaacaacaggggtttcaggagatctgcacagtttcagggtctgtccctgtagtagggtcacttattactttctccttcccttttttttttcaaacatctatattcttcaaattgttttcttgtagaaagaaaaaaacaaacaaactgtgaactcctctccaataaagtaagaaacaaggtttgttacccattttctttttcttttcaaccaaagacagaggccatctttgtgatctgtccttgctggagattatatatttcctctactctgaatcagccactagaaaggttaaaaaaaagagaaagacagagagacagagagagagagagacagagtggggga

SEQ ID NO: 390117 - DNA, 144 bp, Homo sapiens
ggagaaatgtaactcagcacccctcacgcagcaacacagacacactctgcacacgcatgtactccaaagctctcagcatccccagaaacacaaatccggggggctcagaggcgcacaaacaccagcacagctgccagccatcct

SEQ ID NO: 390118 - DNA, 468 bp, Homo sapiens
acacacacacatatacacgcatgcatatacacacatacgtgtgtacgtactctcacttatgcaaatgtgctatcttcaaagactcatgggcccatggcagctgcagtctcagtacataaaggggacttgaagtcagaaagggccaggcagcacaaggaggtcacgaagagcctgattcctgggccagactgcccaggatttcatggtttctgttgccttgtttctactttttaacttgacattattgacaatatatagttgtccctaagtatctatggggggtaccaaaattcttagctactcaagacccttatataaaatgccatagtgtttgcatgtaacttatgcacatctgcttgaatactttaaataatctctagatgacttatgacacctgatacaaggtaaatgctatgtaagtaattgttatactgtgttgttttttatttatgttatcttttgttgcac

SEQ ID NO: 390119 - DNA, 2153 bp, Homo sapiens
gaaaaacacaggctccctacgcgctgaaggaggcttggcccttgcgacgctccgtcgtcgggctcgttgccggtgcaaacagggaggaaacagccggcgttgctgtagcgcgtctgggaattacaccgggggactggccggcccgcttcgtgcctgcgggaagtcgggccgggggactcttcggaaactccgagcctcagagaaatatggcgctcccgacgctgccgtcctactggtgcagccagcagcgcctgaatcagcagctagcacgacagcgagagcaggaggcccggcttcggcagcagtgggagcagaacagccgttacttcaggatgtctgacatctgcagctccaaacaggcagaatggagctctaaaacctcctaccagcggagcatgcatgcctatcagcgggagaagatgaaggaggagaagaggaggagtctggaggcccgacgggaaaagctcaggcagctcatgcaggaggagcaggacctgctggccagagaactggaggagctgaggctgagcatgaacttgcaggaaagaagaatccgggagcagcacgggaagctgaaatcagccaaagaagagcagaggaaactgattgctgaacaacttttgtacgaacactggaaaaagaacaacccgaaacttcgagagatggagctggaccttcaccagaagcatgtcgtaaactcttgggaaatgcagaaagaagaaaaaaaacagcaagaagccaccgcagagcaagagaacaaacggtatgaaaatgaatatgaaagggcccgaagggaggcgctagaaaggatgaaagctgaagaggagaggaggcagctggaggacaagctccaggccgaggcactgctgcaacagatggaggagctgaagctgaaggaggtggaggcgaccaaactaaagaaggagcaggagaatctgttgaagcagcggtgggagctagagaggctggaggaagagcgaaagcagatggaagccttccggcagaaggcagagctggggcgtttcttgagacatcagtataacgctcaactcagcagacgcacacagcagatccaagaggagctggaggcagacaggcggatcctgcaggccctcctcgagaaggaggacgagagccagcgcctccacctggccaggcgggagcaggtcatggccgatgtggcctggatgaagcaggccattgaggagcagctgcagctggagcgggcgcgggaggcagagctgcagatgctgctgagggaggaggccaaggagatgtgggaaaagagagaggcagagtgggcccgagagcgcagcgcacgggacagactgatgagcgaggttctgacagggagacaacagcaaatacaagagaagattgagcagaaccgacgggcacaagaggaatccctgaaacacagggagcaacttattcgaaatcttgaggaggtgagagagttggctcgtcgcgagaaagaggagagtgaaaagctgaaatcggccaggaagcaggagctggaagcccaggttgcagagcgccggctgcaggcatgggaagcagaccagcaggaggaggaggaagaggaggaggcccggcgggtcgagcagctctcagatgccctgctgcagcaggaggcggagactatggctgagcagggctaccggcctaagccttacggacatccaaaaattgcttggaactgacttcatgggtaccataagtacagagaacaagggatgctgaggcttctgatcccagccgccaggcagttttacagggctctgttaacagtaagtgcccggggcactgtcagatggctcagcagtgcctgctcaggttcatcattgaaacatcccagtgtttggccagacattaaggtgtcgtgagagtccctttcatgcctttcttacccaagcaagggtctttgatgggcacgtgtttacagcgctgctgcatagtcttgtaatatattaacagtcacatcaactgaaggtcaatactaagagccacaggttgtacctgtgatggggcgtgtggtttcctgttgtctcacctttaattgtcaacctccagtgttgactctagaaatatgaggaaagcttttcagtttttaaaattgccatttaaatttagtctattaaaaacaaacctag

SEQ ID NO: 390120 - DNA, 3251 bp, Homo sapiens
gaaaaacacaggctccctacgcgctgaaggaggcttggcccttgcgacgctccgtcgtcgggctcgttgccggtgcaaacagggaggaaacagccggcgttgctgtagcgcgtctgggaattacaccgggggactggccggcccgcttcgtgcctgcgggaagtcgggccgggggactcttcggaaactccgagcctcagagaaatatggcgctcccgacgctgccgtcctactggtgcagccagcagcgcctgaatcagcagctagcacgacagcgagagcaggaggcccggcttcggcagcagtgggagcagaacagccgttacttcaggatgtctgacatctgcagctccaaacaggcagaatggagctctaaaacctcctaccagcggagcatgcatgcctatcagcgggagaagatgaaggaggagaagaggaggagtctggaggcccgacgggaaaagctcaggcagctcatgcaggaggagcaggacctgctggccagagaactggaggagctgaggctgagcatgaacttgcaggaaagaagaatccgggagcagcacgggaagctgaaatcagccaaagaagagcagaggaaactgattgctgaacaacttttgtacgaacactggaaaaagaacaacccgaaacttcgagagatggagctggaccttcaccagaagcatgtcgtaaactcttgggaaatgcagaaagaagaaaaaaaacagcaagaagccaccgcagagcaagagaacaaacggtatgaaaatgaatatgaaagggcccgaagggaggcgctagaaaggatgaaagctgaagaggagaggaggcagctggaggacaagctccaggccgaggcactgctgcaacagatggaggagctgaagctgaaggaggtggaggcgaccaaactaaagaaggagcaggagaatctgttgaagcagcggtgggagctagagaggctggaggaagagcgaaagcagatggaagccttccggcagaaggcagagctggggcgtttcttgagacatcagtataacgctcaactcagcagacgcacacagcagatccaagaggagctggaggcagacaggcggatcctgcaggccctcctcgagaaggaggacgagagccagcgcctccacctggccaggcgggagcaggtcatggccgatgtggcctggatgaagcaggccattgaggagcagctgcagctggagcgggcgcgggaggcagagctgcagatgctgctgagggaggaggccaaggagatgtgggaaaagagagaggcagagtgggcccgagagcgcagcgcacgggacagactgatgagcgaggttctgacagggagacaacagcaaatacaagagaagattgagcagaaccgacgggcacaagaggaatccctgaaacacagggagcaacttattcgaaatcttgaggaggtgagagagttggctcgtcgcgagaaagaggagagtgaaaagctgaaatcggccaggaagcaggagctggaagcccaggttgcagagcgccggctgcaggcatgggaagcagaccagcaggaggaggaggaagaggaggaggcccggcgggtcgagcagctctcagatgccctgctgcagcaggaggcggagactatggctgagcagggctaccggcctaagccttacggacatccaaaaattgcttggaactgacttcatgggtaccataagtacagagaacaagggatgctgaggcttctgatcccagccgccaggcagttttacagggctctgttaacagtaagtgcccggggcactgtcagatggctcagcagtgcctgctcaggttcatcattgaaacatcccagtgtttggccagacattaaggtgtcgtgagagtccctttcatgcctttcttacccaagcaagggtctttgatgggcacgtgtttacagcgctgctgcatagtcttgtaatatattaacagtcacatcaactgaaggtcaatactaagagccacaggttgtacctgtgatggggcgtgtggtttcctgttgtctcacctttaattgtcaacctccagtgttgactctagaaatatgaggaaagcttttcagtttttaaaattgccatttaaatttagtctattaaaaacaaacctagaggtcttggtgcagttgatttcagagtttattaatttagtggtcccaaaagtattacatcttttatattctggaagaaaagaactgtgaacaaattagaaccccggaacactctgacgtccatggacgcattccagaaaagtggcaagagatgagtctttcctcctccaggaagcattttggtagaatttccatagagcattgtctgtgagtgactgatcccaacatgtatgttactaagccccaaaacgaacttcaaactgggtgtggtggcacgtgcctttagtcccagctacccgggaggctgcggccaagaggattgcttgagcccaggagttcgagtccaacctgggcaaaagagtgagaccccatctctaaaaccaaaaaggtaccttagaaggtcacctggttggctaaccttttaaaggcaggggcgtgacacgtaggacacattgggaatgtcttggctactacatgtagccttctgggatatatgtgcccagagggagaagcactgagcctgaagaaactagatgagtctcagaaccacagaccggccagaaatctctcccaccattatatcagcgtgatacaggtctacattcatttctacaaacaggaacaagttccttgcagcaataatattattttatgacttgtatttttactatacccttcctctgaggtttagttttcatcacattatgttcaagattccatatctccgtaaattacagctaattacagggcattgttccatggttattaaaaatcagagtttattaaaaatcctgagtcttaagggctgtcttacctttcacttccactgtcctgtagaaacagatcaagctgcaaaccacgtccttcatctgttgttcattttcttgcaactctttgactctgatcccctgagcagcacgttcatcacgcatgctctctgttgcgttccccatttcagatgtccagtaatggtgaaataaaatcctgcttcgacagcaaaaaaacaccacacaacaccacccccaccccttagaccccactcgcccccaacaacttttctacacaacccttataccccctcgtccccctctcacaatcc

SEQ ID NO: 390121 - DNA, 2895 bp, Homo sapiens
  misc_feature (12)..(12): n is a, c, g, or t
gtttccactcgnaagcatatatgtcgtgtgtgctggcgagggatagtactgtacttcatgtaggctcaatggtcgtaagcatagtgttccctgcaataccaagcctctctatgctaagcaggagtgattgacgattctgatgatctgcccatatagatgagtcgatagttaatatcgagataatctcggagtgaccctgcgttaatgctctcaggcagctcatgcaggaggagcaggacctgctggccagagaactggaggagctgaggctgagcatgaacttgcaggaaagaagaatccgggagcagcacgggaagctgaaatcagccaaagaagagcagaggaaactgattgctgaacaacttttgtacgaacactggaaaaagaacaacccgaaacttcgagagatggagctggaccttcaccagaagcatgtcgtaaactcttgggaaatgcagaaagaagaaaaaaaacagcaagaagccaccgcagagcaagagaacaaacggtatgaaaatgaatatgaaagggcccgaagggaggcgctagaaaggatgaaagctgaagaggagaggaggcagctggaggacaagctccaggccgaggcactgctgcaacagatggaggagctgaagctgaaggaggtggaggcgaccaaactaaagaaggagcaggagaatctgttgaagcagcggtgggagctagagaggctggaggaagagcgaaagcagatggaagccttccggcagaaggcagagctggggcgtttcttgagacatcagtataacgctcaactcagcagacgcacacagcagatccaagaggagctggaggcagacaggcggatcctgcaggccctcctcgagaaggaggacgagagccagcgcctccacctggccaggcgggagcaggtcatggccgatgtggcctggatgaagcaggccattgaggagcagctgcagctggagcgggcgcgggaggcagagctgcagatgctgctgagggaggaggccaaggagatgtgggaaaagagagaggcagagtgggcccgagagcgcagcgcacgggacagactgatgagcgaggttctgacagggagacaacagcaaatacaagagaagattgagcagaaccgacgggcacaagaggaatccctgaaacacagggagcaacttattcgaaatcttgaggaggtgagagagttggctcgtcgcgagaaagaggagagtgaaaagctgaaatcggccaggaagcaggagctggaagcccaggttgcagagcgccggctgcaggcatgggaagcagaccagcaggaggaggaggaagaggaggaggcccggcgggtcgagcagctctcagatgccctgctgcagcaggaggcggagactatggctgagcagggctaccggcctaagccttacggacatccaaaaattgcttggaactgacttcatgggtaccataagtacagagaacaagggatgctgaggcttctgatcccagccgccaggcagttttacagggctctgttaacagtaagtgcccggggcactgtcagatggctcagcagtgcctgctcaggttcatcattgaaacatcccagtgtttggccagacattaaggtgtcgtgagagtccctttcatgcctttcttacccaagcaagggtctttgatgggcacgtgtttacagcgctgctgcatagtcttgtaatatattaacagtcacatcaactgaaggtcaatactaagagccacaggttgtacctgtgatggggcgtgtggtttcctgttgtctcacctttaattgtcaacctccagtgttgactctagaaatatgaggaaagcttttcagtttttaaaattgccatttaaatttagtctattaaaaacaaacctagaggtcttggtgcagttgatttcagagtttattaatttagtggtcccaaaagtattacatcttttatattctggaagaaaagaactgtgaacaaattagaaccccggaacactctgacgtccatggacgcattccagaaaagtggcaagagatgagtctttcctcctccaggaagcattttggtagaatttccatagagcattgtctgtgagtgactgatcccaacatgtatgttactaagccccaaaacgaacttcaaactgggtgtggtggcacgtgcctttagtcccagctacccgggaggctgcggccaagaggattgcttgagcccaggagttcgagtccaacctgggcaaaagagtgagaccccatctctaaaaccaaaaaggtaccttagaaggtcacctggttggctaaccttttaaaggcaggggcgtgacacgtaggacacattgggaatgtcttggctactacatgtagccttctgggatatatgtgcccagagggagaagcactgagcctgaagaaactagatgagtctcagaaccacagaccggccagaaatctctcccaccattatatcagcgtgatacaggtctacattcatttctacaaacaggaacaagttccttgcagcaataatattattttatgacttgtatttttactatacccttcctctgaggtttagttttcatcacattatgttcaagattccatatctccgtaaattacagctaattacagggcattgttccatggttattaaaaatcagagtttattaaaaatcctgagtcttaagggctgtcttacctttcacttccactgtcctgtagaaacagatcaagctgcaaaccacgtccttcatctgttgttcattttcttgcaactctttgactctgatcccctgagcagcacgttcatcacgcatgctctctgttgcgttccccatttcagatgtccagtaatggtgaaataaaatcctgcttcgacagca

SEQ ID NO: 390122 - DNA, 2843 bp, Homo sapiens
tctcccagggcctggcatgcagtacatcaacccaaggtggcctttgaaattgtatttccatttcagcgtccagcccaaccctagggctagtgggagggaagtctctgttactttgtaccagctcaaaagattggtgtaggagtgcctggtcctttggtcttctgattgacatgcattcacactatacatgttgaagtcaccccacgctctctactagacgcctgtgccactgagtccccatgaagcgaagtcatggccacgttcccgcaggtggcacagagggcaggagcacactgtccccacagtgcccatctgtctggtgaggaaattcacatcgtcccccttccatcctcagatggagctggaccttcaccagaagcatgtcgtaaactcttgggaaatgcagaaagaagaaaaaaaacagcaagaagccaccgcagagcaagagaacaaacggtatgaaaatgaatatgaaagggcccgaagggaggcgctagaaaggatgaaagctgaagaggagaggaggcagctggaggacaagctccaggccgaggcactgctgcaacagatggaggagctgaagctgaaggaggtggaggcgaccaaactaaagaaggagcaggagaatctgttgaagcagcggtgggagctagagaggctggaggaagagcgaaagcagatggaagccttccggcagaaggcagagctggggcgtttcttgagacatcagtataacgctcaactcagcagacgcacacagcagatccaagaggagctggaggcagacaggcggatcctgcaggccctcctcgagaaggaggacgagagccagcgcctccacctggccaggcgggagcaggtcatggccgatgtggcctggatgaagcaggccattgaggagcagctgcagctggagcgggcgcgggaggcagagctgcagatgctgctgagggaggaggccaaggagatgtgggaaaagagagaggcagagtgggcccgagagcgcagcgcacgggacagactgatgagcgaggttctgacagggagacaacagcaaatacaagagaagattgagcagaaccgacgggcacaagaggaatccctgaaacacagggagcaacttattcgaaatcttgaggaggtgagagagttggctcgtcgcgagaaagaggagagtgaaaagctgaaatcggccaggaagcaggagctggaagcccaggttgcagagcgccggctgcaggcatgggaagcagaccagcaggaggaggaggaagaggaggaggcccggcgggtcgagcagctctcagatgccctgctgcagcaggaggcggagactatggctgagcagggctaccggcctaagccttacggacatccaaaaattgcttggaactgacttcatgggtaccataagtacagagaacaagggatgctgaggcttctgatcccagccgccaggcagttttacagggctctgttaacagtaagtgcccggggcactgtcagatggctcagcagtgcctgctcaggttcatcattgaaacatcccagtgtttggccagacattaaggtgtcgtgagagtccctttcatgcctttcttacccaagcaagggtctttgatgggcacgtgtttacagcgctgctgcatagtcttgtaatatattaacagtcacatcaactgaaggtcaatactaagagccacaggttgtacctgtgatggggcgtgtggtttcctgttgtctcacctttaattgtcaacctccagtgttgactctagaaatatgaggaaagcttttcagtttttaaaattgccatttaaatttagtctattaaaaacaaacctagaggtcttggtgcagttgatttcagagtttattaatttagtggtcccaaaagtattacatcttttatattctggaagaaaagaactgtgaacaaattagaaccccggaacactctgacgtccatggacgcattccagaaaagtggcaagagatgagtctttcctcctccaggaagcattttggtagaatttccatagagcattgtctgtgagtgactgatcccaacatgtatgttactaagccccaaaacgaacttcaaactgggtgtggtggcacgtgcctttagtcccagctacccgggaggctgcggccaagaggattgcttgagcccaggagttcgagtccaacctgggcaaaagagtgagaccccatctctaaaaccaaaaaggtaccttagaaggtcacctggttggctaaccttttaaaggcaggggcgtgacacgtaggacacattgggaatgtcttggctactacatgtagccttctgggatatatgtgcccagagggagaagcactgagcctgaagaaactagatgagtctcagaaccacagaccggccagaaatctctcccaccattatatcagcgtgatacaggtctacattcatttctacaaacaggaacaagttccttgcagcaataatattattttatgacttgtatttttactatacccttcctctgaggtttagttttcatcacattatgttcaagattccatatctccgtaaattacagctaattacagggcattgttccatggttattaaaaatcagagtttattaaaaatcctgagtcttaagggctgtcttacctttcacttccactgtcctgtagaaacagatcaagctgcaaaccacgtccttcatctgttgttcattttcttgcaactctttgactctgatcccctgagcagcacgttcatcacgcatgctctctgttgcgttccccatttcagatgtccagtaatggtgaaataaaatcctgcttcgacagca

SEQ ID NO: 390123 - DNA, 994 bp, Homo sapiens
gaaaaacacaggctccctacgcgctgaaggaggcttggcccttgcgacgctccgtcgtcgggctcgttgccggtgcaaacagggaggaaacagccggcgttgctgtagcgcgtctgggaattacaccgggggactggccggcccgcttcgtgcctgcgggaagtcgggccgggggactcttcggaaactccgagcctcagagaaatatggcgctcccgacgctgccgtcctactggtgcagccagcagcgcctgaatcagcagctagcacgacagcgagagcaggaggcccggcttcggcagcagtgggagcagaacagccgttacttcaggatgtctgacatctgcagctccaaacaggcagaatggagctctaaaacctcctaccagcggagcatgcatgcctatcagcgggagaagatgaaggaggagaagaggaggagtctggaggcccgacgggaaaagctcaggcagctcatgcaggaggagcaggacctgctggccagagaactggaggagctgaggctgagcatgaacttgcaggaaagaagaatccgggagcagcacgggaagctgaaatcagccaaagaagagcagaggaaactgattgctgaacaacttttgtacgaacactggaaaaagaacaacccgaaacttcgagagatggagctggaccttcaccagaagcatgtcgtaaactcttgggaaatgcagaaagaagaaaaaaaacagcaagaagccaccgcagagcaagagaacaaacggtatgaaaatgaatatgaaagggcccgaagggaagctgaaatcagccaaagaagagcagaggaaactgattgctgaacaacttttgtacgaacactggaaaaagaacaacccgaaacttcgagagatggagctggaccttcaccagaagcatgtcgtaaactcttgggaaatgcagaaagaaggaaaaaaacagcaagaagccaccgcagagcaagagaacaaacggtatg

SEQ ID NO: 390124 - DNA, 375 bp, Homo sapiens
gtctcagcttcttcatctgcaagatgaaaggtctgtcctccatggtagcccaacatacttccgagtgttattatcagtcccctccccggggactgccagagccagggcaggttggtcccaacaggcagccccttgcagcagagagagcctgggctctggtctcagacggacatgaattaggaacccagcttgtttatctcctttacttcctggctctgtgatcctgagcaaatcactttgtaatgcttaacgttgtttttactaaccttgttttttaatgccttaccttgtttttactaaccttgcttttagactctttttttccccttaatcacctagccttgtttccacatgaattagctctcccttagttga

SEQ ID NO: 390125 - DNA, 379 bp, Homo sapiens
actaaagaaggagcaggagaatctgttgaagcagcggtgggagctagagaggctggaggaagagcgaaagcagatggaagccttccggcagaaggcagagctggggtgtgtgtcagaagggccccccactcttcccaggcgggtgggcctcttgctttttcagacttgcattcgtgttgctgaaaccataaaggagacagcctggtcagcagttatctaacttctatttaattctttctgagatactgaaggcagcccacatttgattctccttcaggcgtttcttgagacatcagtataacgctcaactcagcagacgcacacagcagatccaagaggagctggtaagtctgaagagacagcctgacatctttcttag

SEQ ID NO: 390126 - DNA, 769 bp, Homo sapiens
ctgatctgatcactcttatgttttctttcttttctcagccttacggacatccaaaaattgcttggaactgacttcatgggtaccataagtacagagaacaagggatgctgaggcttctgatcccagccgccaggcagttttacagggctctgttaacagtaagtgcccggggcactgtcagatggctcagcagtgcctgctcaggttcatcattgaaacatcccagtgtttggccagacattaaggtgtcgtgagagtccctttcatgcctttcttacccaagcaagggtctttgatgggcacgtgtttacagcgctgctgcatagtcttgtaatatattaacagtcacatcaactgaaggtcaatactaagagccacaggttgtacctgtgatggggcgtgtggtttcctgttgtctcacctttaattgtcaacctccagtgttgactctagaaatatgaggaaagcttttcagtttttaaaattgccatttaaatttagtctattaaaaacaaacctagaggtcttggtgcagttgatttcagagtttattaatttagtggtcccaaaagtattacatcttttatattctggaagaaaagaactgtgaacaaattagaaccccggaacactctgacgtccatggacgcattccagaaaagtggcaagagatgagtctttcctcctccaggaagcattttggtagaatttccatagagcattgtctgtgagtgactgatcccaacatgtatgttactaagccccaaaa

SEQ ID NO: 390127 - DNA, 3150 bp, Homo sapiens
gaaaaacacaggctccctacgcgctgaaggaggcttggcccttgcgacgctccgtcgtcgggctcgttgccggtgcaaacagggaggaaacagccggcgttgctgtagcgcgtctgggaattacaccgggggactggccggcccgcttcgtgcctgcgggaagtcgggccgggggactcttcggaaactccgagcctcagagaaatatggcgctcccgacgctgccgtcctactggtgcagccagcagcgcctgaatcagcagctagcacgacagcgagagcaggaggcccggcttcggcagcagtgggagcagaacagccgttacttcaggatgtctgacatctgcagctccaaacaggcagaatggagctctaaaacctcctaccagcggagcatgcatgcctatcagcgggagaagatgaaggaggagaagaggaggagtctggaggcccgacgggaaaagctcaggcagctcatgcaggaggagcaggacctgctggccagagaactggaggagctgaggctgagcatgaacttgcaggaaagaagaatccgggagcagcacgggaagctgaaatcagccaaagaagagcagaggaaactgattgctgaacaacttttgtacgaacactggaaaaagaacaacccgaaacttcgagagatggagctggaccttcaccagaagcatgtcgtaaactcttgggaaatgcagaaagaagaaaaaaaacagcaagaagccaccgcagagcaagagaacaaacggtatgaaaatgaatatgaaagggcccgaagggaggcgctagaaaggatgaaagctgaagaggagaggaggcagctggaggacaagctccaggccgaggcactgctgcaacagatggaggagctgaagctgaaggaggtggaggcgaccaaactaaagaaggagcaggagaatctgttgaagcagcggtgggagctagagaggctggaggaagagcgaaagcagatggaagccttccggcagaaggcagagctggggcgtttcttgagacatcagtataacgctcaactcagcagacgcacacagcagatccaagaggagctggaggcagacaggcggatcctgcaggccctcctcgagaaggaggacgagagccagcgcctccacctggccaggcgggagcaggtcatggccgatgtggcctggatgaagcaggccattgaggagcagctgcagctggagcgggcgcgggaggcagagctgcagatgctgctgagggaggaggccaaggagatgtgggaaaagagagaggcagagtgggcccgagagcgcagcgcacgggacagactgatgagcgaggttctgacagggagacaacagcaaatacaagagaagattgagcagaaccgacgggcacaagaggaatccctgaaacacagggagcaacttattcgaaatcttgaggaggtgagagagttggctcgtcgcgagaaagaggagagtgaaaagctgaaatcggccaggaagcaggagctggaagcccaggttgcagagcgccggctgcaggcatgggaagcagaccagcaggaggaggaggaagaggaggaggcccggcgggtcgagcagctctcagatgccctgctgcagcaggaggcggagactatggctgagcagggctaccggcctaagccttacggacatccaaaaattgcttggaactgacttcatgggtaccataagtacagagaacaagggatgctgaggcttctgatcccagccgccaggcagttttacagggctctgttaacagtaagtgcccggggcactgtcagatggctcagcagtgcctgctcaggttcatcattgaaacatcccagtgtttggccagacattaaggtgtcgtgagagtccctttcatgcctttcttacccaagcaagggtctttgatgggcacgtgtttacagcgctgctgcatagtcttgtaatatattaacagtcacatcaactgaaggtcaatactaagagccacaggttgtacctgtgatggggcgtgtggtttcctgttgtctcacctttaattgtcaacctccagtgttgactctagaaatatgaggaaagcttttcagtttttaaaattgccatttaaatttagtctattaaaaacaaacctagaggtcttggtgcagttgatttcagagtttattaatttagtggtcccaaaagtattacatcttttatattctggaagaaaagaactgtgaacaaattagaaccccggaacactctgacgtccatggacgcattccagaaaagtggcaagagatgagtctttcctcctccaggaagcattttggtagaatttccatagagcattgtctgtgagtgactgatcccaacatgtatgttactaagccccaaaacgaacttcaaactgggtgtggtggcacgtgcctttagtcccagctacccgggaggctgcggccaagaggattgcttgagcccaggagttcgagtccaacctgggcaaaagagtgagaccccatctctaaaaccaaaaaggtaccttagaaggtcacctggttggctaaccttttaaaggcaggggcgtgacacgtaggacacattgggaatgtcttggctactacatgtagccttctgggatatatgtgcccagagggagaagcactgagcctgaagaaactagatgagtctcagaaccacagaccggccagaaatctctcccaccattatatcagcgtgatacaggtctacattcatttctacaaacaggaacaagttccttgcagcaataatattattttatgacttgtatttttactatacccttcctctgaggtttagttttcatcacattatgttcaagattccatatctccgtaaattacagctaattacagggcattgttccatggttattaaaaatcagagtttattaaaaatcctgagtcttaagggctgtcttacctttcacttccactgtcctgtagaaacagatcaagctgcaaaccacgtccttcatctgttgttcattttcttgcaactctttgactctgatcccctgagcagcacgttcatcacgcatgctctctgttgcgttccccatttcagatgtccagtaatggtgaaataaaatcctgcttcgacagca

SEQ ID NO: 390128 - DNA, 3388 bp, Homo sapiens
gacgtgttcggggagcagcccaccttgtgggtggccaatccgggacgggaatcttaaacttttaactcttggtgcaaagactgatccactggcggctttacgggagcgggaaaaaagtatgtgaagcttgccacggtctcgagaccgaggtcacacgttagcagcctgccggctacatttggaccatagacgcagagtgtttgcccccaaaactggaggacctccagaatgagattcttggcgtgcaccaggccttttcgctcattcagccggcgttcctacccaggcactgcatcgaccctacacttgaggacagcttttgggtcaggggaattggtgcctggagtgagactgctctctgctttcaaggctccagctgtatccctacattgctcaggcaattcctctctctaggtctcagcttcttcatctgcaagatgaaagatggcgctcccgacgctgccgtcctactggtgcagccagcagcgcctgaatcagcagctagcacgacagcgagagcaggaggcccggcttcggcagcagtgggagcagaacagccgttacttcaggatgtctgacatctgcagctccaaacaggcagaatggagctctaaaacctcctaccagcggagcatgcatgcctatcagcgggagaagatgaaggaggagaagaggaggagtctggaggcccgacgggaaaagctcaggcagctcatgcaggaggagcaggacctgctggccagagaactggaggagctgaggctgagcatgaacttgcaggaaagaagaatccgggagcagcacgggaagctgaaatcagccaaagaagagcagaggaaactgattgctgaacaacttttgtacgaacactggaaaaagaacaacccgaaacttcgagagatggagctggaccttcaccagaagcatgtcgtaaactcttgggaaatgcagaaagaagaaaaaaaacagcaagaagccaccgcagagcaagagaacaaacggtatgaaaatgaatatgaaagggcccgaagggaggcgctagaaaggatgaaagctgaagaggagaggaggcagctggaggacaagctccaggccgaggcactgctgcaacagatggaggagctgaagctgaaggaggtggaggcgaccaaactaaagaaggagcaggagaatctgttgaagcagcggtgggagctagagaggctggaggaagagcgaaagcagatggaagccttccggcagaaggcagagctggggcgtttcttgagacatcagtataacgctcaactcagcagacgcacacagcagatccaagaggagctggaggcagacaggcggatcctgcaggccctcctcgagaaggaggacgagagccagcgcctccacctggccaggcgggagcaggtcatggccgatgtggcctggatgaagcaggccattgaggagcagctgcagctggagcgggcgcgggaggcagagctgcagatgctgctgagggaggaggccaaggagatgtgggaaaagagagaggcagagtgggcccgagagcgcagcgcacgggacagactgatgagcgaggttctgacagggagacaacagcaaatacaagagaagattgagcagaaccgacgggcacaagaggaatccctgaaacacagggagcaacttattcgaaatcttgaggaggtgagagagttggctcgtcgcgagaaagaggagagtgaaaagctgaaatcggccaggaagcaggagctggaagcccaggttgcagagcgccggctgcaggcatgggaagcagaccagcaggaggaggaggaagaggaggaggcccggcgggtcgagcagctctcagatgccctgctgcagcaggaggcggagactatggctgagcagggctaccggcctaagccttacggacatccaaaaattgcttggaactgacttcatgggtaccataagtacagagaacaagggatgctgaggcttctgatcccagccgccaggcagttttacagggctctgttaacagtaagtgcccggggcactgtcagatggctcagcagtgcctgctcaggttcatcattgaaacatcccagtgtttggccagacattaaggtgtcgtgagagtccctttcatgcctttcttacccaagcaagggtctttgatgggcacgtgtttacagcgctgctgcatagtcttgtaatatattaacagtcacatcaactgaaggtcaatactaagagccacaggttgtacctgtgatggggcgtgtggtttcctgttgtctcacctttaattgtcaacctccagtgttgactctagaaatatgaggaaagcttttcagtttttaaaattgccatttaaatttagtctattaaaaacaaacctagaggtcttggtgcagttgatttcagagtttattaatttagtggtcccaaaagtattacatcttttatattctggaagaaaagaactgtgaacaaattagaaccccggaacactctgacgtccatggacgcattccagaaaagtggcaagagatgagtctttcctcctccaggaagcattttggtagaatttccatagagcattgtctgtgagtgactgatcccaacatgtatgttactaagccccaaaacgaacttcaaactgggtgtggtggcacgtgcctttagtcccagctacccgggaggctgcggccaagaggattgcttgagcccaggagttcgagtccaacctgggcaaaagagtgagaccccatctctaaaaccaaaaaggtaccttagaaggtcacctggttggctaaccttttaaaggcaggggcgtgacacgtaggacacattgggaatgtcttggctactacatgtagccttctgggatatatgtgcccagagggagaagcactgagcctgaagaaactagatgagtctcagaaccacagaccggccagaaatctctcccaccattatatcagcgtgatacaggtctacattcatttctacaaacaggaacaagttccttgcagcaataatattattttatgacttgtatttttactatacccttcctctgaggtttagttttcatcacattatgttcaagattccatatctccgtaaattacagctaattacagggcattgttccatggttattaaaaatcagagtttattaaaaatcctgagtcttaagggctgtcttacctttcacttccactgtcctgtagaaacagatcaagctgcaaaccacgtccttcatctgttgttcattttcttgcaactctttgactctgatcccctgagcagcacgttcatcacgcatgctctctgttgcgttccccatttcagatgtccagtaatggtgaaataaaatcctgcttcgacagca

SEQ ID NO: 390129 - DNA, 1064 bp, Homo sapiens
gaaaaacacaggctccctacgcgctgaaggaggcttggcccttgcgacgctccgtcgtcgggctcgttgccggtgcaaacagggaggaaacagccggcgttgctgtagcgcgtctgggaattacaccgggggactggccggcccgcttcgtgcctgcgggaagtcgggccgggggactcttcggaaactccgagcctcagagaaatatggcgctcccgacgctgccgtcctactggtgcagccagcagcgcctgaatcagcagctagcacgacagcgagagcaggaggcccggcttcggcagcagtgggagcagaacagccgttacttcaggatgtctgacatctgcagctccaaacaggcagaatggagctctaaaacctcctaccagcggagcatgcatgcctatcagcgggagaagatgaaggaggagaagaggaggagtctggaggcccgacgggaaaagctcaggcagctcatgcaggaggagcaggacctgctggccagagaactggaggagctgaggctgagcatgaacttgcaggaaagaagaatccgggagcagcacgggaagctgaaatcagccaaagaagagcagaggaaactgattgctgaacaacttttgtacgaacactggaaaaagaacaacccgaaacttcgagagatggagctggaccttcaccagaagcatgtcgtaaactcttgggaaatgcagaaagaagaaaaaaaacagcaagaagccaccgcagagcaagagaacaaacggtatgaaaatgaatatgaaagggcccgaagggaggcgctagaaaggatgaaagctgaagaggagaggaggcagctggaggacaagctccaggccgaggcactgctgcaacagatggaggagctgaagctgaaggaggtggaggcgaccaaactaaagaaggagcaggagaatctgttgttcattttcttgcaactctttgactctgatcccctgagcagcacgttcatcacgcatgctctctgttgcgttccccatttcagatgtccagtaatggtgaaataaaatcctgcttcgacagca

SEQ ID NO: 390130 - DNA, 900 bp, Homo sapiens
gaaaaacacaggctccctacgcgctgaaggaggcttggcccttgcgacgctccgtcgtcgggctcgttgccggtgcaaacagggaggaaacagccggcgttgctgtagcgcgtctgggaattacaccgggggactggccggcccgcttcgtgcctgcgggaagtcgggccgggggactcttcggaaactccgagcctcagagaaatatggcgctcccgacgctgccgtcctactggtgcagccagcagcgcctgaatcagcagctagcacgacagcgagagcaggaggcccggcttcggcagcagtgggagcagaacagccgttacttcaggatgtctgacatctgcagctccaaacaggcagaatggagctctaaaacctcctaccagcggagcatgcatgcctatcagcgggagaagatgaaggaggagaagaggaggagtctggaggcccgacgggaaaagctcaggcagctcatgcaggaggagcaggacctgctggccagagaactggaggagctgaggctgagcatgaacttgcaggaaagaagaatccgggagcagcacgggaagctgaaatcagccaaagaagagcagaggaaactgattgctgaacaacttttgtacgaacactggaaaaagaacaacccgaaacttcgagaggtgaaaatcagagatctccattgatttatctaagtagatgaaatcatgtttccagacacttttttttttgaacacgtatcttgtaccgggttgaaacagaggagggaaccttgagccacctgaaaagagcgccaggcagaagatctggcacaggctgcgctgagcggctcattcggttgttgaacaaatgttgattgaacctccgctgcctggtctgccaggtgcgggcatggagatt

SEQ ID NO: 390131 - DNA, 409 bp, Homo sapiens
acagaggaggtcactggaactcatccacaatatgaaatgccacatcaagaagaacacgaacataatcttaattatctaagcacccatgataaccaaagattctttcaaccacttttatttcaaaggatgaagtagaatcagtggagcacaggagcagagagaggcagggacaaaacgacttccctgttatgacacaaataatgactgttttgtgcctacagtgactgctgtggtagacactgctaaactatcctaagggactaagttattctatgtatgaagggtgtggggaacagtgttccattatctctaacacactcatctctactttcctggaaaaagaggcacaatcaggagagcaggcaggcccaaagtaggcacaaagttactgtctgtggccttgaacata

SEQ ID NO: 390132 - DNA, 517 bp, Homo sapiens
caagctgatcccactagcttagattgtcagataattagtttgtagagcttgtttttcctgggattgtgcaaaaggccaggggttcttctagaatgctctgaaatttttaaagttatttatttcctgaactttttccttattccacataagaatgtggattaggactttggactattttactggcaaatgttatagtctcagtatctgattttaatatataagatcaagttaaattgttttcatctgatgagattttgaccccctgggaacatttggcaatgtctggagacgtttttggatgcacaactggagcaggggggcttccagcatctagtggatagagggcaaggaagtccccctgctcaagtgtgtttgaaaccaagagccagttgtcccccatgcagaaagaaatcctgtgtgagcctctggtatgagaaataaaatctgccagttttataacattcactttctgcctctgaggaaagatacagggaacaaaaatcaatttgtacagtct

SEQ ID NO: 390133 - DNA, 336 bp, Homo sapiens
cagataattgcttttaatgacatgaatgttggtataacggtagtaagatcacgataagatctgtggctctttcaaggttgggattttgtttttaattaggataagttttcctccgctaagcgaatggcttgtctttttttcttttggacacggatttgttcaactgatcctctgctgtcatgttggatgcaagaaagcttgctcaattttcagattttagatcttcaaagcatacattttgctttttattccacttccgtccctagtataggttctagcgtgccattccctttgtctcatcttttgcacttatatcaaaaaaccatttatttattt

SEQ ID NO: 390134 - DNA, 633 bp, Homo sapiens
caggaactctcatgctagcaggatgaggtaatgactatttcccatactcgtgtcaactttgagcaatgctaggaatttccatatgtccaaacaactgtttatcaggaaatgcaacaaggtacttttgacactgagcgtgaaaggaactcattgaaccaaaatcttccaaaaagactggaacataagagagcggatgaagagcataatagaagagaagtgccagggaggaggattatcttaggcagagcacactgaggatggagagttaccagccctcccgagctgtcgttggcactgaaccaatgagagccattcatgtgcctgtctgtgccttgtgtttttcttcttcaacatatactttagaacatccattctgtgcaaagctctgtgcccacagctgttgagatgccagatgcatgctgttccctgccctgaagaccccagcagtcaggccagggagagaagacattcttagacaacccaacagtcgtccctggggaaagatgcccctccaagaggacaggaattggacccactttgggtagccttgtacaatgcaacccagcacccagcaacgtcctgaagaggctgctgactgctctggtcgaagtggagcagggcccttcctccctc

SEQ ID NO: 390135 - DNA, 309 bp, Homo sapiens
gtagacccctgtggcgacctacttaattcacacccggcatcctgacgtgtagactcctatgtagacctatttaattcacaccaggagtcctgatatgtagatccctgtggagacctacttaattcacacccggcatcctgatgtgtagactcctatgtagacctatttaattcacaccaggagtcctgatatgtagatccctgtggagacctacttaattcacacccggcatcttgacatgtagactcctatgtagacatacttaattcacattgagcatcctgacgtgtagacccctgtgtagaccta

SEQ ID NO: 390136 - DNA, 612 bp, Homo sapiens
tccagaaacttctcaggaaacccaagtttgaaggatggtgacacaggggagccaaggagagggcaggcctttcctgagtgctgagtctgcaggccctgcccaggaacagcccaatgggtacagatgctcgcacgactcagagtgccagagcagctgctgcgtccgcaacaacagcccgcaggagttgtgcacgccccaaagcgtcttcctgcagtgtgtgccctggcgcaagcccaacggcgacttctgcagcagccatcaggagtgtcacagccagtgctgcatccagctgagggagtacagccccttccgctgcattccccggaccgggatcctggcccagtgcctgcccctgtgatgtgagctcgaacctgggcgcgagggaccggcctgggccctgggatgttcacgcaggaccgcgttgcgcgggggctggttccagcggaagcttcccttacggtttgtgctgctgtttctggggctctgaaaatctgtgggaactgaaaggctgtgaccagcctggtggcgcaaagtgtctgtgagaacaaatcccaggcactggggtgtagcctgattgttaaacatcaataaaggctcctggccgactgagca

SEQ ID NO: 390137 - DNA, 219 bp, Homo sapiens
tctggcagggcagagctggttccccgggagatagctcagtgtgtcgccttaccatagagcacccttttggggccaagcagagcagcaggcctgttctcctgcaccccacaggaggcaccttgggccatgggtgtccagcagcacgtgggtgggagaggcctgggagagggcccctccagagaggggctggctctggagtaataaccgcaacagctgcaa

SEQ ID NO: 390138 - DNA, 784 bp, Homo sapiens
cgccctttagcgagcgccaaaaaactcccgaccccttcttggcgcgcgtcgccgcagagcccacccaggcgggatagagcttatggattggctaatgccgcagcaactcccgcctgcctgagctgttcccggaggtccgcaagcccccagccctcccatgcggaagagtctggctggtgcagagggctcaacttttccctaggctctggacccaaaggccttccacgtcctttggaacctgcttacttcctttattccctcgcagtctggctccttcctccatcctgggtgaccagtgggtgccgacattgacattcatataagaacacggaggaggtgcaggtgggaggagatgggctcagttttagccaacttaaaatagagtctgcagagcccgtgggacacaggggaggtatttggggacccagagttggggaactgtgggtagatatgggagttgaagacactgacagcaaagggtgcaactacagttcacctagcatagaaccctatgtgaccgttaaaaagaatgaggctcagtgaagtgaactcatagggaaacctgcccacaacaaattagacgcaggatgcagtagaaggctaagagaagtctggagccagacttgggtttaaagcctgggactgacacttgctatgcgaccttgaactgattacttaacgttactctgtacttcggtttcccaatctgcaaagcggggataagcaattacatccttctgtttgatgtgaacattaaataaattaatccacataaagcactcaa

SEQ ID NO: 390139 - DNA, 316 bp, Homo sapiens
gtgtcgacttctgctctacattttgcctcctaaaattattatctagcatcaacactgactgtttcagtaacaccaaaggaagacacacctcagcaaagttaactctggttcttaaccaaggcacacagcagaaaccactaggggcccattcaaagtctacccaacccagtggatcaagggtctgtagtgagtgagggggagtggaaaattgccaatatctccacactattctgatcagttgctgcaacagtctgaatcaacgggccttcctttactggaaaaggttcattctccttcagtaaggtctaggtcgacg

SEQ ID NO: 390140 - DNA, 880 bp, Homo sapiens
agcggctgggactataagcctttcttttcacaggaaaccctcctaattggtctgataaactttctgggactcaaaatagaaccacagcacagccttgcatcccagggatgaagcagacttgatcatggtggatacgctttgtgatggactgcccaacagttttaaatgtaaattgaaagaccccagtactggtccaagccctgaagactgcacccaggaaagtggaggtatggacagaggcagccggtgcctgaggaagctccacggggcaggcaaggcccccacgtccagtctcagcccctcttttggccacatgccggagaaggaaattttgtgccttgaataatgaatccccctggagcccacggtacctgtacttctctttagtgtccactgagaataacgtgttcgacattcaagtgacaacactggaaagcatttcaaagccctggagccccagaacgctgtacaccccgacggctcttctgcctgccctctctttggcttccaaatgcagcaagctctttctttacttaaaatgtgttcatctttcacacgcatcctggatgtaccacagaaagacagtacagataggcaggctcttatttctgaagctgagctggtcccgcccagcacaaagctttaaagctgctaaggctccaggatattatccagtttttaaaaatggaaaaactgggaacagggaggctcaatatcttgtcccaggcccaaacaggcttttctggagtcagtatcattcaactggctcaggctggattttcataagaaaagataataaacatttactaatgtaataaaatagacaccttttaagtcacaagcagtatccaaacctttgggacattctatggtgctgaac

SEQ ID NO: 390141 - DNA, 526 bp, Homo sapiens
ttctttaaaattttctctctgagaaatgggcttgcctgtggtttgggacgtttctatgtagggataacaaacagaaccaaaatagcaaaacagatgttttgatataatctaagaattgcatcctctcaactgggaactgtcatgaagaggaagaactcataaaatttgggaagtttcttgactgaattctgtggtgcagagtagcagtgttgactactagccaatgaggaagatttgaatattgaaattactggctgggcctggtgattcatgcctgtaatcccagcactttgggaggcctaggtgggcagattgcttaagctcaggagtttgagaccagcctaggcaacatggtgaaaccctgtctctacaaaaattagccgggcattggtggtgtgcacccgtaatcccagctactggggaggctgaggtggaaggatagcttgagcctgcgaggtggaggttgcattgagctgagacggcaccactggactccagcctaggcaatagagccagaccttgtctc

SEQ ID NO: 390142 - DNA, 363 bp, Homo sapiens
tttagaggagtttctatttagtgagtatattccaattcttttgttacaaaatgttgtcaacatttcttattttactcagcaaaacaaaaagctgtgaattgcctattttcactatgctgttgattcattcaagaaatatttatttgttatactcatctacttctgggtattctgctaggtactggaataaataaagcacattgtctctcctttaggaacttaaaacattgcaagtttcaagggcagtaccatttacagcatatatgctgcatttagctatattcagcataccaacaaagcatagataattaatagtactgggaaatgatgtcaaaatttccaaatttttatgccaagagaaca

SEQ ID NO: 390143 - DNA, 347 bp, Homo sapiens
atggcatggggtgggctgtgttttcatcgagagcacaataagtctttatatttgctgctggttggagttagagatctgggtatcttatgaatctggatatgtgttacttcttaagcagtttttaaaccgctccccattttagccctcatccttccttctgaagacacctcgccgttgggggaattttgccgtgtaagtcaggttagttctaggctgtcttccctcctggcttcgaatttcattttctcaggtctgttttgtcatttcccgtgctgccaatattttgttgccattatcctctctcttgttttctcttgtctttgtgggcttgtctcttttaaggacag

SEQ ID NO: 390144 - DNA, 566 bp, Homo sapiens
aaacaggcaagaaagaggacagcacacgagtatctgaagaaaaggttgaaatgttactgtaataaaagcggaaataaatttctacacagcttctttagaaatggtccgggagagagacagaagaagtaaaaggatgaggccatatcccagaagccaagaaggcagattctgtcgaagagggtgacagggtgccctacactgtaaaatgcttcaaacagatttaggagagtgaggaccaaaaagctgtgaccttgacaaccagaaattcacagtgacctttgaggaaacagttttctcaagatgtggaaatggaagtcagaatgcaaagagttgaggagcaagtgcatggtggtgaagccaacctattttttaattaaccagggtcaatgtactttaaaagtcttcagaatgcctgtaagtttcctttactagttccatgtactttcttgttttcccataaaaatctggatttgtggcagaagagaatgaaaaaaattaaaaattaaaagcgctgcttttccttaagcactgacaaaatacaataaaagctgattcttattaagttg

SEQ ID NO: 390145 - DNA, 664 bp, Homo sapiens
gtcatgtgagatatccaggcagacagtaggcctggctcactaacaggcaaagcaatcattcaactcatattcatttataatgggcctttgggagtaactaataaattaccaaaattgcaagtgttgaatctgcaaatgtcaaagacttccagtggattctttgacaacatgtacgtagtcgtcatttgtcagttttcttggggaatttatcttctcctggtgggcagcaggaaacggatcccactacagacattaaccatgcccaatattcacttttgcatgtccctaggcagctagggcagcttgaccaatcagctgcatttgcttaggatttctgaggctggaggtgaggatggaaaaaattctttacagtggttgcagcagtggcagcagtatccagtgtccagacgccttgccactggggtcagcatggcatccagcatccaacgccagctgtggctgtgacaaaggcagcagcactgggcgttcagcagcagcagcactgaggctgtcctcacctatctggctctgtgatggaatttggtgtaattctaggtacctggtctctgtttctgcttttttcccaagccttgtttctacagccttcaagtgattctgtaacttactcaatgtgctttcaataaaattcatttcctgatttaaa

SEQ ID NO: 390146 - DNA, 216 bp, Homo sapiens
agagaggtgtcttcacgtactggcccttccttgactagctcctgggaaatgacctgagctcgtggaatttccagtttgataatagtgttctagtatgcctgaggccttgggctgcattttgttagtttgacgagatagtttatgctaacagtatgaatcatggcgaatgtctgtttttgaatggctgaagccctgggccatgaggtatcactacac

SEQ ID NO: 390147 - DNA, 334 bp, Homo sapiens
tttttgtctgttttattcacttctgcatccctggtgtctagaatagttcctggtatatagtagatgttcaataaatatttgttgaatgaatgaattctctgtgtataaggcagttctgtaaagcccctaaatcttccttctccaagaagccctccttcaaatgtatgtaaccttatttagttattgcacatccccattttacagatgatgaaactaacgctggaaaaacttgtccagagtcactgacctgaaaagtggcagggccagatgcatttgtttatccaagaaaccctgagagggctgggcatggtggctggcacccgtgatcccagca

SEQ ID NO: 390148 - DNA, 248 bp, Homo sapiens
tttactgccataatccactgttatcagtaggattgtataatgttcctcaaatgtgttgaattggaaaagtttaagaatgattgatttagaaataagatgatgtcttctcagtataatctatagccatattcaagtagaaacaacaaatactcggaaatggtagtgattaaagggtgagtagagaaaagaaaagactaaaatgagccctttcgcatctagtaagtcacatcttcattaatatcagatct

SEQ ID NO: 390149 - DNA, 359 bp, Homo sapiens
aaacagaaatcactctaggtatttcaagcagaaagggattgcatataaggaattatatgcttccaaaattactgggaaggctaaggcagtagatggtgggaactgtggtgtccaaggacacactccactgtagcagcagtccggaggtcaggaatgactcttgctgggcaccacacttcaccacagtcatctctaaacaccaacaagatggtgaccaagatactgaaatgctgaatacagctgcctcactgctggtcattctgaacactcacattaatcaaagattacatatacccagatggtatccgattagcatagatctgctaggaatcatcatagccagacgtaggcaagacagg

SEQ ID NO: 390150 - DNA, 126 bp, Homo sapiens
aaaaaaacgaagcagttgctctccactcaccctcctggccctgctggggagccaactccagggacgccaatgctgtgcccaggctgcacagacggcctcggcaggtgtgggtgaggcagggcccta

SEQ ID NO: 390151 - DNA, 239 bp, Homo sapiens
aatataagacaaaaaggtcccaggtcaaacttatagctaacataaagtcatacttaacacaatatcacattgaaatgtgaatgattacaattagaagttttaaaaattgtttcactatccctcatatcaactaacatacagcctttgtaataaaattaaatgagtaggaaaaaatagaaacccatagactatattcctattctcttctttgagaatataaaccaactaggtttaatata

SEQ ID NO: 390152 - DNA, 216 bp, Homo sapiens
agattacacggcagtgcgaaacaatctgcaagcttcccaccagctcgcccctgcaatctggaaagagctgctggtagggaggtaaagtgcaaaaacagtgtattccccagaggaacaggggttgtgggaagggggtggcttggacgtcacggcaaggaaaggtgttaagagttaggtaccaactggccaggcgcggtggctcacacctgtaatccc

SEQ ID NO: 390153 - DNA, 445 bp, Homo sapiens
acaaaaggcatgtttctcatttgaggaaatgattacattgagccatggaaaagttcctgggaggaaaaaaaaaaaacaaaaaacaaattgaaagtcagcagccatcagacgatcagagtgtttatttcacaaatgatcagctatttaaaaagtactctcggccgggcgcggtggctcacgcctgtaatcccagcactttgggaggccgaggcgggcggatcacgaggtcaggagatcgagaccatcctggctaacacggtgaaaccccgtctctactaaaaatacaaaaagttagccgggcgtggtagcgggcgcctgtagtcccagctactcgggaggctgaggcaggagaatggcgtgaacccgggaggcggagcttgcagtgagccgagatcgcgccactgcactccagcctgggcgacagagcgagactccgtctcaaaaa

SEQ ID NO: 390154 - DNA, 876 bp, Homo sapiens
tcatcagtgaaagagatcttaacgggtgaagagaagacattgaaacacaagtgctagttacgtttaaatgcaggatggaccgagataggaggatttttttcttttaaataattggccatagtaaaaggtaaaaaggtaaaaacttgaatgtgaggactcatttgcacttcatattttgcttaatatgctgagagctgcaagagaggaggatctggtgtttcatcttagagcaaatcatacttgatagtaagagacagaaagtcataaaagcgtgatgttcagcaggcaggacatttaaatcatacagctcataatgatgttagttgatggtgttacatggttccatggctttttcctaagtgtgtttataagaaattggaacgaggatgttttctgtggcattttcttccaggagctcggttctgctaattgcttggtttgaataagtgctctctttccagttggtctataacatttcttttactatctaagaaattatgaagaaatagattgattaatttgaaaattacatttaagagtattttcctgtaaaattgttggttctgtgaaaaacaattcctgttatttcttctctaaatacaatgagaattttttttgttcttatattgaaatagctctttgatttcctaaattgctgtgctgctttttaaaggacggcatggtttcagaagctattaggttggtgcaaatgtatttgcggtttttgcattgttgaaatttgctgtttgatattggaatacactcttaaatcaatgtggttatgccacacatcattttaatgtgaatttctcactttatgcttttttgcgactgagttattacttgccgtttaagtttattttagactgtggaaaa

SEQ ID NO: 390155 - DNA, 426 bp, Homo sapiens
ttttcccacccttattccctaaccactcatttcccctcaccagaggaaccactgtttccatgggatatattagattgatttatatgaaattgccggtgtttgactatgatgatttcatgtggttcagcctaatatcagtgaaaaaacagagtcctatcttcatggagtttttattctagtgggaagtgtattacttaattattgcagtgtaacaaataaccccaaaatttagtggcttaaagcaacaaacatttattatctcacatttcctatgactcaataatttgggagcagcttagatgggtagttctggctcagggtgtctcatgaagttgtagtcaatatggtgtctggggatgtagtagtttaaaggcttaacttaggtctgaaggagcagtttccaaggtggttcacttacctggctat

SEQ ID NO: 390156 - DNA, 795 bp, Homo sapiens
gttgcacctttttttgagtttgaaatgatggtccttgcttgatttaaattgttttttctttgaatgcctatgaccaaaatatctccccgttaagccagcttctaggcccagaaaaatgaaagttgccttgggacaaaacaggaaaacaggatccatcaccattctaaaccatcagctttgtaaagacatctgagatgattatggcacaagaggcacagagagtaagtggatcttagtccagcagaatgattcctcctgggaccagaaaattcttctcattcttaattttctttatttgttttgcttcctataattactttaaaaattataatgtaaaatattttcaacagaccaaatatgagtaaggatatcatgaacactcatgttatgaatattctgcttaagaaatgatcatcaaaacgatgaaggccccaggtacctcatgctgatcacattcttcttaatgtcctcccaaactagaaaaagttactgccctcagaaagagtttcttatccctaagaacttctttatatttaatcatatagttatatcatcccaaataataggcagaatggttttaaaattgtcaaatatgcacatttccaatttcattaagcagagaacatatattttcacccataattatgttttgaaactcactcatgttgatacctattttactcttttatagtatacattgtataatgttgatggacatttagcttgtggtacattcttattttcttttatcttgttttttttttgctattataaacatagctgataggaatattt

SEQ ID NO: 390157 - DNA, 275 bp, Homo sapiens
attgcttcggcctggccgggagagcggaagggcctggtgtgggagagtcccttgcactgccaagacggggccactggaaggtatttgggtggaagaaagccagtaagcccatggggctggctgggggcaggaccacgcgttatgaccaccgtcctgttcctacccccaggagccccgtttgaccccgtgcggctactgggtaatgctgtatccagtgttacctgttcttgtcttcgggaaccgctatggctacggggacccggagttcctgaggt

SEQ ID NO: 390158 - DNA, 665 bp, Homo sapiens
ataaattcacattaaaacttgtccaaaaacaaaggagttttcttgtgagaagcagctgctcattctggggcattcaagtgcagtgagatgacaacgatgaccattggagatgctttcaaagtgatgccggcactagacagatggctggagtgtgtaccctttaaggactcacctatctcagaagtcatgtgtgtttctgtatgtgtaaatgcacaaacagactggaaggatatgtgttcagcgtcttttcagactgtgaaggtccctgcaaccagaaggagagctgtcttcaggaaaggatgaagggaacgagcatctgtctgtgactctggtggttgtgcaggcaggtcacctcaaggtggagtgacactgtggtgggacaggtggagcaccagtgaggaagctctcatgggcctgagccaactgaattaattaagaccaagaacagtaaagggacccagagggcaaactctgagaggcagtcataagcagcaccctctccccaaactgtattactcattcccacagaagtgtgtgtctgcttgcctttaatctgttctgactgtaagccattttgagacatcccagtcccaatgatggccaccatgttctgcattgaatagatgcttgacatacatccaattagtaaaagcgagtgaactaaa

SEQ ID NO: 390159 - DNA, 262 bp, Homo sapiens
cctactccattctaagggattcggctagtcactatttagctgtgaatccagcagccaaaaacgattgctatgtgttcagtcaacaagtgaaacaaagtacacaagctttctttatattagtgaagccagttctagaccatcctggctaacatggtgaaactaacaatacaaattaacaatacaaaaactaaaaatgcaaaaaaattagccgggcatggtggcgggtgcctgtagtcccagctactcgggaggctgaggcagg

SEQ ID NO: 390160 - DNA, 498 bp, Homo sapiens
tactttcacagggtcttgccagctggtaaggagcttgaaccctattttgaggtgggaggagccactggagagtactgagaagggcagtgacatggtcagatgggtctgcgtttgagaaagacaaactggggaaggaatagcatttgaaaggggcaggagcagtaagaatgtaaatgaaggccaggcacggtggctcacgcctggccaaacctatggttttatttatgtatattttagatttatttgttatatgtacttagttatatcttatatccctggaggctagaagagtgcctggcatagagtgcctgctcagtaagaatttgcagggtaagtacaggaatacagtggaaaaacaagaagcgtggtgctaatgaactacaacaggaactccaggtcaagatcatggactaagacatgtaaaggcctagatttcaggtttgcaaaaacaaatccccaaatataaggtcatttccaaattcccccgttggaaaagta

SEQ ID NO: 390161 - DNA, 123 bp, Homo sapiens
aacggcataaacatggttggaacgcacctgtgttgcatagatacgaggctcttcctgatttattgcctgtgcgtgtgttcaggcgtctgtcctggcatttgcctaagcctgctattgaaactg

SEQ ID NO: 390162 - DNA, 774 bp, Homo sapiens
aagcgttaatagagactgagcaagaatataaatgaataattacaaatcaaaccctccttttggaaaagcaccccaaagcaggggctctgtgaatactgtcatggtaacctcacctttatggaaagagaaataaagttttgaaataaaaggaaataagcctactttgaaaagattgtatatcattaacaatttttgtggtttatattttcctgaataagctagttttaaaacatataaacacattaagttggaagtgaatcttactaatgccagcactagttataattcatgattagcactggggcaagctgataatttgaaaatctcacagatttttactgctatttgtacccgtctatgttaactgtaccaatgataaaataataatcaaaggactgatggcttaatataatagctattgtgttctaaatatcttttatgctttgacattaaatgtctctcttgctttcgtatctgctttcaaaaatctactacccattcctgatagtatttaactggagttattagtcctttgacagtgctgcatgctattgacagtatcttttaatttgcttaatttcctgacatttgctatgttaattttttactttgggactttttaatgccagatttgtgcttaaaatagaaaagccctctactaataagatttagtcatatcacctaagtactacagagttgtcccagatgtaatagggagagataaagaagggatcacagataataagttttctctgctttccccacaaagttatt

SEQ ID NO: 390163 - DNA, 401 bp, Homo sapiens
cctccggtcctggcaaaccccaggctggctgggttgatattgccccagaaagcagaggaaccccacagggccatcccttcaagctcagcccgacaagaagccaacagaaagcatgtcatttggatgcaggacacagagcggtcttctctgtgagcaccagctctcatctgcttttaagagttgtggggaagaaaatgaggcaagtaaccttttcagaggaagtatttttaagatattaacatgttttccaacagcaatgtttttgaagactcagtctaattcatattcgtgtgtagcttctaaaataacctatattttcacaaactgttttcttggtaaaattttcaaaacattctcaaggaagatgcattctgtggcaatgggatgccaataaaactaaa

SEQ ID NO: 390164 - DNA, 111 bp, Homo sapiens
gtagtgagcgttcttgggcctgtctctttgtgcccctgttgggatgctactccagaaaacagacccagcggtggcctcaccatatcataggcttgcttgatttcatctctg

SEQ ID NO: 390165 - DNA, 596 bp, Homo sapiens
aaatatggcttacaccagatgctcccaccaaaattcatacataactgcaaatttttgatcctcctttttcctcctaccctagggaaaaagtctatcttttggtattctttctgtgcctctcatttagcttataaaaacaatacacaagggcaactttcatgaggctctggctccaaatgccacctgccaagtgctcgaagacaatactaagaggaaaaagccagtctcatttatacaggtcagagaaggctttaatgagtgataacacaggaaaggaaataaaagcttatagttagcagcattcaaggagatgaagtagcttagggagagggagattaacccaaaatgagtttgtaacctactgtttggcttccaaatgacacttgggatgcttttatgatctcagctatgggaataccacaatggggtcacacctccctggatcacaaaagctacacagtagggctaacacacagccccacccacttaaatgttcatcagagaattagctataacctcaaaggaaagctgaatgtccaaagggtaccaaggttacctcatggcacccaataaaagggtaccatgtgctcagctcc

SEQ ID NO: 390166 - DNA, 559 bp, Homo sapiens
tccaccggggattgtatgtagaactgctattattcatcccaccggcaggttgtactccaccggcaggttgtactccaccggcaggttgtactccaccggcaggttgtactccaccggcaggttgtactccaccggcaggttgtactccacctggcaggttgtactccacctggcaggttgtactcaggttattatttaaagttcttaggatgctgattctgtattactgtggattatctcttccaatgccttgcaattttaaattgtgagttcattttcagcttttttccctccactgctaccctctccatgggagtcctatgtaccctggattagaagagttcctgtggagcagagtctgtttactcatgacagatgcctcagggatttcccttgtctaagcccagttattgtgggaattttacaccacatggctattctaattttggtctccatacccatgtggcaaaggcttgaagtttctatttctcttgcgaaactccctaaccctcaccagatctctggggagacatgtcactttgaagtttccctgtggcat

SEQ ID NO: 390167 - DNA, 523 bp, Homo sapiens
tggcaatcacttaggaacgtggtaaggcttttaactatcaataatgctaccctttctttaagaatgtgattttatgtagacattaagactcaggcagatctagcttaaaatctacgtttagccactaactagctacatatgcctgggcagcttgtccacctctctaagcttcagtttctacgtccattgcacagggcactgacaccttgcgggatactgcgagtattaggaacagactgcaccaagtgccccgtagtgcatgcttggcctgtagcaatgcttaacacggggaagaacccttgttcttccttcccttcagaactgcttgccaccaaagtaattgcagcttctgaaaaaacaattcctacttcacgagcaggacacagcattagtaacagtgctggccggcatcacacgtggagctctaccgttctccatgtgctttgtcacagcatgtttcaaagctgtttttcacaaattagaatgttgtttagaagtctggattagaagtattagaaagagt

SEQ ID NO: 390168 - DNA, 544 bp, Homo sapiens
tagaggtgaccatccattgaagatctttattcacggagagtcccagtagcacaaagagttccagtactggatagctgaaaaaccatttccttctggcctaggaactcctgtttagttatgcagccatccctgacacacatattcagatgtacctctctaatcctgcctttctgggtcccttgctaacctcggcactaagcgatccaagtggaaattattcacagcagtgactcaattgagttatcaatttgtattgaaggaggttctttaggagcagactgtcaatctaaagagccaaaaaatcaaaataaaacattgtaggttcgttgggtgtgtagtgattacagccttgggaatgctccgtggggcctctggaatgtgtagagggcatctgcacttaattgtgtttttccctgtgctgcttctgtcccatccactttacaaaaaatgggtcttaacctggagtctatgaacctctgcaatgacatgcaaaatgtcatatgtttatacttttcttgggtgaagatccctaggtttggacaaa

SEQ ID NO: 390169 - DNA, 678 bp, Homo sapiens
cagtgactcttatcctgcccgccagttccaagggtttctaactttttgtcttggaaaggaaaaccactacctgtaagtatctgttttatgtgtttcttttcattgtgactgtgaatgttctgttagcagaatgccccagagattgtttgtgtgatatcattaatgccaagtaacaatgcaaagcatctgcaagagtaggcttgcaaaagtttaactctcctgttaactcagaagatggcaacttgcagtgttaacaaaccaaatgccaaaactgagattctttttattacgtgacacaaatttctaactcttctcagtccatccgtgctggcacttgccaatgaaataaccattttttaactgtgtaattgtttcctctgaaattagaatgtttcttctcagctaaatgaaatggcaaagggaaaagacacaaaaatgaacagaacagataatatcctcatggtacaaacatagagaaatttggatgagataatgtctggatacctttgcttaagtttagttatatttggagacatattttcaaaaacatgatttctgtttcattgtggggaagagagatagtgctggggaggcaaagaaatggccttgttctgaagtttttggactgatttttaggctctctctgctcagtactgagatttggtccagagactttgg

SEQ ID NO: 390170 - DNA, 834 bp, Homo sapiens
ggcttgagtccaccggtaaatgggtgttgcatggtgtggagtatgctgcttagtccgctttcagaagctcaagggtgacctgggagtgctttgactactcctagcagtaaaacgaatgcatttgcacttccagctgcatttcttcggcttcttgtacagtcttgagtctgggtcaacacatgagacgtccccaggtgcctctgcatttgctgaccaatggtcacttctgttgctgccatctaagagctcagagggagatccactcttgagtccagggccagaagcaggtgtgagctatggcacccggcctgactggtgtctttataagaagaggagatgaagacagagacacacacagaggaggcgtggggagagaccaaccctgccgtcaccttgatcctggacttccagcctccagaactaattcaggtgaagatgagctgaacctgctccctggccttcccctagtttctgtggcttgtgacagaaggtggaaaggaccaacatggaagagatgcatgaacaaactgcatgttttcagcaaacgtttccaagggttatcttagctggatgcgactgtactttggaagagtattttaggactccatgtctttatgaccctagcttctgctttaaagttgaagaactgagtcctgttatcagcttcatctctgtttggctcccaaagtaagggaattgttttgcaaaagtaagatgagttttatcagcaagctttgtagaaactttacccaaaaaggaaaaccagattcccactcaggctgttttgtaagagacggcacaaactctgggagtttgacctcaaagatgtatcac

SEQ ID NO: 390171 - DNA, 587 bp, Homo sapiens
gtgtcggatgctccaccacagcagggcgctggcctggactggtttcagcacatgaacagtgctcctgagtttgtggggaacagaacctcaggctgtgtctcactcagtccctccagaggacacggcacctagtccaggctcaagactccagcctccaggccacagctactgcaccatggccagcaagctccttggatgccttgtactctccatagactggtcccctgtccacaggcagctccctccttgacagatgtcaaggcctctgggtatccacctcccaacagagctggcaggcactagcagatcagttgactctacaatgcgcccctttccaaagagaaggcagagcagcctccaccccgcaggactccctatgcctccccagttgcctgcaccatccttctagtggtctctctcaccttggcccccatggcactggcccttcctggtgcctccactatccttctcccacccccacctcctgggggtactctacaggcttcactttccactcacatctgcagcactggcatctttctctgcagagctcaggaccctccaatccaattaccttccagcagctc

SEQ ID NO: 390172 - DNA, 177 bp, Homo sapiens
gttgtgaaccattaccacaatccagcataagaacatttccatcagcccagaaagcaacctcctgcctgcttgtatcaacccttgcctccgtctctagcccctggcagtcactgatctgctgtctctacagttttgctttctctagaaatgtcaaataaatacagatacaccttgtgg

SEQ ID NO: 390173 - DNA, 407 bp, Homo sapiens
ttatttcccctgagagccaaggagagacagacacattttcttgttgtttctttttgcttgttaaggaactttttctagtttgcacttagagcgtaaagatttggcctttgagcatctcagatttatgtgagagtctcagtcttaactccccaccttgtgcacacccaaggccttgtcttctacttccgtacggtttttaaaactcaaaactcttagttactatgattggcaaatgcctgcagggcagctgtggctgctacatccacttatcacttgtttttttccgtttttctctattttggggccctatatttataaaattttctttatttttgtgaaaggtcagcagtgcatttaagaagacaatttgcagtggggagttgtattgttgttattgttatttagtc

SEQ ID NO: 390174 - DNA, 455 bp, Homo sapiens
actttattggtttccatggaagcaaacactaatagtatttttattaaaaccattagccatttaaaaatacataaaaacaagtacacagaagcatacatatttccttttgcctcaggcttcagtacggcatacatggcactggttaccactgtggacttaaaatgctggggatcctctgagaattgtcctactgagaaggtaggaaatttaggctcattgtttagagcttttcctgtgggtgttgactctggcactccccaccatgcccacagtggggaggccaagacctgttggaaaggcactatcattgtctgctgttgagggcttgatgaacattcaagaaccacaggcttttacaatgaaccctgtggaagccccaagggttttgaagaaggtgtgggacaatgatcaaaactccactttagaaacatttttatggagccagacacaatgac

SEQ ID NO: 390175 - DNA, 336 bp, Homo sapiens
cctctccgcccggcagccaccccatctggttgaattaaagaaaatactttatcagaagaagatggccactgcccagttgcagaggactcccatgagtgcactggtatttcccaataagatatcaactgaacaccagtctttggtgttagtgaagaggcttctagcagtttcagtatcctgtatcacgtatttgaggggaatattcccagaatgcgcttatggaacaagatatctagatggatgctaggatgttatgatgctttacagaaaaaatatctaaggatggttgtctagctgatggttgttctagctgtatacacaaacacagaagatcct

SEQ ID NO: 390176 - DNA, 1831 bp, Homo sapiens
agcgttggggaaagcgcatgcgcgtcgggcacagcgcgtgcagcctcgtgcagctcttctggtctccggcgcccgcccctcagacgtaatgttgaattaaagaaaatactttatcagaagaagatggccactgcccagttgcagaggactcccatgagtgcactggtatttcccaataagatatcaactgaacaccagtctttggtgttagtgaagaggcttctagcagtttcagtatcctgtatcacgtatttgaggggaatattcccagaatgcgcttatggaacaagatatctagatgatctttgtgtcaaaatactgagagaagataaaaattgcccaggatctacacagttagtgaaatggatgctaggatgttatgatgctttacagaaaaaatatctaaggatggttgtctagctgtatacacaaacccagaagatcctcagacaatttcagaatgttaccaattcaaattcaaatacaccaataatggaccactcatggacttcataagtaaaaaccaaagcaacgaatctagcatgttgtctactgacaccaagaaagcaagcattctcctcattcgcaagatttatatcctaatgcaaaatctggggcctttacctaatgatgtttgtttgaccatgaaacttttttactatgatgaagttacacccccagattaccagcctcccggttttaaggatggtgattgtgaaggagttatatttgaaggggaacctatgtatttaaatgtgggagaagtctcaacaccttttcacatcttcaaagtaaaagtgaccactgagagagaacgaatggaaaatattgactcaactatactatcaccaaaacaaataaaaacaccatttcaaaaaatcctgagggacaaagatgtagaagatgaacaggagcattatacaagtgatgatttggacattgaaactaaaatggaagaacaggaaaaaaaccctgcatcttctgaacttgaagaaccaagtttagtttgtgaggaagatgaaattatgaggtctaaagaaagtccagatctttctatttctcattctcaggttgagcagttagtcaataaaacatctgaacttgatatgtctgaaagcaaaacaagaagtggaaaagtctttcagaataaaatggtcctccatcactttgattcttctagtcaagagtcagtgccaaaaaggagaaagtttagtgaaccaaaggaacatatataaaaattatttttgttctgcaggcttgcagagttcttctcaccatttaaactgaaggaccctatattatatttccctaactctgaagatgtatatgtagtttaaagcagtttgtacactaaaactaagtttttggctgactgtcatattgtggtccttaatcttgagataaatccaatagaacttttgaataaaagcaaaagtacaaatgtcataattgattcggtaataagtaaaatttcaaaattgattttgttcattacctacttaatatttcctttaaatatatactaactgttaaggccctctaatgccatttttctaaacagtaatgtttactttggtattaaaatttggtatggattcactttttacttatgttaaaattataccatttaactggctcttttgtcattgtgctgttattaaaacaatgttcttcaatattttgacataatgtattaacattttaatatataatgtacaatttaagaattggtgctttacctttactatgcttttttttacaggacaaaaagactgatttttaaagtatggcattttttgcagcataaataaaatattgttcagtacgtagg

SEQ ID NO: 390177 - DNA, 1834 bp, Homo sapiens
agcgttggggaaagcgcatgcgcgtcgggcacagcgcgtgcagcctcgtgcagctcttctggtctccggcgcccgcccctcagacgtaatgttgaattaaagaaaatactttatcagaagaagatggccactgcccagttgcagaggactcccatgagtgcactggtatttcccaataagatatcaactgaacaccagtctttggtgttagtgaagaggcttctagcagtttcagtatcctgtatcacgtatttgaggggaatattcccagaatgcgcttatggaacaagatatctagatggatgctaggatgttatgatgctttacagaaaaaatatctaaggatggttgtctagctataacggatagttgcttctaagacaatttcagaatgttaccaattcaaattcaaatacaccaataatggaccactcatggacttcataagtaaaaaccaaagcaacgaatctagcatgttgtctactgacaccaagaaagcaagcattctcctcattcgcaagatttatatcctaatgcaaaatctggggcctttacctaatgatgtttgtttgaccatgaaacttttttactatgatgaagttacacccccagattaccagcctcccggttttaaggatggtgattgtgaaggagttatatttgaaggggaacctatgtatttaaatgtgggagaagtctcaacaccttttcacatcttcaaagtaaaagtgaccactgagagagaacgaatggaaaatattgactcaactatactatcaccaaaacaaataaaaacaccatttcaaaaaatcctgagggacaaagatgtagaagatgaacaggagcattatacaagtgatgatttggacattgaaactaaaatggaagaacaggaaaaaaaccctgcatcttctgaacttgaagaaccaagtttagtttgtgaggaagatgaaattatgaggtctaaagaaagtccagatctttctatttctcattctcaggttgagcagttagtcaataaaacatctgaacttgatatgtctgaaagcaaaacaagaagtggaaaagtctttcagaataaaatggcaaatggaaatcaaccagtaaaatcttccaaagaaaatcggaagagaagtcaacatgaatctgggagaatagtcctccatcactttgattcttctagtcaagagtcagtgccaaaaaggagaaagtttagtgaaccaaaggaacatatataaaaattatttttgttctgcaggcttgcagagttcttctcaccatttaaactgaaggaccctatattatatttccctaactctgaagatgtatatgtagtttaaagcagtttgtacactaaaactaagtttttggctgactgtcatattgtggtccttaatcttgagataaatccaatagaacttttgaataaaagcaaaagtacaaatgtcataattgattcggtaataagtaaaatttcaaaattgattttgttcattacctacttaatatttcctttaaatatatactaactgttaaggccctctaatgccatttttctaaacagtaatgtttactttggtattaaaatttggtatggattcactttttacttatgttaaaattataccatttaactggctcttttgtcattgtgctgttattaaaacaatgttcttcaatattttgacataatgtattaacattttaatatataatgtacaatttaagaattggtgctttacctttactatgcttttttttacaggacaaaaagactgatttttaaagtatggcattttttgcagcataaataaaatattgttcagtacgtagg

SEQ ID NO: 390178 - DNA, 1229 bp, Homo sapiens
agcgttggggaaagcgcatgcgcgtcgggcacagcgcgtgcagcctcgtgcagctcttctggtctccggcgcccgcccctcagacgtaatgttgaattaaagaaaatactttatcagaagaagatggccactgcccagttgcagaggactcccatgagtgcactggtatttcccaataagatatcaactgaacaccagtctttggtgttagtgaagaggcttctagcagtttcagtatcctgtatcacgtatttgaggggaatattcccagaatgcgcttatggaacaagatatctagatgatctttgtgtcaaaatactgagagaagataaaaattgcccaggatctacacagttagtgaaatggatgctaggatgttatgatgctttacagaaaaaatatctaaggatggttgtctagctgtatacacaaacccagaagatcctcagacaatttcagaatgttaccaattcaaattcaaatacaccaataatggaccactcatggacttcataagtaaaaaccaaagcaacgaatctagcatgttgtctactgacaccaagaaagcaagcattctcctcattcgcaagatttatatcctaatgcaaaatctggggcctttacctaatgatgtttgtttgaccatgaaacttttttactatgatgaagttacacccccagattaccagcctcccggttttaaggatggtgattgtgaaggagttatatttgaaggggaacctatgtatttaaatgtgggagaagtctcaacaccttttcacatcttcaaagtaaaagtgaccactgagagagaacgaatggaaaatattgactcaactatactatcaccaaaacaaataaaaacaccatttcaaaaaatcctgagggacaaagatgtagaagatgaacaggagcattatacaagtgatgatttggacattgaaactaaaatggaagaacaggaaaaaaaccctgcatcttctgaacttgaagaaccaagtttagtttgtgaggaagatgaaattatgaggtctaaagaaagtccagatctttctatttctcattctcaggtagagcagttagacaataaaatagatactagaaattgaaagtacgaatggctctaaaagtgaaatcaatctaaaaaatacaacaaaaatgatatccaatggcagaagaaagaagagaaaataagagaaagaggacaatacaaagattagcgagccaga

SEQ ID NO: 390179 - DNA, 1794 bp, Homo sapiens
agcgttggggaaagcgcatgcgcgtcgggcacagcgcgtgcagcctcgtgcagctcttctggtctccggcgcccgcccctcagacgtaatgttgaattaaagaaaatactttatcagaagaagatggccactgcccagttgcagaggactcccatgagtgcactggtatttcccaataagatatcaactgaacaccagtctttggtgttagtgaagaggcttctagcagtttcagtatcctgtatcacgtatttgaggggaatattcccagaatgcgcttatggaacaagatatctagatgatctttgtgtcaaaatactgagagaagataaaaattgcccaggatctacacagttagtgaaatggatgctaggatgttatgatgctttacagaaaaaatatctaaggatggttgtctagctgtatacacaaacccagaagatcctcagacaatttcagaatgttaccaattcaaattcaaatacaccaataatggaccactcatggacttcataagtaaaaaccaaagcaacgaatctagcatgttgtctactgacaccaagaaagcaagcattctcctcattcgcaagatttatatcctaatgcaaaatctggggcctttacctaatgatgtttgtttgaccatgaaacttttttactatgatgaagttacacccccagattaccagcctcccggttttaaggatggtgattgtgaaggagttatatttgaaggggaacctatgtatttaaatgtgggagaagtctcaacaccttttcacatcttcaaagtaaaagtgaccactgagagagaacgaatggaaaatattgactcaactatactatcaccaaaacaaataaaaacaccatttcaaaaaatcctgagggacaaagatgtagaagatgaacaggagcattatacaagtgatgatttggacattgaaactaaaatggaagaacaggaaaaaaaccctgcatcttctgaacttgaagaaccaagtttagtttgtgaggaagatgaaattatgaggtctaaagaaagtccagatctttctatttctcattctcaggttgagcagttagtcaataaaacatctgaacttgatatgtctgaaagcaaaacaagaagtggaaaagtctttcagaataaaatggcaaatggaaatcaaccagtaaaatcttccaaagaaaatcggaagagaagtcaacatgaatctgggagaatagtcctccatcactttgattcttctagtcaagagtcagtgccaaaaaggagaaagtttagtgaaccaaaggaacatatataaaaattatttttgttctgcaggcttgcagagttcttctcaccatttaaactgaaggaccctatattatatttccctaactctgaagatgtatatgtagtttaaagcagtttgtacactaaaactaagtttttggctgactgtcatattgtggtccttaatcttgagataaatccaatagaacttttgaataaaagcaaaagtacaaatgtcataattgattcggtaataagtaaaatttcaaaattgattttgttcattacctacttaatatttcctttaaatatatactaactgttaaggccctctaatgccatttttctaaacagtaatgtttactttggtattaaaatttggtatggattcactttttacttatgttaaaattataccatttaactggctcttttgtcattgtgctgttattaaaacaatgttcttcaatattttgacataatgtattaacattttaatatataatgtacaattt

SEQ ID NO: 390180 - DNA, 1903 bp, Homo sapiens
agcgttggggaaagcgcatgcgcgtcgggcacagcgcgtgcagcctcgtgcagctcttctggtctccggcgcccgcccctcagacgtaatgttgaattaaagaaaatactttatcagaagaagatggccactgcccagttgcagaggactcccatgagtgcactggtatttcccaataagatatcaactgaacaccagtctttggtgttagtgaagaggcttctagcagtttcagtatcctgtatcacgtatttgaggggaatattcccagaatgcgcttatggaacaagatatctagatgatctttgtgtcaaaatactgagagaagataaaaattgcccaggatctacacagttagtgaaatggatgctaggatgttatgatgctttacagaaaaaatatctaaggatggttgtctagctgtatacacaaacccagaagatcctcagacaatttcagaatgttaccaattcaaattcaaatacaccaataatggaccactcatggacttcataagtaaaaaccaaagcaacgaatctagcatgttgtctactgacaccaagaaagcaagcattctcctcattcgcaagatttatatcctaatgcaaaatctggggcctttacctaatgatgtttgtttgaccatgaaacttttttactatgatgaagttacacccccagattaccagcctcccggttttaaggatggtgattgtgaaggagttatatttgaaggggaacctatgtatttaaatgtgggagaagtctcaacaccttttcacatcttcaaagtaaaagtgaccactgagagagaacgaatggaaaatattgactcaactatactatcaccaaaacaaataaaaacaccatttcaaaaaatcctgagggacaaagatgtagaagatgaacaggagcattatacaagtgatgatttggacattgaaactaaaatggaagaacaggaaaaaaaccctgcatcttctgaacttgaagaaccaagtttagtttgtgaggaagatgaaattatgaggtctaaagaaagtccagatctttctatttctcattctcaggttgagcagttagtcaataaaacatctgaacttgatatgtctgaaagcaaaacaagaagtggaaaagtctttcagaataaaatggcaaatggaaatcaaccagtaaaatcttccaaagaaaatcggaagagaagtcaacatgaatctgggagaatagtcctccatcactttgattcttctagtcaagagtcagtgccaaaaaggagaaagtttagtgaaccaaaggaacatatataaaaattatttttgttctgcaggcttgcagagttcttctcaccatttaaactgaaggaccctatattatatttccctaactctgaagatgtatatgtagtttaaagcagtttgtacactaaaactaagtttttggctgactgtcatattgtggtccttaatcttgagataaatccaatagaacttttgaataaaagcaaaagtacaaatgtcataattgattcggtaataagtaaaatttcaaaattgattttgttcattacctacttaatatttcctttaaatatatactaactgttaaggccctctaatgccatttttctaaacagtaatgtttactttggtattaaaatttggtatggattcactttttacttatgttaaaattataccatttaactggctcttttgtcattgtgctgttattaaaacaatgttcttcaatattttgacataatgtattaacattttaatatataatgtacaatttaagaattggtgctttacctttactatgcttttttttacaggacaaaaagactgatttttaaagtatggcattttttgcagcataaataaaatattgttcagtacgtagg

SEQ ID NO: 390181 - DNA, 1839 bp, Homo sapiens
agcgttggggaaagcgcatgcgcgtcgggcacagcgcgtgcagcctcgtgcagctcttctggtctccggcgcccgcccctcagacgtaatgttgaattaaagaaaatactttatcagaagaagatggccactgcccagttgcagaggactcccatgagtgcactggtatttcccaataagatatcaactgaacaccagtctttggtgttagtgaagaggcttctagcagtttcagtatcctgtatcacgtatttgaggggaatattcccagaatgcgcttatggaacaagatatctagatggatgctaggatgttatgatgctttacagaaaaaatatctaaggatggttgtctagctgtatacacaaacccagaagatcctcagacaatttcagaatgttaccaattcaaattcaaatacaccaataatggaccactcatggacttcataagtaaaaaccaaagcaacgaatctagcatgttgtctactgacaccaagaaagcaagcattctcctcattcgcaagatttatatcctaatgcaaaatctggggcctttacctaatgatgtttgtttgaccatgaaacttttttactatgatgaagttacacccccagattaccagcctcccggttttaaggatggtgattgtgaaggagttatatttgaaggggaacctatgtatttaaatgtgggagaagtctcaacaccttttcacatcttcaaagtaaaagtgaccactgagagagaacgaatggaaaatattgactcaactatactatcaccaaaacaaataaaaacaccatttcaaaaaatcctgagggacaaagatgtagaagatgaacaggagcattatacaagtgatgatttggacattgaaactaaaatggaagaacaggaaaaaaaccctgcatcttctgaacttgaagaaccaagtttagtttgtgaggaagatgaaattatgaggtctaaagaaagtccagatctttctatttctcattctcaggttgagcagttagtcaataaaacatctgaacttgatatgtctgaaagcaaaacaagaagtggaaaagtctttcagaataaaatggcaaatggaaatcaaccagtaaaatcttccaaagaaaatcggaagagaagtcaacatgaatctgggagaatagtcctccatcactttgattcttctagtcaagagtcagtgccaaaaaggagaaagtttagtgaaccaaaggaacatatataaaaattatttttgttctgcaggcttgcagagttcttctcaccatttaaactgaaggaccctatattatatttccctaactctgaagatgtatatgtagtttaaagcagtttgtacactaaaactaagtttttggctgactgtcatattgtggtccttaatcttgagataaatccaatagaacttttgaataaaagcaaaagtacaaatgtcataattgattcggtaataagtaaaatttcaaaattgattttgttcattacctacttaatatttcctttaaatatatactaactgttaaggccctctaatgccatttttctaaacagtaatgtttactttggtattaaaatttggtatggattcactttttacttatgttaaaattataccatttaactggctcttttgtcattgtgctgttattaaaacaatgttcttcaatattttgacataatgtattaacattttaatatataatgtacaatttaagaattggtgctttacctttactatgcttttttttacaggacaaaaagactgatttttaaagtatggcattttttgcagcataaataaaatattgttcagtacgtagg

SEQ ID NO: 390182 - DNA, 1777 bp, Homo sapiens
cctctccgcccggcagccaccccatctggttgaattaaagaaaatactttatcagaagaagatggccactgcccagttgcagaggactcccatgagtgcactggtatttcccaataagatatcaactgaacaccagtctttggtgttagtgaagaggcttctagcagtttcagtatcctgtatcacgtatttgaggggaatattcccagaatgcgcttatggaacaagatatctagatggatgctaggatgttatgatgctttacagaaaaaatatctaaggatggttgtctagctgtatacacaaacccagaagatcctcagacaatttcagaatgttaccaattcaaattcaaatacaccaataatggaccactcatggacttcataagtaaaaaccaaagcaacgaatctagcatgttgtctactgacaccaagaaagcaagcattctcctcattcgcaagatttatatcctaatgcaaaatctggggcctttacctaatgatgtttgtttgaccatgaaacttttttactatgatgaagttacacccccagattaccagcctcccggttttaaggatggtgattgtgaaggagttatatttgaaggggaacctatgtatttaaatgtgggagaagtctcaacaccttttcacatcttcaaagtaaaagtgaccactgagagagaacgaatggaaaatattgactcaactatactatcaccaaaacaaataaaaacaccatttcaaaaaatcctgagggacaaagatgtagaagatgaacaggagcattatacaagtgatgatttggacattgaaactaaaatggaagaacaggaaaaaaaccctgcatcttctgaacttgaagaaccaagtttagtttgtgaggaagatgaaattatgaggtctaaagaaagtccagatctttctatttctcattctcaggttgagcagttagtcaataaaacatctgaacttgatatgtctgaaagcaaaacaagaagtggaaaagtctttcagaataaaatggcaaatggaaatcaaccagtaaaatcttccaaagaaaatcggaagagaagtcaacatgaatctgggagaatagtcctccatcactttgattcttctagtcaagagtcagtgccaaaaaggagaaagtttagtgaaccaaaggaacatatataaaaattatttttgttctgcaggcttgcagagttcttctcaccatttaaactgaaggaccctatattatatttccctaactctgaagatgtatatgtagtttaaagcagtttgtacactaaaactaagtttttggctgactgtcatattgtggtccttaatcttgagataaatccaatagaacttttgaataaaagcaaaagtacaaatgtcataattgattcggtaataagtaaaatttcaaaattgattttgttcattacctacttaatatttcctttaaatatatactaactgttaaggccctctaatgccatttttctaaacagtaatgtttactttggtattaaaatttggtatggattcactttttacttatgttaaaattataccatttaactggctcttttgtcattgtgctgttattaaaacaatgttcttcaatattttgacataatgtattaacattttaatatataatgtacaatttaagaattggtgctttacctttactatgcttttttttacaggacaaaaagactgatttttaaagtatggcattttttgcagcataaataaaatattgttcagtacgtagg

SEQ ID NO: 390183 - DNA, 355 bp, Homo sapiens
tttgtggttaaaatggaattatacaaagctgaacgggatattttcttctatgctatgtgacattatattcttgtggccccaaaagaaaactctaaatttagctccttatttacactgaaaaagaaaatcatgttaaatttagtgccgtcttcatgctgtggtctttccatacaactactgttgactaccagatgtctctacttcctcaaattttactggttaggctggaatatctttcaattatgtttacagtttgagtttaattttaatcactgtttgtatttttatataatctatatccttgcatattttttgtacatttgtttttcatataggcttgttgctgaccttaggt

SEQ ID NO: 390184 - DNA, 282 bp, Homo sapiens
gcctcccaaggaactgggattacaggcgcccaccacacgcccgactaattttgtattttgggtagagactgggtttcaccatgttgtctaggctggtctcaaactcctgacctcaagtgatccgcccgcctcagcctcccaaagtgctgggattacaggcatgagccaccgcgcctggctgtaaaatatttttaatatatttaagttctgagggaaaaaaccttgaatttaataatcctctagtgacttgagagaacaaatattatggaatcttggatttat

SEQ ID NO: 390185 - DNA, 500 bp, Homo sapiens
tggagacagagtctcactccgtcacccaggctggggtgcagtggcacaatcttgggttactgcaacctctgcctcccaggttcaagtgattcttgtaccttggcctcccgagtagctggaattacaggcatacgccttcccacccagctaatttttgtatttttagtagagacagggtcttgtcatgttggccaggctggtctcgaactcctgacctcaagttatccacccgccttggcctcccaaagtgctgggattacaggtgtgagccaccgcacgcagcctaaatatgttctatatgttcaagaaggtagaagaaaatataaaataatgaagaaattgaagggataagaagacctacatggaacttctagagaaaaaaatataatgtataaaaaatgtactggaaagaatcaacataacagaaaaaaagatcagtgattctgaaaacagtaatggaaactagccaaaaggaagcagagaaggaaaaaagactgggg

SEQ ID NO: 390186 - DNA, 719 bp, Homo sapiens
aacttaggccttctgtcagtccaatagcctttccacttaattccctcacttctatgaatttctacagcatttaaagtctaagatcacagccttagagctttttctatccctcttttatagacgtggttgaaattacaatttcttaaagagcaagaactgaacctgataggacagtctcatgacttcttggtcagtctttggatctagagtagatacatgtagactcaggaaatcaacagaaactcttccctactcctcaccactagtcaccagaaacaaatcccagttccaggtacttggacctctgtggcaatgtcttaattattaaccactggcaaataactgccaggtctaaagaacaaacttcagcagttcccagactcagaagagatcctggttattagccatttgcaatcattacaacagtcaaatttcaggagcacaaacagaggtctttaagaataccaaacgtcaaatttaaaatataaaaaggataactatagagacagtctagtaacagcttcccccttcctgtaacattgttaccactacttgtggctctcagcaatttaaacaactaaaactcctgacaggtgatgatgttagagctgttctacttacaaaggagacacagttacattaaaaaataataatttaagcatcatcctaataacgcatgagccaagcgaaagataggttttgcaagcactgtaatagct

SEQ ID NO: 390187 - DNA, 111 bp, Homo sapiens
gtttcatctattctctcaatatgtcacttcaaatatgatcaggaaagaagtcttaaacatggctggaaatgtgggggcaacaaatacattagtgaacaccctggcggatcc

SEQ ID NO: 390188 - DNA, 526 bp, Homo sapiens
ttccacaatggttgaactagtttacactcccaccaacagtgtaaaagcgttcctatttctccacatcctctccagcatctgttgtttcctgactttttaatgatcgccattctaactggcgtgagatggactttttaaaaagcaacgatgaacatcatgattatatcctgtacgttgccacccatttttccagggaaggaaagaggagaaacctactataaactattccccctggcttcctgtacttcccctttgctctggcatcagcttttacgtgtgcaacaaaacatctccaaactcagtaggaaaactgagctgggtgtgatggctcacacctgtaaacctagcactttgggaggctgaggtgggatgattgcctgagcacagaagtttgagatcagcctgggtaacatggtgaaacctcatttctacaaaagataacaaaaattagccaggcatggtggtgtgcatctgtagtcctagctaataggcaagctaaggtgggaggattgcttgagtccaggag

SEQ ID NO: 390189 - DNA, 470 bp, Homo sapiens
aggcccttcaagtcacaacatgcatcactgtgtgcctcagatacagaggctgaccccatgccagccacggggcggctgccacttccacaacattcttatcacctgtgcacctgctgagggctgccttgggggctgtcccattggtccctggctagctccatagaaaagagcccgagtcagccggaagtggtggctcacgcctgtaatcccagcactttgggaggccaaggcgggcagatcacgaggtcaggagattgagaccatcctggttatggtgaaaccccatctctactaaaaatacaaaaaattacccaggcacgacggcacgcgcctgtagtcccagctactcgggaggctgaggcaggagaattgcttgaacctgggaggcggaggttgaagtgagccaagatcacgccattgcactccagcctgggtgacagagcgagactctatctcaaaaggaaaaaaaa

SEQ ID NO: 390190 - DNA, 413 bp, Homo sapiens
taaaatactaaaatatggaacagtacttatcataactttgagaacatattggagaagaacatccaggagattacttcctgttgagttttatattgtattttttcactgcctcatccccttgcatggtgttttactctttaagggactgtagaactgttcatatgttaaaagacatgacactgaaatgggtccctctcactgatcaactattagcggactgtgatggatttgactgtggaaaaatttacgtctactaatgtcttgcttcccttagcaattcctgagatgtttttaatgtgtccttctgaagtatcattaaaattatggggaggctgaggcgggtggatcatgaggtcaggagttcaagaccggcctggccaggggggtggagccccgtctctactaaaaataca

SEQ ID NO: 390191 - DNA, 502 bp, Homo sapiens
ccattccatctgctttacccacttatattacctgaaccctgagtgtcctagaacaggtgaaccctggcctaggtaatcacacctgctgaagaggctagtacctgaggcaggactataagaggggccagtgagccccgaggaaagaagggaggaagttttcatacccatagggaatctgaagcaggctgatttaattcaatctgagacagggcaagcgtgactagctttaaaagaagcccttgtgaaacacatcaccttgtcaactacagcactcgacagtgcggcacaacataaaatttccacaagcatttatgactggcatcagtttttcccatgtgctgacgtctgttgttgcttttagtattttttgttttgttttttagaaacagggtcatggagtgggtatggtcccagcactttgggaggctgaagtggggtgcgttgcttgagcccaggaatttgatttatacctttttttttttttttcctgagatggagtctc

SEQ ID NO: 390192 - DNA, 422 bp, Homo sapiens
aattgtgctgctgaggacacgtgtgtgtgagtctgtgtggatacatgtgttcgtttgtctcgggcagacacccaggagtggaattgccaagtcacgtgtaactcggtgtcatcttttgagaaactcgcaaactgttctccatagcagcggtaccgttttcacacccagcaacagtgaatgaggcccagcgtccccgtgtcctcaccagcactcgtgattgttgtctctgattctggcgtcctcatgggtgtgaggtggtgtctcttcgaggtgtctttttgtttgttttggtagagacagtgaatcgacccttttgctaagttggagctgtttcaaaatgggagaacctttagaacctagctagccaacaggactgggagggctgagtgacgtggtgcggcagttgcagccgagccctgtcc

SEQ ID NO: 390193 - DNA, 454 bp, Homo sapiens
ggatcacttgagtccaggaggtcgaggctgccgtgggctagcatcatgccactgcactgccccatgggcaacagagcgagacccctgtctctaaaacaaacaaaaagaagacaaaatttaatcatttattttattaacatacatatgggagttcaccagaaagactatccacattactagagatggaaactttcagctccttcccccaacctccagggaggggagtggggctagagactgggctccaaacactcttgaacaggaggttccgaaagtctggaatgatgaacgcattgatgtgctgggagggtggtgcacctggagaggacatggaagctctgttcccacctcctcctgctgtgccccgccccatgccttgccctatgcatcgcttccatttggttgatcctagttgtatcctttataataaactggaaaatgtaaataaaaaact

SEQ ID NO: 390194 - DNA, 264 bp, Homo sapiens
ttggagagcctgagagcagtgggcgggctggactcctccctgcccaggcaggtggcttgggactaaggtcccgtgcaaagaaccgcccagctcgccgtggctcagcccttcaaggctgctgccctgtgcctgggcaaggacacattaggatagggaaaaggcaggcccacgggtccactgggtcactgactggggcccgatgaggtttctggtttttgaaacatcacatcttagcaagatgtggtaacttggtctgaatcgcat

SEQ ID NO: 390195 - DNA, 565 bp, Homo sapiens
gtatctgggactacaggcgcctgccactatgcccagctaattttttttgtatttttagtagagacggagtttcaccgtgtcagccaggatggtctcgatctcctgacctcgtgatctacctgtctcagcctcccaaagtgctgggattacaggcatgagccaacgcgcccggccgatatagctagtttttaaaatgaaattacagtttaacattagctttttgatttactgtggtttttagggtactgtattagtagtgtcagggtcagtattatgttataaaaattgtgtcttagctttgcatttaatgcttgacttgcttgctactttttctctacgtgtgtgtctcattgcttttatccttttgctgtgagggttagagtttgtaaccaaacactaatgcagtcatactttataaggcatttattcaaagctttattgggcatcaataaataatggctacttaaattaattaaaatttaaaattcaattcctcagtaaccctagccacatttcaagtgctcaacagctacatgtgggtagtggttactatattggacagtgc

SEQ ID NO: 390196 - DNA, 762 bp, Homo sapiens
tgctggacttaaatgaccattaatgacccctccaaatgtaaattcctatgattgaatgaattttagctaattgttcctaacttattagtcataaccaaacagttcacagaaggactccagagtaaatacaattacaaatgaaaaacaaatgttctgatgggatccaaatatttgttgataacaagtgagatttcttgagaagcctgcagaatgttgttctcaataggagacataatttttaaatagtagaaattagagaagtaatacatttcagaatgtgtttaaacatattttctttaattcaatccatttattatattcaaaactcgtattcacaagcaaaaataactaagaactgattaagacaactaaaacaagcttttgataggtctttttcgaggaagcccaaaggtctcaagtttgatcgctgtttggaaaatatgagcgcaacactttaagacaaaaatttccatatgttggtcttattagaattcaaaactcattcatctgttccttcattcaagaaatacatagtggggagataaaagaaagacatagtgaaaatccactaagtgtaatatactgtagactttgcaatatgaataattctaaaaggaaaatgagatcatctatcatacatttaaacagtcttttaaaaaattcattttattacaaagtaataatcatccattaaataaaaaacttaaaaaatggcaatagtaaaaagaatacctataattataccatttaataaatatctac

SEQ ID NO: 390197 - DNA, 651 bp, Homo sapiens
agggctgggaggaagagcagagctgctcagagaaagaggcaaagatgttcagggtctaatcccgcttgccttcttggtggccttggaaccttgtgcgactgacttatcctctctacactcaggtttccccatctgcaaatgttgataagaacagaacctattcagtgagaggaagtaattcacaaaatgcagtgtccattgccgagcaaactcctccaacatgggagctacaaccgtgtgtgaacagctcaaagttctgagctgatgccacaaaaacaacactgttacccagacggaaaagcgtgaccaagatgacctggatatttgccttcttccacaaaacaatttgaggtcaattccatagcagcggttgtcaatcgaccctgttatcatgactgtccccataaggaaccctagtgtctccctcatctgtcctccctttggaagaaatactcaagaataagatttcattgaatagggtcgagctttggagggccacagactattgtaatcattaagatttgtttaagtgtcaaggaaccaattttggtcccattaggggtgatgctgcccctgttgggaatggcctagagatgcaagtccaacttgatcaaaactaagcaatggggacacagtatttaggaggtggca

SEQ ID NO: 390198 - DNA, 447 bp, Homo sapiens
tttatttctcagggctagctaggtgcctggaacttcccttcaaggaactcgggattttccttcatttccatgccctgttgcggggctggggggctacagtgccctaagaggaggcccctgccccgtctcaattggaggagcactggaggggactttattgtttaagtgttctgacagccagtagcactgaacaggtgtgcaccaggagagtgaaactgtctgaggaacagtagggcaggcactgtctactcgaaaacatacccaaacccccaaggctcagccttcgctagcagccactcagcagaaatgaaagcacaaatgtgtgtgggtagcaacaggagcatagtttgtgatggggaaaaaaattgaaaacagtctgaaggcagaagaggattgagtgagtgagcccttccatgtcctcaccataaaatgttgaggcgtctttga

SEQ ID NO: 390199 - DNA, 255 bp, Homo sapiens
cacacagttggctcccaggaccaagacaaaaccaacagaagccgtagagtgttcgtgcctttcacagcacctcctacaagcccctgaagcccgtgccatgccactctgttggtggtccacaaacacaggaaacgaagctctagagggcaggggtatgtgctcccctccatcatcccccagggtctggctttagcctggcccagggagccctcgcggcttcctgaacagacctcagtgcccttccccagctgtgtg

SEQ ID NO: 390200 - DNA, 538 bp, Homo sapiens
cccctttctcatggtgatgttgtaaagacaagataaaggacaaatgccagctccagcaccaggcacctcaggaaatggtgactcacttctagaacagagagcagagaaacttcatcgagggatgtcttgcctgaggctttcccttaggtcactatcctcctccactccccgacccacttctatcctacctcctactgcaggggccttggcccagtactgccccccgctggcacttgcggcacacacccctcccggaaagctaacgttttcaaaaaacttttatttcaggttcacaggtacacgtacaggtttgttacataagtaaactcgtgttacgggagtttgttgtacagattatttcatcacccaggtactaagtttagtacccaatactaatttttttctgctcttctctctcctcccagcctccaccctcaagtaggccccagcgtctgttattcccctctgtgcatccacgttttctcatcatttagctccaacttctaactcagaaaacgtggtatctggttttctgttc

SEQ ID NO: 390201 - DNA, 438 bp, Homo sapiens
ggatcacatggctacccctagttaacactggaagcttaaaagcaaaatctgacattttaaacctctgatgtggcaggaggctttgtctgccaggaataagcctgacaaaggtagtggttattggataggtagaaacaggagctgccataggtggactagaagcaaatagataaggacagggtatagttgaccttaatcaaaaggcaaaggtgaagtatacctcctaaaggctaggcaagtctccgagtggctgacttctatctgacctacgttttaaagaatgaagtagaggaatatgatatgggtaagacaaagcattgcagacacagcagactccaaagatgaagggaatttcttagtgaaatgagttccgcagggcacaatggaatggttttgagggaaggaagcagaaggaaaatgagcccaggtgagggcaaa

SEQ ID NO: 390202 - DNA, 406 bp, Homo sapiens
gctggaggccacggggtcctgaagaccccagtggttaaatacgaggccctgcctggtatttaacattctaatccgacctcagcccagtctgagggcagagagtgatctctaagctccaacggctcagaaacatgcaaaggcacctacccctgtgctcccccaggacatggagtggccacgagaggacaggtgcatccccggggaacgtggctccaggcctgtttccattgggaggaaatttctgaggctcctggtcctggcctctctgcagctcctacctcagccccttctccccaggggaggagtgtggggagcagcccttccctcacatctgggctctcccatgggacctgccccccaggagcagggctctgtgctcactcacagggagttctgggagctgcat

SEQ ID NO: 390203 - DNA, 578 bp, Homo sapiens
gcgagcatagaggacccggtgtttatcgatgccacgtggaaaaaggtaggatggttgcagcacttcttaagatccatcatgatattaagcagcgacacctggttcccaccacctcgtgaattcaaggcctcaaaatttcgagtcaggatgtatttgtagtatttcttctgcatggggcttagctccacccgaacgatgagctctgctgggctggcatccactcttcccacagaaagggtagagagagtgctccagggctgtcttaccccactggcggccatgggtccgtggttgctgcaaagctctgtgagtagccaagtagagtgttgccctgctcctggccctgcagggaacgattcagcccctgatgttcaccctcaagagctaggcctgctggccagcctcacacctccctctgtgcacatctgtcttcctgggaggatggtcctgcccttgagcttggggtgaggtccctggggtattctgaacactggttgctattcagatgaagaacttggaatgctggggggttatgagagtggtatggaattattcagcaagtaggtggctgctgcgct

SEQ ID NO: 390204 - DNA, 361 bp, Homo sapiens
aacagacgagggatcagatgggggaaaggtcatgtacactgtttaataatacctataataacaataaagcaatggtaaactacatatgtgattttaatgtcccattatcatgtttctgaagtgaagaaattcagtgagaaaaaaagatgggacatttagaaacagggaatcagcactccctaataacaaaatataagctagcatagcaaactagcaagcctaaaattactaaagaaacatatttgtaaacatcagaagaaaaaaagaaactttaaaatgtccactggcttcaagatgaaatataaactaacacttccaccaaagacagaacgtgtacaccctgagacctgcttgataggag

SEQ ID NO: 390205 - DNA, 350 bp, Homo sapiens
acggatttgaattccagcaattccacttatttactgtgaccttgggcaagttacctctcctagccatatttttctttttttaaagttattgattttttaaaattaatgtattattaggaatgatacagacttttgttgttagtcctaataatttgtcttgcattctcaatgtagataatcatataatttataattgaccaacaaggacagtgatcttcctttataattattgtttctctaaattctttcccttctttccgtaatcgttttttgaacattgcattgaccattacctacattttactgttgattagaagccataaaaggcatccttttcttgtctctgaccc

SEQ ID NO: 390206 - DNA, 334 bp, Homo sapiens
atcggttcaggataatggccagtgactagaaagactaaataaagcatgattagagggttagaactttcagcttcacctcaccctcaacctctgggaaggaaagaggagctagaaatggagttgatcatcgatggccaatgatttgattaattatgtctacacataaaagccaaaaccatggggcttgaagaacttctgggttagtgatggcatccatgtgccagcagggtggcataccctaactccacaggacagaagcttctgtgctcaggccccttctgtacctcaccctatatcttcatctggactaggtataactctgggtaagtaggga

SEQ ID NO: 390207 - DNA, 734 bp, Homo sapiens
tgtgctggtaatgtaacatgcacaaaggatttcaaataatagtgtgaaaaaaagtaaaaattttctcatttgtaattttcataatgattacatgtttaaatactaatactgtgtatagggttaaataaaacatatttaaattaatttcacctggttgtatctaagtgtccatcagccaattaacggataaagaaaatatggtacatacacacaatggagtactattcagccacaaaaaggaatgagatcctgtcatctgcaacaatatggatggaactggaggtcattatattaagtgaaataagccacacacagaaagacaaactttgtatgttctcatttgtgggaggtaaaaatgaagacaattgatctcatggagatagagtggaaagatggttatcagaacctaggaagggtagtgagtggcaggggtgtgggagtggagatggttaatgggtacaaaaaaaaaaagaaacaaacaacaacaaaaaaaaattgtgtggggcggcttcgggccacaaaaaaaggtttctaaacacattccggtggggccggggccccaataggtacggcaccttggcccaagagcggggccaagaaaatcgggcaagaactaggcgtggttccccacaaaaaaaagcgccgggggaaccgggcgcgtttggacaatccaaggggtcggggcatacccggctccccaggggccacgaatgaatagccggcggggcggggca

SEQ ID NO: 390208 - DNA, 423 bp, Homo sapiens
atcacagaatttttgattgtctgtggcctccatgctttcaggctacacccttgtttatactgacaacaaggtggaatggctgcttaaggagggtaaaactaggacaggggcagttcaaactaatagatgttttaacctttccacctgttggatttctggtaatcaccaaatgaggagggggtttttccagtcttgcatgagcttcttgtataagggttttgtttttagggcataagaatctatccatagacgacagtatctgactaatcttaaaatttcctaagttcttgtttagtccctggcagaggaaaggatatgatgcctttaatccgttcaagctcaattagccatttacctttgctaattaaatgacttgttctaatatttgactaaataaatttgaagactccataaaaaaaaaaa

SEQ ID NO: 390209 - DNA, 504 bp, Homo sapiens
ctgcctggcctccctatctccactctgtccacaaatatcatgtctgccatgactatatagctaacattttgatagcacattcatcggttctcatatcgccagaagatggttatcaaatgagaaaactaaagctgtgtaaacaaacgaacctgtttgagtgaacaaatacttattgagacacactatatatcaagctctgtgtaaggcatgaatcatgcatgatctctggaacagagagctcacatcctggcggaaagacacataaacagctgaagttaacaaaatgtgtcaatgacaaaacagagtaatgaaagggctacaagaggaggcaagagaagtgtacccagctcctggaggtgacgtggggctgagtttgaaggatgatgtgtatcagccagacacagaagcagagtgaagggtagtctctggagcaccagaaagagtgctcaagttcaaaggaagacaactgggtctcattcaattcatgttgcctgttccttacat

SEQ ID NO: 390210 - DNA, 428 bp, Homo sapiens
gaacccccatttataaaaccatcacatctcataagacttattcactatcatgagaccagcatgggaatgatccatccccaagatttaattacttcccactgggtccctcccatgacatgtggggactgtaacaattcaaggtgagatttgggtcaggatacagccaaactatatcgctgggttttggccaagggggaaatttcatgtcatttactccatggctgggcacagccaggcaggacactggacacgctgtagcagccacagaggtcacgctcaggtggtccttgaacagcgctcttcccacttgagggcgtccaggtgaaggtggcaccagaggcatctctcaggccggtcagtgtgcacgtgaggttcgcttctgaacctaagagcaggtcctcgagggccgttcggtgcagcgacagtcg

SEQ ID NO: 390211 - DNA, 279 bp, Homo sapiens
ccaccttggcgtcccagagtgctgggattacaggcttgagccactgcgccttaccccttttgttttttttaacagctgtattgagctataattcacataccatacaatccagccatttaaactatacaattaactgtttttcagtatattctcaggattgtgcaaccatcaccgaaatctcttagtagatccttttgtcttctgtaaagaaaccctatacccatcagccctcaatcctcagacccctccactgctctccctgtcacgcctaccctagcc

SEQ ID NO: 390212 - DNA, 253 bp, Homo sapiens
tctaggcttgcccctggccatatgacacctggcagctgtcccaggtccctgagccgtgtgcctcctgtacagggagggtgacaatattatctgatatatcttttaagagcaggttcaggaaacccagagtagtagctgcaaaaacaagataagatggttgatagttttttgtgtaaattaagtccagactttagtatcccgggcaaagtggagcagctccacaggcatcagggtccaggccctgcatgttcct

SEQ ID NO: 390213 - DNA, 539 bp, Homo sapiens
tgtcctcttggggctattcagagatgttcatggtgatgaaacgagctggcctggaatggcagttcccaggtagcagagcctgggcttgaggaaggtggaacgtgggtgtggcaaggagctggcaggtgcaaatgtcaggccagcaatgcagtccagcctgcacggacgtgcgtcacctaggaagttgtgacctggctgcagtttccacttcaggctacagagtgcggtggcgccagcacagagctctgctcaacgtccctctgtgctttcacgatgctgatggattatgaagatgaggaagcggatgcatagcaagtttaaatagcttgcagaaggacacacagtttgcaagtgaaggagctcaaattcaaagactggcagtctgcatccagagttgatcatcttaaataccatgctgaaccggttgctctcaaagtctaaacagtattttttacaataagatatccttttgtaggtcaacgaatagtttctaattctttttaaaataaaatacaatgaactgaatacaaggtgggggg

SEQ ID NO: 390214 - DNA, 329 bp, Homo sapiens
  misc_feature (43)..(43): n is a, c, g, or t
ccttgtgaagaaggtgcttgtttccccttcaccttccaccatngattctacatttcctgaggcctccccacactgtggaactatgaggaagcggatgcatagcaagtttaaatagcttgcagaaggacacacagtttgcaagtgaaggagctcaaattcaaagactggcagtctgcatccagagttgatcatcttaaataccatgctgaaccggttgctctcaaagtctaaacagtattttttacaataagatatccttttgtaggtcaacgaatagtttctaattctttttaaaataaaatacaatgaactgaatacaaggtgggggg

SEQ ID NO: 390215 - DNA, 300 bp, Homo sapiens
cgtactcctctcccatcatactatagaagccgacggaggggctatgggagacaatgaggaagcggatgcatagcaagtttaaatagcttgcagaaggacacacagtttgcaagtgaaggagctcaaattcaaagactggcagtctgcatccagagttgatcatcttaaataccatgctgaaccggttgctctcaaagtctaaacagtattttttacaataagatatccttttgtaggtcaacgaatagtttctaattctttttaaaataaaatacaatgaactgaatacaaggtgggggg

SEQ ID NO: 390216 - DNA, 750 bp, Homo sapiens
tgtcctcttggggctattcagagatgttcatggtgatgaaacgagctggcctggaatggcagttcccaggtagcagagcctgggcttgaggaaggtggaacgtgggtgtggcaaggagctggcaggtgcaaatgtcaggccagcaatgcagtccagcctgcacggacgtgcgtcacctaggaagttgtgacctggctgcagtttccacttcaggtgcgacagaagggtgaactccacctcacctcctggctacagagtgcggtggcgccagcacagagctctgctcaacgtccctctgtgctttcacgatgctgatggattatgaagtccacagacagcaagggcagtatcactgcagtggcagtcgcagatggactttcagtcgcctctaggagctccaccccacagaaacacagacagcagccagtggaaatgttcagctgagtgtgaggtgcctgcactgtgggcccaagccaggagccctgcctggtgaagagtagcagatgaggaagcggatgcatagcaagtttaaatagcttgcagaaggacacacagtttgcaagtgaaggagctcaaattcaaagactggcagtctgcatccagagttgatcatcttaaataccatgctgaaccggttgctctcaaagtctaaacagtattttttacaataagatatccttttgtaggtcaacgaatagtttctaattctttttaaaataaaatacaatgaactgaatacaaggtgggggg

SEQ ID NO: 390217 - DNA, 336 bp, Homo sapiens
gggagcccctcaggaccccatttagccacctgggaattgggtagtggcgtgcactgtgcagaggagggtgaaggttggaggagatgacgggcgggcctgcaatgcgctgcgtagggagcctgggcggtgccccacacactcgcccgctagctgcagggcttcaggaaagaggagcacatcgggacttggattcttcccacaggagggcgggttacatccccgtcagagggttgccgcgagggcagataaaatcagacatgaggattcttgccctctggtgggaacccagaaggaggtcagggagggaaggtctcccttcctcttgttgcgggtggt

SEQ ID NO: 390218 - DNA, 1362 bp, Homo sapiens
gagcgaggaccagatggaatttttgtttaatactgtatctgaaattgaggatgggatagataggaaatgacctatcatttcatgaggagatgacttttctgtgataatgggacagagatgagcttagatgaatgaatatatattttagcacttacctttttccataaaacacaaatagacttggtgcaaaattaccagtctcactccatggtatttctgatgagatcggtaaataatagagagagacatacttctttaggagctagctgactttaacatatgctggagtacaattgacttacaactatttggcgttagaaatgatttttctagggcttggtgggggaaaaatactcgtgaaatacctgccttgacttaaacttcaacatattttaaagtcattttattatcccacaactcagaatgtcttcaattaaaggtaagaaaataaggtgatgggctacagtggcttaatcaggtgttcagttaatgaagtagaagaaggatacagattctaataattcacagttgtagaggttctagactgttcttagtatgaagtcctggcagtgtatgtggcagagtgaataatgtttcacgacctggtgagtcatgtgaggactgtgagtaacttttatcttctgtgtgtcccacatagcatataacagtactatgctagtgatttgcttgacagttattgaatgaatgctaagtttcaaatatttatttgatagtcacttgattaccaagtaatcaaataattacttatagtgttttagggagttttcagaagatatttgtgattaaataaatgattatatatgtatattagcatactgtatgcatttgtcagttgggaaagaggggaatatggagaagtggggaactgcattcagtttttattttataggcaactaatatggtcctttggttttattttaaaatgaaactgagccttgagcattttgagctttcatgtcaaatgccttgaatggaagagtaggaatttcatgtaagtagcttacatctgccctgtatgttggagaatgtgattagatatacttgcttttctgcccaaggcactatttttgtatttatattgctttttgcaggtttacttctgttaacaggggtccgggagaaattaaggcttaaaatatcaatacttctcatttttccacagccttccaaggcttccatctttgtgccagtgtgtggctctgggtgccatctaaccgcaaaagcagcagttgggtttggatgagctgtgtgacatttggcctacacgtaggtctactcaccaccctggtcagggaacctggaacaatcctaaaactcacctactctaatgcaggccatatt

SEQ ID NO: 390219 - DNA, 286 bp, Homo sapiens
aaacatcaggagaggagttatctttggggaagggggaagtgcataaggacttctcttctgactcatgggccagccctacaagagtaaatccctctactctccttacctggaatcctgttacctgaggaaaatgtatacctcgactccttttcagtattaccagggaacagacaaatttaactgagcatgtaagtcctgggcagaaactcggagtgtctatgaaagtcccttcactctggtgattagatcctgactgtctgtgtcacttaaaacaagaagttgtcca

SEQ ID NO: 390220 - DNA, 484 bp, Homo sapiens
tagttcctccagtgactatttttgttgcccttgggaaaataataaacttcagtttcctccaccaagtacagatgaggaaaatgattcatgaggaactagcccaagatcccacagccattaagagatacagctgatgtttcagtcaagacctgctacttagtcctcatctattaaatggagaccgtgacttccacgttcccttaataagcacaagtcttcttttccttatatccattcagctaagcaaaaggggggatgacaccaatttaacaagatctttgtgtgaattcagttgaaaattatgtttgaaagttctccgtaaattatgttacataattatattaatcatgtacacacacagacttagccactcttccatcactccatcctcctcattgcagccaatatatcttttcctagacagcatgatatttcatttaagacttgtcttaaatgaaagttctttcagagagagaaaaaaact

SEQ ID NO: 390221 - DNA, 274 bp, Homo sapiens
cttttggagggtggaaggtctagaggatcaggaaaaataactaatgggtactaggcttaatacctgggtgatgaaataatctgtgcaacaaacccttgtgacacaagtttatctatgtaacaaccctgtacttgtagccctgaacctaaaagttttttttaaaaaaaaaagaaagaaagaaaatacagataagtctgagcccaaagtatttacccaacaatggtaaagtattttaataaattactttattactggtttcttgggtatccttcta

SEQ ID NO: 390222 - DNA, 414 bp, Homo sapiens
agatgctgtcttaaccttaaaattttaaaatattccagatacttagcttaataccaaattgatttgtaattgctaataaaatgtagatttagaggaccattaagaatgtgtcatgctcgctttggcagctcacctactaaaattggaaccatacggagattagcatggcccctgtgcaaggatgacataagaagcattccatttaaaaattaaaaaagtaaagaatgtatcggagtgttagtttcttcagacctctttttattctccaatccctttttaagtattttataatatcttaatggtaactatagatgaatattagtaattaccaggcaatgttttgggtataaatgaatgaaattatgaggtaattgtatttttgtaacctgttagttaaatgagcccaaactaata

SEQ ID NO: 390223 - DNA, 501 bp, Homo sapiens
tagagtagtactcactgtgattaagggtacattgtttcagtaactgatcccttgaggcagtgaattgcccagtcagtgcaggagttttaagggtccaggtctaaaggtggaattgcatcttttggctctgtttgaagctccttcttgtgtgcctgcacaggagtgcagtgggtacatacctgtgagcacatgtaccctatttcttggaatgacattcttgcttttaattttgggctgactagaaatttttgtctgtgatgccagtggtgggtagataggtaaggatgggcacagtttagccaacatggtgaaactctgtctctactacaaataccaaaatcagctgggcatgttggcaggcacctgtaatccctgctactcaggaggctgaagcaggagaatcgcatgaacctgggaggcagaggttatagtgagccgagatggcactgctgcactccagcctgggcaacagagtgagattccatctcaaaaaaataaaaa

SEQ ID NO: 390224 - DNA, 287 bp, Homo sapiens
ggcacaatgcgcctttccagaacacagcagcgcacagccaggcctggggcagagggatcactcaaacagcaccagaggctgcattcctacttttcttccgtcaacaagtccattttcattgttagtttctccttcaacacaaacttaaaaacaaatggctgaacacgcaggaacaaggaaaacctgactgaagaatgagacgttaaaacttaagggccttaggtcctggcacggtggctcacgcctggaatcccagcattttgggaggcagaggtgggtcatttgag

SEQ ID NO: 390225 - DNA, 265 bp, Homo sapiens
gttttttgacaaaaataacaaagcttcagttggcactgccattccttgtctgccaaggttaacacagagcccaaggagaaaactgaccagctcaaactgattcacccacagcagacctcaaatgaaacttcaaatttcaggaacttgtcctctgccaaggtggaagtctcctccaaaaggaatcctctttcctaacaattacttgtgactcaacagaagtgggattgttttaagggtgcagtggctcacacctgtaattccagca

SEQ ID NO: 390226 - DNA, 342 bp, Homo sapiens
taccccttggttcagctggtcatggcaagtgagtcctccctatcacccacttccgcggtggtgggacgcctggggggcatggatggggcctgcgtcctaggagaccttggctccagctgctcgaggccactttgtctcttctgcatgtcgcagaagcgtctgtacctcctggggttggctttcctgtgagcatttgggctccctctgcctgggtggcctgttgtctggagggagtcttcagtccctcttagtgcagcagccaagggtgtctcttctcactccctgagccttctgattcctgtatcaggggaagttaaaaagtgttgtaaatggacttggacc

SEQ ID NO: 390227 - DNA, 369 bp, Homo sapiens
tgagccactgcacccggccaataagggtgattttaaaagacaagagcataatgtatttgaaaagaatgtgtttggagacatataaacctggctttgaactctgaacctatcacttatcagctgtgtggtttagcttcaggtatctctcttagacttctgcttccttgagacagaggttgtggctgagtaatctgtgagggagataatattattaccctagttttatagatgagcaaactgaggcttagcaaagttaagttggtaatagagaactcaatttgaactcatggagatttatcccctggccttttctcttaaccattgaactgtgctatctctaagaagtcatagaacaagcaactagagtca

SEQ ID NO: 390228 - DNA, 770 bp, Homo sapiens
acattttctaattggttgttactgatgccatggatgtttgtatattaatcttgtctccagcgtccctgccaaaccctcttatttcttgtaattgttcatagtttctcatggattatctatgtagacaatcttatcatttgcaaataatgccacatattcccccttcatttctaattctgattttcttactcctttttcttgctttattacatcagcaaggtatctcatacaataatgaatagagtggtgagagagaagacatatttatctagttgctgattttaaaggaaatgttcctaaagtttcttgtaggttcttaggagaaacttccttctgtttctgttggctaggtattttattttatttttaaattgtgaatgggggttaaatttgttaaatgatttttctgcatctattgagatgattatatggtttttccttcctaatttgccaatgtggggaattacattaagattttctaatgttgactcttacttgagcttctgggataaaacctactgggtcatctcacacacattccgtatatttattgtgtgataaacatgatattttgatagatataatctcaaatatgtatattaaagaaatactatatatttgtgcacacactatactgctggaatttttgctaattttttttttcagattttttgcattgatactttaactgagattgaccaatacttgcctttttttgtattgtcttagtgtttttctacaatgtaggtttagactgaactcataaaaat

SEQ ID NO: 390229 - DNA, 329 bp, Homo sapiens
gtagctaagccagcaggaggcggtgctgggattaaaacccaggaccatcagctggggccagtctgagctcttcaagctcagagctgaactatctcgttcactcagccttcccggggctcccccacccccatggaattcctcagaagccccaaacacaccaacgacctccaggaggtgtaaacccagagtcactggccaccatcctgagagtcacgatgtggctatgcagggggcagggacaaggcaagccaggatgccacgctggccgacttccctgtcaaggcccgagtccccgtcccagccacgctccgggcgtccagtgcagatgc

SEQ ID NO: 390230 - DNA, 159 bp, Homo sapiens
tatttatttcatcagttggcaaacataactatacatccctcagtgcatttgctgtggccctccctgacagctcttaggataacctttcctccattcttcatcttgattgttttgtgatcttcactccgtgttttctgcttttcctctaatctgtgtcca

SEQ ID NO: 390231 - DNA, 270 bp, Homo sapiens
agacctaacatgttctaaacggtaaaccagaagacaatagttaatttagttacacgaccataataaccacaattctgaaagttagtttcccaatgatcactcacataagtaactatatcctctagatcaaaagcattaaggacctgctcataaggcattcttaacctttaggaatttcacttcattctatatagaagttattcctccacaatgtacagaaaggaggcaacagcaacatttttttttctgacagaaaaactattgtgtgga

SEQ ID NO: 390232 - DNA, 669 bp, Homo sapiens
ctgcagctgggcctggaggcagtggctctacagcagcagtgagagccgagctgtggcagacacatgctcttcccctgactcacggctgcccagttccctccagcgaggctgctgacctatttttctattaggaacaaccagccaatgtgataatgaggaaaatgtattctggcccctatgaagtttagtgaagcccgaatgaagtggaggaggccacggagatgcacgaggaagagcattccaggcagagggaacagcgaggacaaaagcccccgggcaggaatgggtgtgcaagcctgagatccaacatggcggagagcaagccggaagtgctgcgcggggatcctaagggagcactgaacaggacaagctcagttttgtccctcaaacctccacaatcagctattttacataaggaaagtgggtggtgattaacctcagagtctccagggacagactatccaggactgtgcctgaaatagaagaggaattaacatcatacagaactgaatacggtgactgaggggagtttgtgtctccccttttaggaaagaagatgagaataagtatgaaggagagtcatgtactgtacattaagcaaaagcatgatgctgttatttgaaatgttaattagaggtgcccactaaaaactgctcagcaattttcttg

SEQ ID NO: 390233 - DNA, 757 bp, Homo sapiens
ctgcagctgggcctggaggcagtggctctacagcagcagtgagagccgagctgtggcagacacatgctcttcccctgactcacggctgcccagttccctccagcgaggctgctgacctatttttctattaggaacaaccagccaatgtgataatgaggaaaatgtattctggcccctatgaagtttagtgaagcccgaatgaagtggaggaggccacggagatgcacgaggaagagcattccaggcagagggaacagcgaggacaaaagcccccgggcaggaatgggtgtgcaagcctgagatccaacatggcggagagcaagccggaagtgctgcgcggggatcctaagggagcactgaacaggacaagctcagttttgtccctcaaacctccacaatcagctattttacataaggaaagtgggtggtgattaacctcagagtctccagggacagactatccaggactgtgcctgaaatagaagaggaattaacatcatacagaactgaatacggtgactgaggggagtttgtgtctccccttttaggaaagaagatgagaataagtatgaaggagagtcatgtactgtacattaagcaaaagcatgatgctgttatttgaaatgttaattagaggtgcccactaaaaactgctcagcaattttcttggagacctcagtgctcatgttattctttcctctatcttatgttttcctctctcctgcccttttcagaaacagtctacagcagaagccat

SEQ ID NO: 390234 - DNA, 1124 bp, Homo sapiens
atgctgggtaacaaattaccacaggtttactggtttataacagcataattttattatctcacaatttcttggggttaagagtttcagcatggcttaactgggtctcacaaggctgcagtgaagtcagctgaactgcattgtcatctggagctcacagttctcttctaaattaatcagattgttgataaaacttagttccttgaagctgtagaactgaggtcctcagctacttagggctgctcttttatataagcagtgtaacgtgacatgcctttttaaggtcagcagaacttctgactagaatctgtttcagagaaggccagaaagagttcacttggttaggtcagagtcacctgggatagtctcccttttgattaagtcagagtcaactaaataggcaccttaattgcatctgcaaaatcctttcacttttgccatattctcttactaaatgtaacaggcgttgtccacacaaaggtatggatatggggcttggaaaggatttcaggaaccatcttagaattctgcctactactaactccattctacaagtctcaatatctagcattttagttattcactaactgcaaagttttttatttcattatcattactactttgatccatagatactatttggaactataatttccaaacatgaatatttaagttttcctttattgttgatttttaacataattgaattgtgatcagatgatatattctctatatgatttaaattctttgaaatgtgttaacagttgctttatgacataataagtggctggtttttataaattttaggatgcttgaaaagagttctacagttatttatgttcattaatcattttagtcatgttcattaattttcaagtcttcagtatccttagtgatgatttttttgtttttggtatatatctcttgattactaagagaattgtgttaaaatgtagctagcatgattttagatgtgtttgtgtgattctttcaatttctctctttttctattttgtattgggatacaaatgtataattgttatattttccaggttaattgaaagaagctttatcattacaaaattatctttatttccactaataaattttgccttaaaattaaaaaa

SEQ ID NO: 390235 - DNA, 513 bp, Homo sapiens
cactcagaaacaaagtgaaatccatgtctagttctcacttataagtgggagctagacaatggatacagatagacgtaaagatggaaatgggggaagggtgagggtgggaggagagtgagggatgaaaaattacctattctgtacagtgacattattagggtggtgggtacactaaaagccgagacttcaccactatacaatatgcccatctaacaaaactgcacttgtacccactaaatctataaaaagaaaataaggtggaaaacagaatggatgatctaaggtaccttcagtcatattgctggttttatccattgggccacatgtgtctaaggctagtctgggtttatgtggtggcagaggagtttccagcaacaagagaacaaatcccattgtgcagacagacgcctttcaagtctctgcttgtgtctcatttgctactaccattagtcaaggcaagtctcatgggcagcccagagtttatgtaggggaggataacacgtcgcgagaatt

SEQ ID NO: 390236 - DNA, 442 bp, Homo sapiens
gcctgtaatcccagctacttgggaggctgaggcagaagaattgcttgaacctaggaggcggaggttgcggtggggccgagatcacactactgcactccagcctggacaacaagagcgaaacttcgtctcaaaaaacaaaacaaaacaaaacaatgttcaacctcactcacagaagacctaccatttaaaaccatactaaaatactatttcttagatatcagattggaaaaagtcccaaagcttgacaatacactctcttagctaggctttggggatgaaggcaacctctgtattaccagcgatgggactgtaaactagaatgatgtctacggaagaaaatgtggaaatatctaccaatatagatctctattactctatattaatacaggccaggtgtggtggctcatgcctataatcccaacactctggaaggccaaggagg

SEQ ID NO: 390237 - DNA, 474 bp, Homo sapiens
tggtcaagactgggaaacaatggttaaactcgtttactcttcatgaacgagtctcctgtgatgtccaaatctaacaggctcctgataccaactcagggaaatcagaaagcaagcttgggaaacaagggataccatgtgacccagatcagcttagttcaggggtttcacgtagcaagtatgtgtgatgaagtacagcaaggacttgatcaaacaatttatcaaaatccatggagctaggccaggcacagtgctcatgcctgtaatctcagcactttgggaggccaaggcaggaggatccctcaagcccaggagttcaagaccagccagcataacacagcaagaccccatctctacaaaataaataaataaataaaattagctaggtgtggtggcatccacctattccagctactagggaggctgaggtggaaggatcacttgagcccaggaggttgagatagcaatgagccgtga

SEQ ID NO: 390238 - DNA, 220 bp, Homo sapiens
tacagcacccagaggaaagactgcccctacagataagggtggataaggaagggttcctgtgaagtaagagtgttgaccgggaccttgctggagcagtgctggaaggacatccaggaggtccacagggtccctgagatcccttgggagaagacatgcaaaatcaaatgccctcagttattctgctatttttcaaatagtaaatgctacctggtgggcacct

SEQ ID NO: 390239 - DNA, 280 bp, Homo sapiens
aattgcttatatttagctatgaaaccaccttcagcaactgcatttttttccctgatccaagtaatataaaattatcttgtttaaatttttaaatttagtttgtataatgattacttacaaactgatagcagcccaaaaatgtgtggaagagcagagaactataatgatataaccatccagaaagtagacaatacagatttaatggcaattttcatactctttaggcagattcttttagtttctcgggaatgaaatataagttacttgctcatgctactgg

SEQ ID NO: 390240 - DNA, 540 bp, Homo sapiens
tgagatggagttccactcttgttgcccaggctggagtgcaatggcatgatcttagttcactgcaacctctgccttttgggttcaagcgattctcctgcccctgcctctcgagtagctgggattataggtgcctaccaccatgcccggttaatttttgtaattttagtagagacagggtttcaccatgttgtccaggctggtcttgaactcctgacctcaggtgatctgcccacctcagcctcgcaaactgctgggattacaggcgtaagccaccacacctggcctcaatttcttttctgtacaaggtgggtgttgggctagttaagatcccctctagctttaatgttttctattctatgcactgaaatttaaccaactaaaggcagcaaactacatggacatgagatgatccctagttttcctacttggtcacctggcacgctctagtaggattagcctccccatgaaggagatatgagctgtatctccaagactggacagcaaaatgtcaagaactgaaccaagtcacgggcaacagtt

SEQ ID NO: 390241 - DNA, 385 bp, Homo sapiens
cgctctagaggattaccgcttctcacccaccccatctacccaggcaagcacctgcccgtcgggccctcaccctggagccaacaatgccatcccttcctactactgacgccaggccgcctgccttgtaggaagtagaacaaagtgttgagcacttggggctccaggtgctgctgactcgaggtaagagcacagctatcatcagaccaagtactagaaaagagcctcgtagggtgcagtggcttactcctgtaatcccagcactttgggaggcagaggcgggaggattacttgagctaaggagtacgagatcagcttgggcaatatagtgagaccctgtctctaccaaaaaatcacaaattaaccggggtgggtggagagcgggtgt

SEQ ID NO: 390242 - DNA, 501 bp, Homo sapiens
tacaagagaaaggcagagggacatttgagacagagaggaggaggccacatgcagatggaggcagaggctggagttatgctgccacaagccaccgaatgcctagcgactccagaaactgggacggtcaaggactgattctctctagagcctttggaggaagcgtgaccctgccgacaccttaatttctaacttctggccttgagaaccaggagagaatacacttctgctgttttaagtttgtggtagtttgtcgtggcaaatttaggatgcagatacaggtactaagagcaaaaagccaactgctgtcagggactggcgggtatagcacctgggtcaaacacctggatgggccccgctggaagggcagctgtcctccactccagtccacagcggacaggcagaatgtgggcccagagacaccagatcttctgatttctcatgagaaattgaacatctgagcttttaaataaaatctcctgatctttaaactttcacaactaa

SEQ ID NO: 390243 - DNA, 509 bp, Homo sapiens
atcccttcgattcctattgagaaaggggggggagggggggggggacttaaacaaacaaaacacctgtgtcatctaccctagaagtctgaatgtaggcagaccactaactggagaatgacgaccatcaactttcacctgtacatgtcacacagagcaaggccacagaggttctcacgggacaacccacgaagggaaatgctgaatgtcaactcagcttagctaatgaggaactgacctttggggaaggatccggcgctgccagtgattatgactggcttaacacttccctctgccacgtggcttgcaaggttcccccatggctggtgtcttcctcaggggctgtggcagccaaacgtgtttaatgaacccagcaaagtgataaactatgtttgtgttaatacctttgattccaccccctcactggagtgttggtatgctaagcatccttttgatgtactacaagtccttaataagaacaatcaaataaacaactggcctcgttggcctca

SEQ ID NO: 390244 - DNA, 616 bp, Homo sapiens
gctataggaactgggctctgggcaaagcatgctcgctgtgacccctcttgcaagcattttcctgtttaagctgtggaagcccatgtgaagtaaacactgaggtcttttaaggccgaacgcccttgccacgccatcggcatcgaaggatgatatgaaaacaaacaaaacacctgtgtcatctaccctagaagtctgaatgtaggcagaccactaactggagaatgacgaccatcaactttcacctgtacatgtcacacagagcaaggccacagaggttctcacgggacaacccacgaagggaaatgctgaatgtcaactcagcttagctaatgaggaactgacctttggggaaggatccggcgctgccagtgattatgactggcttaacacttccctctgccacgtggcttgcaaggttcccccatggctggtgtcttcctcaggggctgtggcagccaaacgtgtttaatgaacccagcaaagtgataaactatgtttgtgttaatacctttgattccaccccctcactggagtgttggtatgctaagcatccttttgatgtactacaagtccttaataagaacaatcaaataaacaactggcctcgttggcctca

SEQ ID NO: 390245 - DNA, 516 bp, Homo sapiens
atttgattttctgagagatttacagctgacgacgtagttgagggaggaggtaactaaacaaacaaaacacctgtgtcatctaccctagaagtctgaatgtaggcagaccactaactggagaatgacgaccatcaactttcacctgtacatgtcacacagagcaaggccacagaggttctcacgggacaacccacgaagggaaatgctgaatgtcaactcagcttagctaatgaggaactgacctttggggaaggatccggcgctgccagtgattatgactggcttaacacttccctctgccacgtggcttgcaaggttcccccatggctggtgtcttcctcaggggctgtggcagccaaacgtgtttaatgaacccagcaaagtgataaactatgtttgtgttaatacctttgattccaccccctcactggagtgttggtatgctaagcatccttttgatgtactacaagtccttaataagaacaatcaaataaacaactggcctcgttggcctca

SEQ ID NO: 390246 - DNA, 451 bp, Homo sapiens
cagtagagccacaggagaagacactgggttaggcacgtggactcattgtctggagtctacttgccatcagagtttattacctccttcagcagttactttggaaaggtttacaatctcccaatatcaacatgagttttattagaatcctttaaatatttaatcccttattaaatctttaaatatcccagctgcccccaaaaagcagatgctgttctgcccaggtcattgactgtgtgagcctccatatttatttgaaactctccatcttcgagtcaatggaaaggaaagagtattagctctgaattttcatatcgcattcaatcttttaagtcttatatgctctcaggacttaaatctcaacaaatggactttcaatagaaatccttgtagtcactattaaaaaaccagtttgtgagtttttatttccactcaaagcatgacaaaaaggtac

SEQ ID NO: 390247 - DNA, 308 bp, Homo sapiens
atttaaggagccagatagacgctactccagggcaggcacttacctataccctttctcttcctccatctggttcccatggaggcagctgccgcatttggagccttggcccaggctagccccgggagcctcacacagctggggagaggccaaggatctcgcagtcactagccaggctcaggatcaggggcctttccttggctgggcactggggctgggtttggaggagacattgatggttcaagcttccttgggtggggaggacagtaagcacagagtgaagtgctggtgggggcccccctttgccaggc

SEQ ID NO: 390248 - DNA, 324 bp, Homo sapiens
acagcattaaacataatgaagttgttcaaattataatcatgaatatttttacatgttcttttctaaactaggtaaaaattcagtgcattttaagatgacataaatatatgaaaaaagggtctgtggtttctaagttttgctaaccatccttagcagttattctcagtatttctaagataagcatggctagaagtggggttagagccccacatcaaggagttaaactgtgcccatgtggctaatggtattctaggatcaaatttaaagggataagaaaggcttatcatactacttttaattttcatgcttagttctttatatttg

SEQ ID NO: 390249 - DNA, 282 bp, Homo sapiens
  misc_feature (66)..(66): n is a, c, g, or t
ggtcacccatatcatggaaggtaatttgctttattcacagtctactggctaagtgataatgtcatnctgaaagagtcacagagacatctagacatctaggtgtcagatcaaatatgtgggtaccgtgacctagccaagttggcaataaaattaaccatcacactgatccgaaaagtttgggtgccactgactttaacgttctcctgcatataggcaagaattaaaacacacacacaacaaaagtttatttttactctgaaccacttgagggcaccatgaacg

SEQ ID NO: 390250 - DNA, 313 bp, Homo sapiens
tcagcagggagagctttccttctgaaaagtgcccttgaaattggaacttgtaactttgcttgatgggttgtgaattcctaggacatgagctccactcatatacgttgaaaactatcattgaatacatccagttcattctgttgccctgttcagggaggaaaactatgttcaggaaagttaaatcggctgtttcattaaatttcctctgaactgtctgaggtagaggggttggtctttctattttattgctgggaaaacaggctcggaaaagtgaagtaacttgcccagttctcacagccagcaggtgaaaggg

SEQ ID NO: 390251 - DNA, 506 bp, Homo sapiens
aattaatataaatctcaagagccacacatggctaggagctctggtacagacagcgcagctccagtaccagggagcaccgctctcctgagaaagctacatgtcttggctctccagtcgaatttatgttcactttggggttatgcccttggtttccttcaagggaaatcttaagaaaaccagacagtggctgtcacgggaatgtagatggggattgtctactctatccttttttattgtttaatctcaaatcctgtgtggaaatttcttttacagcttcttttaaagaattaacatattttcttatcattagcaacagaattatccaaataaccacatttccctttcacaatggctgccaggaagcccacaggaaattcataaatcaatgagtgcaactgtgtagaatctcatgacacatatatatgctttccgctttttccttttaaacccttagtttacattttcattgaccctgatgtattttttttaacctctcttttatcatt

SEQ ID NO: 390252 - DNA, 437 bp, Homo sapiens
cacagagatattttagagaaataatgttacagcctacattagttagataataacctcatttctgaatttcactttgaatgtgtagacgaggcacaagtcaaccagaggttatgcaattagcttggagtcaaagagaaagcaaggagtagagctgagaaggaaaccccagtgtgaacttgatttttattcaatcaaactgttaaggtaccaaccacgcactttcatctataatcacaatgaaccttttaataaacatgtttctatcctcttagcttaaaaaatataacagtagctttttggattttaaaacagattgacttctatacttctgggctaaaggcagctcaagagtcaataagaatcacaagctttccacagtgagaagaaagtgcaattgcccagtcctctctatctatgaagtgcagacagtattcctc

SEQ ID NO: 390253 - DNA, 798 bp, Homo sapiens
atgatggtggctaggttagagaagtagcagcagggatggccagagtggatagattcaagaggtagttaaggaggtagaatccacaggtctgtgggactgatgtgctgtggggactgcaagggagctcagatcatgtctaggtttctttctattggggcacctgagttgatgatgatgcatttactaaaataggagtagttggagcagacaaatttagttttcaactggaaagtttaaggcacctgaggacatcaatggagctgttcagtggttatttgaatgtgtggatctggagcctgaaggacaggccaagttgagattctaggtttggggatcatgagccatggaagtggatgaaccactgttaccgtctctgtggtattaagagccaaagggcaagttcttagccatgagaaacaccaacattaggggatgagtagtagaagaggggcctgcagggcagactgatgaatggccaaagagagagatggaaaaagagggatgtggggcagggatgtggggcaggcagagctggcacatgcctgtcctcacagctacttaggaggctgaggtgagaggatcacttgaagccaggagttcaagaccagcctgggcaacatagtgagacccccatctcaaaaaaaaaaaaaattaggcatgatggcatatgcctgtgatcccacctactcaggaggctgaggctggagcatcccttgaacccaggagtttaagtctccagtaagctgtgactgtgccactgtactccagcctgggcaaaagagccagaccctatctctt

SEQ ID NO: 390254 - DNA, 626 bp, Homo sapiens
ttcaaggagaccaagtggggtaacatgagcatgaagtgattaacctgcttgaattatttgtcaactgagattccatgtgttttgctcatctcaccagcatacagaaattagcctactagagattggcctttggccagatgtacaggacattgttgtctgcagtagatgcagaaaatataaaaatgctgtcagctctttccctaccttcaagtcaagaagcttttccaggacagggtcatgtcttcctcatctttgcttcccagctgcttggcatatcatctgtcgcagagcaacttctcagtatacgttgaaaaatacttctgaagtgttctgctccaatcagaattttgccttaccttaaggatctgaatagcatcacatcagcatttgtattcctggacctgaaagagaagaagatgtaaagttcctcagatcctacctgttcagacacagccatccttcagtgtcatctctgtaccgaagacctctccagctgcatcaacctttccatatcctaaatgccttaatcttaatgcaactttggaccacgtaaggcattctctgatttagtggttctaacgcaaggtcaatgacacagtggctgtgaaataagttgtgagaagaaa

SEQ ID NO: 390255 - DNA, 365 bp, Homo sapiens
tagctatatacagtaaaagttcaaaaaatattagacaataataatggtaatggtagtatcttgttaacttaactccacctttctagtgtcttgcaacattgttaatctctattcagatttccaggcttgagataaccacctgtagtggttcatggagatacagttatggctttttatcatgctttccctcccttcttctagcaggggaatctctattacctttgggaaatacattccttcacctcactgcagtataggagtgggcagatctaccaaaactacatgaaacaggttatatacaggttatactgtttctttcttcctttggtaccttaagctagaaggactaataaaatctgaagctg

SEQ ID NO: 390256 - DNA, 693 bp, Homo sapiens
gctggagtgcagtggctcgatctcggttcactgcagccttgcctcccaggttcaactgattctcctgcctcagcctctggagcagctgggaccacaagcgcacatcaccacgtccagctaatctctcatattctttaaaaaaatttttttctaagacaagccaacaaaacttctatagctatcatacatccacaaaaagatgtttattgtggcatgcttagtaaacccatgcaaataagagagaaaaatataactgtcacatccacacatggtatgctgttaacattttgctgctttgtctttctgtacatttaatgcctttttaacaaaatattattatacttaaagtatgtactattttgtaatatccttccttagttaatgatatatcttcaacatcttttcatatttttaaatagtgctgtagaagcttagttttaataataaaatcaatttcaggctgggcgtagtggctcatgcctgtaatcccagcacttttggagatcgaggtgggagaattgcttgaacccaggggttcataagttatttatgtatttatgtttataaagacagcgagaccctgtctttataaacataaatacataaataaacaacaaaaactacatttcattaaatagtactctaatgtactctaatgcattaagtcagttcaagttgtttgcaacttttttg

SEQ ID NO: 390257 - DNA, 227 bp, Homo sapiens
tgtggagaattcttctggatcttattcagggccaccaaggtggtaccagtacgagttaggaagaaccacagtgatcctgggcttgcagtgccccttaatgcagatatggattaggtcacggcatccaaatctttctgaatacctataaagccttcccaaggaggatgggtacaaaaaagcccctatagcaaagactataataaatacttaacccttccatgtccaga

SEQ ID NO: 390258 - DNA, 385 bp, Homo sapiens
gtttggcagcagacagggatttgtacccagatcgcctgacttcggagagtatcagctcttaaccacagcacttcggtctatgccttgatttcaccatatgtaacaagcagctgtgccactttgcattcccaccagcagcacgcaagcgttcgaatttctccgcacgctccccaacaggacaggagcttgccgtgttgccccaggctggtctcaaactcctagcctcaagcaaacttcctgtctcggcctttcaaaaccctgagattacaagcataagaaaagaaaatcttgtaagatgaaagctgaaggatgagagcaattaattgatgaagtatgatgatccaggtgtccctgggtgaagaaacaacctcttacaaaggccctg

SEQ ID NO: 390259 - DNA, 562 bp, Homo sapiens
ggcatttgacaggaagaatccaaaggccctgaatacagctgaggaaggagggtgttggaaatcaaattcaagtgaggattaaaacctgaattcacattttgtgcagtggattctacttctagaaatgtatcctaaggatatagtctcagaaaatacatgtgcgagaaagtttattttggcattgtttgcaatgagcataaaggtgggaacaacctaaatatttgttagcagatgagctatattacagtgctcccacacaactgaatcccgaactgccttggcaaagcaactgcaaatgtgctatatataaaggagtccatgatgtagtgtttaatgcagaagaaatttatagaaggggttgtgtaatattacctcatttttattttaaaaagtatccacacatcaaacactatatttctttgtacttaaaaatatttttaaaataaaacataatggtgatgaatgggtggatgagtggaaagtccattgaaagggatatatatgtatatgtgtgtgtgtgtgtgtgtgtgtgtgtgtgtgtgtgtgtctcacatggggaaga

SEQ ID NO: 390260 - DNA, 337 bp, Homo sapiens
cttctggttctcagcctctgttctggtggagagcatgggccaaggagtgaggcgggcctgggttcaagtccagatgatcttttctgttaaatgaggacaatgggatctttatgaagagcagagaatgtatgaaaagcatctactcagtcaaggaactaatatttactgagagcctagatgctctaataaatgccaggcattggataaacgttattcttctcagtctcttgctgtccactgggtccctccactctgcctcatgcaaggatggatctccagggtcttgcaatagcttttgctcccctgcttccctctctataactcagctccccttctt

SEQ ID NO: 390261 - DNA, 405 bp, Homo sapiens
gccaaggccatgtccagggaaatgaagcaagatgatcaacaataatgttgtggctggtatacgtgcctactactgctaccaccacgctaatcagatctcagccacttacagcttcatcccaccacgcagtgccttctactcatgttccacatcgtgctttccataaactaggcttgacactgcctcctcaccaggtggcactcaagctcagaagcagaaggggacccaggtggggacactttaataagagcagtccgtgatcacaatgaattggatggaacaaacacacttcgaaatggctctctcccacgtgtaaccacactcaagaattttttctctcttatgcagttatgaagtgctatggactggcaaagaaaggcagtgggttctggtcagctcttacag

SEQ ID NO: 390262 - DNA, 574 bp, Homo sapiens
gagccagatcagtgaaggccaccaagtaggagtgatgagtgagataggacaagattcagaggaggaaaatgttgcagaggtttaggacaaagtgtttcaaggaaggttgcccagtgacatcaaagccagtagaggagtcagaagaatgaggcctcaagcctgccaggtgcaaacctgggtgtggcatttctcctgaaggctccctctcctgcgatacttcccccgcccccgcccccgccccccatttggtggatggtgccatccttctagcctgtaggctaggggacacatgtaggtcatctcagaaccctcttactcctgcagcccctctgaactcttcccactggcctttctcacctgccttcctcttttcctgtggctgttccttgccacacactctgttcccactctcccaattccttcttcctcactagcatcttcctattctgagaatgatgggctactaaaccactaagacctgactcaggaggtttcctctgcctgaaggccatctccctctgctcccagagaatggctgctcacgtctctgagcctagctccaatgctacctact

SEQ ID NO: 390263 - DNA, 852 bp, Homo sapiens
tgggatgaatcccacactatggctatggtctgcatgtactgacatgcacagagtaattgtcctgtataattgaaaacatgggcactgagttttatatccctgacagtcaaccaatgtcaacgagattttatggtgaatttatggtagcaggctctgggtcctaggttaatatgccttctgcctctgtaataagggtccattaaaaaaaggagaagggaggatctccgaaacccagcctgaggctcaagctctgctgcttaattagtattaaatggcttcctggctcaggagttacattgaggctaacgtttccttgaagagaagccctgattttaccttcctgtgtcattcagcccaacacctgcacccatgaatcattatatccagaggagaccacttccctctcatcacagacatctggggaaaactcctacctcagtaatgcttgatgtttgacacaactttggaaaatcactggcagttctaaacctgctgttcaagaagttcaaacattaaggctgtcaaatttccagccactgtgagctacttaatgagcaagagatgcaaattggcttcatgggcaatggtcgtgattgccacagacagcttgtggcagcaaggcttcctagcaaacataatagcaacacgtgcatttaattaaagtgatgtctactactgaaggtggttaaagtgccaggcctgattcttgcgagagatatatcactccccgcatttaaaacctagagaaacaaatttagagatgctaaatactcacacccaaccaagaacatggagcagagcaagattttgaacccaaatctgtctaggctctttgcaggctgttatatgccc

SEQ ID NO: 390264 - DNA, 424 bp, Homo sapiens
  misc_feature (308)..(308): n is a, c, g, or t
  misc_feature (379)..(379): n is a, c, g, or t
aggatccggtgcagagcttggattcagcagaggtggctgttgatgtgaccagtccccctgtttgggtgggaaggccctgaatgacacatgcagcaaggctttaccccataaagacaaagaaactggctgaggagacaagagaaagaaagtagcagaagatgggaaggaaacagacggagtctcacttgtgttgccaagagagcttgagcatcaactggcagtgaggatggcaggaaagcaactgacttatcccctctcaccagaccttccaactgtctgcaacactggcattgccacgtatcccgatnccattgtggcattgtggtcagaggatttacaattcgctgaagatccatgtttttgggcatcccgggtagtntcatttaaaaactcttggtacatgtaatggatttattcaaaatgg

SEQ ID NO: 390265 - DNA, 749 bp, Homo sapiens
agcgatttcctgttaacacctacatttttgctgatcaagcaaggtctgttggtgcaagagcttaacctttattttatttccaaatgtgttttttattccgagtcccgttggtgtctatggtttcacttttctccatgagccacatgttaaagcctgccctgactaaatgaaggagtgtaagcagtgggatagacattgcaggcaggcgaaactgggataagccccagaatcttttgaacctatcagtaatattactaacagggagaaagtataaaagtgagcgcttcaagtgctctagtgtacatgtcagaattaaagcacgagttccacgggatggctcaccaccctcccttatttataaaacagaagtatcttttgagcccgctgtgccctcctcccccttttctatgcctgtttttctgcctgggttgcctggtttttgctctgcttgttgaaaccctgctcatccttcaggctgcctcaaaacttttgtggaagaaggtagggaacacatatctcttcttttgtccagccttccttgattagccttcttcctctcccttctacccattgtacatggtttctgttgccatgtagtggttaaatctggtttacgttgtagttgtttgtgtgtaaggaggtctcctacaccgggccatgttttcttaaacactgggatggtgttttcttagtgcttgtgatgttctttgtaacagtgggtgccctataacttttgtttggactgaatt

SEQ ID NO: 390266 - DNA, 621 bp, Homo sapiens
atttattaaaataaaaacataggtgcctgggaccagaattcatttttataaaatcacaactgttcactatataacactatgatttctttttgtgtttctgatattttcctatctaaaagtgacatagggttaaaaaggagagaaagtggatgtagaacaatatccaaacattggttccctgcttcagtccataattgtcattcattttttattgcctcaattccagttatcaaaaggtaggtactaatccaaactgcatttcacctcctagcaaaggagttaaaatatgtcttattgttctccatgttctgtatgaagttcttactttgaaatgcagggcccttcattctttggcttaatcctctgaaactcactgaattttctagccttgtcatctaccaaaatgtgcacatattgttgtaccttgggctgtcttaaaaaaagacatcatgaactctggagccagactatctagatcagaatcccacctgtaccacttactagctgtatgacctggggcaagtgacttaacctctctttgactcagcattctcatctatataataagaacaattaaagtatctgacaggagaatcaaagcctggccaaatgaaacaggaa

SEQ ID NO: 390267 - DNA, 568 bp, Homo sapiens
gaatactaggagctaagttttggacatattaaggttaagacgttattagacagccaaagaacatttcaacctttggactcagcctcagctacagtgaactcactagaaagatagttattttctggcataacaagggaaggagggggaaggcagtcttgttaaatcaagtgacattgatggggactggtctaagagcagagtaagctgctaaattttgcttgaaggaaggggaagcaatgagagtctgtcaggacagacacacacacacacgcacacacacatttttttctggtattcaccaggacagttttaataaaagtggcaatctttataatagaaatttctcaccattcggtaaaactgatatttcagtgggaactcctgctggatataatcataatttgaaataaaatgtgacaccaaagataggaagagatggcttagaaggtagaagaatcactttgggtattctcttgagcctctcaagccaagccattaaattgcttcggaatggtctaagtcaaggactaaacctgacaaacatgtaggagcaaatgctccctgagaa

SEQ ID NO: 390268 - DNA, 227 bp, Homo sapiens
tgaagagggcatgaggtgcttgtctgagactgatctcctcctgctgagtccccccatcagactgtccttcctctgcagcgagtgtctgcagggtctgaatgcgggaaaggaattctgatctgttgaaatttgtctcctctgtgtgtcctgcactaaatgcccaaaccccagcatgggacttaatgcagagagggacacaggcagagtccaggcctgagaatcctgtg

SEQ ID NO: 390269 - DNA, 266 bp, Homo sapiens
cggccaaaggacgatgttcatttaaatcaggactgaggccagggtgaggcgagggaggtgctggtgctgcaggtcccacgacactcactctcagggtcatgggcacctaagacgagatgccaacatccatgctgtacccaggcatccctcccttgcacttaaacctcttgactggtgcgggttcctgcagaggcctgtgggaccgagtttgagaaccacaggggaccgacaagcccagagctgctgccccctgggaatcaggccca

SEQ ID NO: 390270 - DNA, 163 bp, Homo sapiens
cagcctccttggcccaagctccccctgtcctcagtggacgacatgctcaaggtgagctcccgggtgtcaagcggaggccttttcctccaggacgaccctgtaggtaccaggaggggtggggcagggttgagcccttcgtggtctggttgccacactagctgcc

SEQ ID NO: 390271 - DNA, 767 bp, Homo sapiens
cagtctcccccttcaacatctctctctctctctctctctctctgtttttttcttaaactgatatctatgtgaaatgagctgaagttcacggtccagttaggaacggataatacattcattgtcctggcagcaaacttttttttcactccctggaagaattcacgcttgccgcaagaataataattacggaaaactagaaatgcactgctaacaaattaatccttaacggacaccaccctaacgagggcagtaatgatttgaggactctcttcctcacgggacttgcatctcctgtgacaatgagctattgtgcatcctcacaactcactctacctcttatagatccaaaatgtcaaaggttgtctgtcctggttgaccatgacatgtgagttaactcattctgctgctgcatggcagaactttattcaaactttatttatatccagagtaactaaaagatagagtgtgtgggtcttttccactcagagctagagtgcctaagagacagaaaacctgctctgacataaacggagaaaagttagatgagagctgtgggaccctgatggaaaatagggagtggggacccagagttctctcacaggtgactttaggcaatccagttaattggccaggactagaattcactcagaggttgcttctccctagtgcccaacacgcgtcctcagaaaatgccacagccagagaaaaccatacaccccatagtccctgaaaacaaaagtaagggggatgtgaaactggagagaggg

SEQ ID NO: 390272 - DNA, 773 bp, Homo sapiens
gatcgcaccactgcactccagcctggacaacaagagcaaaactccatctcaaaaaaaaagaaaaaagtacctgactccttctgtacgtgctgcctttaattctctatgcacacttgaatgtgtttaaaaatttgaaaagcactggttaggccgggcgcggtggctcacgcctgtaatcccagcactttgggaggtcgaggcaggtggatcacgaggtcagcagatcgagacatcctggctagcacggtgaaaccccatctctactaaaactacaaaaaattagctgggtgtggtggcgggtgcctgtagtcccagctactcgggaggctaaggcagaagaatggcatgaacccgggagtcgacatctcgttactgcactccagtctgggtgacagagggagactcccatctccaaaaaaaaaaaaagaaaagcactgatttattctaataatagcttcctttctataatctctccctactattccatctgtatcacaattatgtcgtagtggctgatattcactatttgaaatacagtcccagcactttgggaggccgaggtcaggggttcaaggaccggcctggccagcatggtgaaaccgcgtctctactaaaaatagacaagttagccaggcgtggtggcacacgcctgtggtcccacttactcgcgaggctgaggcgggagaaccgcttgaacccaggaggtggaggttgcggtgagctgagatcacgccactgcactccagcctgggaacacagtgagactccatctc

SEQ ID NO: 390273 - DNA, 689 bp, Homo sapiens
gggcaagatagccgactagaagcagctgcagtttgaggctcccactgagaagaactaaaagagtgtgcaaatcctgcaccagcaactgacatatccaggttctatgatcaggactgactaggtggttgccgtgacccatagagaacaaggaaagatgggctggtggattggcccacctgggagccacatggggcaaggggagccgtcaccctcagccagccaagggaggcagtgagtgagcatgctacccagcctgggaaactgctttttccatggatctttgcaatccacagatcagaagatcccactcatgagaccacaccacgagggccttgggtgccaaccacagagccatgcagattctcaacagccactcagctggagtctgcctaaaactaccgagttcccaagttggggaggggtggtcatcatcactgtggctgcctgctgcctaaaccctctgagttcccaagaagggacagcagccatcactgtggctgctagctgcctaagacactgaactcctggggaggaagggcggcagccatttctacagatcccagctgctgtttttcctttgctgatgccaggaagactggacggcttggtcccaagaggtattccccacagcgcagcatactgggtgtggcagatcattgccagactggcttttttagctggacctgaca

SEQ ID NO: 390274 - DNA, 940 bp, Homo sapiens
tggatttgctgatcaaaagcaccatcttccctcgcctgctgctggcagcctttccttgccttgcttgttagcagagcattctgcttacccatgtggctcccagagttagcagccccggctcttggatttcttgattcttctcccctgtgatctcagaggtgctgcagaggacattcccctttagagcaagtcatgtttctattcaggccacaaaactgggatgtacatgcagtgactttggtgttccttgtcttgttcaggggaacgggtgggactgttgtgtgctgtcaccctcttcattccatgagcaccttgttcacttagggtctgctgcctttttttttttctttttcttttttttttttttttagtttttggggatcggtgtctcacctcctgtgttggcgccaggctggagtgcagcctccaaagtagctgggattgtaggcgtgcgccaccacgcccggctaatttttatttttttagtagagacggggttttgccatgttggccagactggtctcaaacctctgacctcgtgatgacccccctcggcctcccaaagtgctgggattacacccagcctctgctgccttttcatatttccccatctgctttatggatcaactctcaacagtacactttttcttttctttacctaccctatgagtgcaacccagatgtaagagttaatcctcgtcagagaatcattgccttaaacctctcagaaatatgtaattaggaaatcttattttaattttttaaaaattgcttgtatagtttcaaagaataagatctggcaaatggccagatgtggtggctcacacctgtaatcaaaccagcactttgggaggctgaggcaggcagatcacctgaggtcaggcgttcaagaccagcctggccagcatggtgaaatcccgtctctactaaaaatacaaaa

SEQ ID NO: 390275 - DNA, 726 bp, Homo sapiens
gcagtgactacctgaagtacgtgctctccaagtaagttcgtgctaactttagcaaggaaaaattgcgcttatattaactctagtacctaatgactgactgtggcattcagtttaaactggtttgagcactgacttgtcttaggaagattttaattttaatccagtcaatctttagtgtttttttcctaccctcttctcagatgtaaattacttagtgtcaatccaatcactgtgatatgtcaagagtttactaactacacagggtgccgatggaatgggattttaatgttatagcacagcctggttgctttgatctgatcactggaagaataaaggcaacactgtgatgctgagcactgcagtgggctaagtgttgggtgtattatctcattcaatcctcgtcacaaccctgttcagttagcgtatatgtgctcatgcagatggaggcccacagaagttaagttattgcccaaggtcacacagctagtgtgtggtggagccttgtaggacagtgttttcttttaaggaaggtgttttgcccacagtggctaggataaacgtatttgaattttccttgtagagaacaagtactttaatgctctcatagactgacacccctaatccaagcaaactgtcatagactaagcatttattcttccttattgctgtttggacaactctgatcactttggtaattcttttttcattcttagccttaacttgttt

SEQ ID NO: 390276 - DNA, 427 bp, Homo sapiens
ctgtcatgaaagccactgaaatgtagccataaaaaatggggtgccatctcctcttgcacctctaaacatctggcaattatcatgggcaaagtgccttttaccccactaaagatactcaattgcattctgttctgtaacactaactattctttcatccatttgacctacataaactttcttcaaattttaaaaataaaaacaaaaaataaagatgatgtatgtctattagcacaaaacaagatgggcaacctgaccaaaaaaggggccctgatttccaagttcgcaatgatgccgtctctcacagtgattaccaggctgtgagagggtgtggtctataaacaccgggggtcccctatagaggagctgtgggggtgtgagcttgtggcaggggcgcgcgcgtacaccgtgcgcgagcagggagagacgg

SEQ ID NO: 390277 - DNA, 669 bp, Homo sapiens
ggcgctcttttgcggtggaagcaagaggatcaggcaatgactgttctctctgcctgcttccaacccttggctggtgttgcacttggctcctggctcccctactggtgtcagtatctataaaatatcaagagtttctagttcactggctattacgggactccagaaggttcccttttatactagtttattgctttaagcattttcctttttctccagttacctgaatcacactaccaggaaatagtgttacctgaattgcctgcagtagttctttgagtctgagccaggagagaaagaataggacacactgctgctgtctccgaaaagtcagatgtacttaagaccctttgtctttgggacgactttttcaccgccaaaattgggttttctgctgcacaaaatttgttctgttgagataaagttgatgtaattcagtttcaatgccttaatttaagtaatgtccaaaattacaggaaatccaaggagcaaggcagacaggttctaccagcagtctgtctcaccatcccaccaccttgcaggcttttctctttgcattagataggaattgacctttttaccttggaatgatttttagcagcatagagtaatcgtttaccccatatattcgtaagcatctcttatggcttgaaaacttactgtcaaagatgt

SEQ ID NO: 390278 - DNA, 905 bp, Homo sapiens
aaaagtgaaccgtttagatgaaaccataagaatcttaaaaggcttagaatatgtaggcggggtgcagtggctcatgtctgtaatcccagcactttggcaagtggagttgggcagatcccctgaggtcaggagttcaagaccagcctagccaacatggtgaaaccctgtctctaattaaaaaaatacaaaaattagctgggtatggtggcacgtgcctgtagacccagctactcaggaggctgaggcagaagaatcatttgaacctgggaggcggaggttgcagtgagccgagttcatgtcactgcactccagcctgggcgaaagagcgagactctgtctccaaaaaaaaaagaaaaaaagaaaatgtaatatattggccaggtgtggtggctcatgcctataatcccaacacttggcagaggctgaggtgagtggatcgcttgagcccaggagcttgagaccagcctgggcaacacggtgaaacctcatctctacaaaaaatacaaaaattagctgggtgtggtagtgcatgcctgtagtcccagctacttgggaggctaaggcaggaaaatcgcttgagcctgggaggcagaggtttcagtgagccaagattgcaccatcacaccccagtctgggtgacctgagtgaaaccctgtctcacaaaaaaaaaagaaaaaaaaaagaaaaaaatgtaatatagcagtatggaatatgtaaatgaactaaaaattatgatactgtaagtctcattaatttagaatctagtaattaaaatttttgaacatttggactatttttatttaggaaacaatatcttctttcatataaaaagtaaactctataaacattaatcagatcatgttgcctaatggatttagaaaaaggaaaaatgaacagaaatgtat

SEQ ID NO: 390279 - DNA, 379 bp, Homo sapiens
cccttatgggacaggctgaggctggaagtttgggagcagcagaggactcagaggtgccagaaagacggggtcctgaaagggtgagtctcactacacacagattcagggacaagcagagatttggaaagaagttcttactttgtttcttgagcctttaggcagaggcaccaatcactgtgccaccctttgtttacacagtagatcaccaaaactgacagcaacacagaaaagtaggtactgggtatcccatttcacagacaagactactgaggctcagagaagctgagtgacttgcccaacgccacagagctaggagatgaggagcagagttttgaacccagctctatctgctgtcgggctagtcgggggggtaccgagc

SEQ ID NO: 390280 - DNA, 481 bp, Homo sapiens
gagttcccagacacattgttagtaatgcttcatttaatccttgcaacaatccgtgaaaaatatgccattattgcatccattttgtaaatgaggaaactgaggcccagagaagttaagaaacttgcccaaagtcacacagcttgttagtggcagacccaggactgaaatcgaggcctttgggctctagagatgctcaaccgattcgcattcacagtcctcactatttgcaaactacagctgggtgcagggggtattaaaaatgcaagtgatcaccaccattcaaacacttgtaattacaggaggagctaagacccatgtgcataagatgccactcctttcttcataagggccatataatagtaacagtaataatagtaataatggcaaaggttactaattcttgagcacttataatgcaccgagtactgtgtggagcatgttacataaattaacttatgcagttttcatgaccaccttgtaa

SEQ ID NO: 390281 - DNA, 646 bp, Homo sapiens
  misc_feature (640)..(641): n is a, c, g, or t
atgtcagtgatcctcagtatcacaccactaaaggggatggaaggcggccattagacaaacatcccattatctcatctacaagcacgctgagttctgaccatggactagagtctgatgaacggtggcgtgagcagagagaacagtgagaagaagacacatctgtcctttgtttcgttgcatggccctgcttgaaggtgctcaaatgggaaaatccactcccgatggcccacaggtgctattcctcaggtttaacagtccttagcgatgtggttttcaacaccagctgaacatcagaaccacctgggagtctttactttgccagatgtccccaggatgtctaattaaagtggttctctgtgggtgggacccaggcgtgagtagctgttaaagcttcccaggtgatgctaaggtacagccaggactgagaaccactgccgtagagaaatccctctgcctctgtgccggtacgtcaagacagaactaggtagggtcaggggctcaggttaaaaatagcacactgcagggggccaggcatagtggctcatgcctataatcccaggactttggcaggccaaggcgagaggatcacttgagcccagggtacgagctcgaatcgtatcagctagggttaaaaaaaaanngggga

SEQ ID NO: 390282 - DNA, 1136 bp, Homo sapiens
tgagctcaggtgtgtttttcttccaagctttctagcaaggtttctacttaaaatcacctgtgtgcaagcccaaaggacatttcatctattctaagcagaaaggctgttttgttcattacagtgagtgctgttcatctcatggagtgggaggagcactaaaccaggagacagaggacatggatttggtttccagcttaaccagttaggactctgtcctctgcattctggaaccatgatgcctgcctgcctgcctcacagggctgttgtgaggaccagatgagatgatgtatgttcatacttttggaatctctaatttaaagtcttaatattttgtcttctgagtgtgaggggataaacctggatgtagactattaagcagcataggagaaaagaacaatagaatctaatggactgggtttgcaatctctctctaaatgcactgcttcagacaaagtgaaatccaaaggtgtgaaaaagtatagctgcaaattggaaaaatgtgtttcaagagtcgtctttttggccaggcatggtggctcacacctgtaatcccagcactttgggaggccgaggtgggcagattgcctgaggtccggagttcaagatcagcctggccaacatgatgaaaccctatctctactaaaattacaaaaattagccaggcgtggtggtacacgcctgtaatcccagctactcaggaggctgaggcaggagaattgtttgaacctgggagatggaggctgcagtgagctgagatcacgccactgtactccagcctgggcaacagagcaagactctgtctctaaaaaataataataataataataatttttttaaaaagaggtgtttttgaggtcttagatgttcaggttgatgatcctgcagagggaaactttccatgggggggtggggagagagagttttccatccacaatatagaaacagagaagcactgtgctccctctgcaggaccagccttcccttatctaaggggcatggagctcagggaggctttattccatatgcacgggagaatcaggcagaatgaacccctacccatctttcttggcttttcagtcattttgtgctgttttctctggttcattaataaattgaaactgccctccaaaaaaaaa

SEQ ID NO: 390283 - DNA, 567 bp, Homo sapiens
tgtgtgtcctccaactttgtacttactattagtttattaatttctacagtgaagcctgttggattttctcggagaattgtattgagaccagatcatttgggggagaatcaacatcttaatattgggcctcaatatttcataattttcaatgtagcagtcttgcatgcctgtttaaaaatttattcttaagtattttataattttacattactgtcagtagaacttttggatttgactttccagttgtttgctgtcagtatgtagatatacaattgatttttgtatagtgactttatagtctgataagtctgtttcacttattacttctagtggtttgtttatatagaaaactaagaaatttgcaattatgtttcctgtgactattgttttacttctttctttctaatctttatgtcttgtcttgctttttattggtttattatactgtccaggacttccatagtgttgaacagaagtcacgagaatgggcataatttgctttggtttcaaagcttaagcaagaaagctttcataagtccacccatatgggattgatgtcttgtccga

SEQ ID NO: 390284 - DNA, 339 bp, Homo sapiens
ctcggggctgttggcgttcttacttactcacttgtagacatagcacgcttcctttcagccccttctactcacttgctgaattcccagccatcaaggcagcaagcttcacttctcaaacatcagttcaaagatcaaattactggccgggtgcagtggctcatgcctgtaatctcagcattttgggaggccgaggcgggcggatcacctgaagtcaggagttcgagaccagcctggccaacatggtgaaaccccgtctctactaaaaatacaaaaattagccaggcatggtggcgggcgcctgtagtcccagctactcgggaggctgaagcaggagaatcg

SEQ ID NO: 390285 - DNA, 134 bp, Homo sapiens
ggagggaaacgcagggaatgaggcgtgagctcctgccgcccccgcccagctcccagccgacccgccgggggacgacccctttctggagacaagaacgtcgagtccgacccggccaggtgtcgcctgtctgaggc

SEQ ID NO: 390286 - DNA, 379 bp, Homo sapiens
aaaaatgggaccagtcccagggggtggacacttcctgttcttccagttttaaaatttttgagatcaaaagattgtacccttccatgactcaggccctaagattctaccaggagaagagaatggctttgctccaccctcacgggttttaaacctaggcatctgcccggactccttccttaaacctctgcccagcagcgtctacagaatacccttcttcctccagcacagaagtggatggggtggggcaggggaaggaaaaagcagtgcaggaatttctgcaaccgcaggatgatgcttgcaggagcccggggtgcagtgagtcatgagctctgcccgcggggaaggaggaggggggcgcagggacggagaatggggctgg

SEQ ID NO: 390287 - DNA, 464 bp, Homo sapiens
agagggtccccatccccgcaggatccccggtacttggcacactgcaaagcctgagtatttgtggatcacgtgatctgtgctagtgactatcaggagtctgagatttgaagcgatggatttcccagcatggtcccagctccccactgatgtgaaaggtggtggtgagttaacagctgagccaccacctgctgcccaaccccacgtgtcccacatggccgggcggtgctgcgctaactcatctcccctggatggaaacgtttgcgtggtgacagccgattctcttgagagtcatttgctgcccatgttgctggggagattctgcctcagggccaggagtggtttgctcctcccaccccgggcccagggctgctggtgggaggccccagggaggagcaaggactctaatgcttcgtgtggtgggagcctcaggactttcccacgtgcgacaggcacgttcctgggag

SEQ ID NO: 390288 - DNA, 372 bp, Homo sapiens
gctattgaaattccaatatcttagattcccaccaattatcctcactctccaccttctccgtttctcagtgatggaagaaagagccagagtatatacaggaagcaacaatgcttaaaaccccgttctttgaatttgtctaaaaggttactttagtttgagtctgttgctgaaatattaaaagacaagctatcttggctccatgggagtctgattaccttcatagactacctttcgcaaattcccatgatgcctgtagtgagtgctgcatactcagtctccacctcccaccctcccagttatattcttgcagtttcccctctctccatagtttaggtccactgaagcaagtagaatatatgatgcacctattct

SEQ ID NO: 390289 - DNA, 220 bp, Homo sapiens
gaactcgactggcttccatcgcaccacctgagcgctcagcttcaagaaattactggaaggcttccactagggtccaccaggagttctcccaccacctcaccagtttccaggtggtaagcaccaggacgccctcgaggttgctctgggatccccccacagcccctggtcagtctgcccttgtcactggtctgaggtcattaaaattacattgaggttccta

SEQ ID NO: 390290 - DNA, 208 bp, Homo sapiens
  misc_feature (55)..(55): n is a, c, g, or t
ggaagccttccagtaatttcttgaagctgagcgctcaggtgagtagggcgacatntagggtccaccaggagttctcccaccacctcaccagtttccaggtggtaagcaccaggacgccctcgaggttgctctgggatccccccacagcccctggtcagtctgcccttgtcactggtctgaggtcattaaaattacattgaggttccta

SEQ ID NO: 390291 - DNA, 2258 bp, Homo sapiens
aatcgaaagtagactcttttctgaagcatttcctgggatcagcctgaccacgctccatactgggagaggcttctgggtcaaaggaccagtctgcagagggatcctgtggctggaagcgaggaggctccacacggccgttgcagctaccgcagccaggatctgggcatccaggcacggccatgacccctccgaggctcttctgggtgtggctgctggttgcaggaacccaaggcgtgaacgatggtgacatgcggctggccgatgggggcgccaccaaccagggccgcgtggagatcttctacagaggccagtggggcactgtgtgtgacaacctgtgggacctgactgatgccagcgtcgtctgccgggccctgggcttcgagaacgccacccaggctctgggcagagctgccttcgggcaaggatcaggccccatcatgctggacgaggtccagtgcacgggaaccgaggcctcactggccgactgcaagtccctgggctggctgaagagcaactgcaggcacgagagagacgctggtgtggtctgcaccaatgaaaccaggagcacccacaccctggacctctccagggagctctcggaggcccttggccagatctttgacagccagcggggctgcgacctgtccatcagcgtgaatgtgcagggcgaggacgccctgggcttctgtggccacacggtcatcctgactgccaacctggaggcccaggccctgtggaaggagccgggcagcaatgtcaccatgagtgtggatgctgagtgtgtgcccatggtcagggaccttctcaggtacttctactcccgaaggattgacatcaccctgtcgtcagtcaagtgcttccacaagctggcctctgcctatggggccaggcagctgcagggctactgcgcaagcctctttgccatcctcctcccccaggacccctcgttccagatgcccctggacctgtatgcctatgcagtggccacaggggacgccctgctggagaagctctgcctacagttcctggcctggaacttcgaggccttgacgcaggccgaggcctggcccagtgtccccacagacctgctccaactgctgctgcccaggagcgacctggcggtgcccagcgagctggccctactgaaggccgtggacacctggagctggggggagcgtgcctcccatgaggaggtggagggcttggtggagaagatccgcttccccatgatgctccctgaggagctctttgagctgcagttcaacctgtccctgtactggagccacgaggccctgttccagaagaagactctgcaggccctggaattccacactgtgcccttccagttgctggcccggtacaaaggcctgaacctcaccgaggatacctacaagccccggatttacacctcgcccacctggagtgcctttgtgacagacagttcctggagtgcacggaagtcacaactggtctatcagtccagacgggggcctttggtcaaatattcttctgattacttccaagccccctctgactacagatactacccctaccagtccttccagactccacaacaccccagcttcctcttccaggacaagagggtgtcctggtccctggtctacctccccaccatccagagctgctggaactacggcttctcctgctcctcggacgagctccctgtcctgggcctcaccaagtctggcggctcagatcgcaccattgcctacgaaaacaaagccctgatgctctgcgaagggctcttcgtggcagacgtcaccgatttcgagggctggaaggctgcgattcccagtgccctggacaccaacagctcgaagagcacctcctccttcccctgcccggcagggcacttcaacggcttccgcacggtcatccgccccttctacctgaccaactcctcaggtgtggactagacggcgtggcccaagggtggtgagaaccggagaaccccaggacgccctcactgcaggctcccctcctcggcttccttcctctctgcaatgaccttcaacaaccggccaccagatgtcgccctactcacctgagcgctcagcttcaagaaattactggaaggcttccactagggtccaccaggagttctcccaccacctcaccagtttccaggtggtaagcaccaggacgccctcgaggttgctctgggatccccccacagcccctggtcagtctgcccttgtcactggtctgaggtcattaaaattacattgaggttccta

SEQ ID NO: 390292 - DNA, 2242 bp, Homo sapiens
aggctgtacggtcccaagccgttaatcctgaccacgctccatactgggagaggcttctgggtcaaaggaccagtctgcagagggatcctgtggctggaagcgaggaggctccacacggccgttgcagctaccgcagccaggatctgggcatccaggcacggccatgacccctccgaggctcttctgggtgtggctgctggttgcaggaacccaaggcgtgaacgatggtgacatgcggctggccgatgggggcgccaccaaccagggccgcgtggagatcttctacagaggccagtggggcactgtgtgtgacaacctgtgggacctgactgatgccagcgtcgtctgccgggccctgggcttcgagaacgccacccaggctctgggcagagctgccttcgggcaaggatcaggccccatcatgctggacgaggtccagtgcacgggaaccgaggcctcactggccgactgcaagtccctgggctggctgaagagcaactgcaggcacgagagagacgctggtgtggtctgcaccaatgaaaccaggagcacccacaccctggacctctccagggagctctcggaggcccttggccagatctttgacagccagcggggctgcgacctgtccatcagcgtgaatgtgcagggcgaggacgccctgggcttctgtggccacacggtcatcctgactgccaacctggaggcccaggccctgtggaaggagccgggcagcaatgtcaccatgagtgtggatgctgagtgtgtgcccatggtcagggaccttctcaggtacttctactcccgaaggattgacatcaccctgtcgtcagtcaagtgcttccacaagctggcctctgcctatggggccaggcagctgcagggctactgcgcaagcctctttgccatcctcctcccccaggacccctcgttccagatgcccctggacctgtatgcctatgcagtggccacaggggacgccctgctggagaagctctgcctacagttcctggcctggaacttcgaggccttgacgcaggccgaggcctggcccagtgtccccacagacctgctccaactgctgctgcccaggagcgacctggcggtgcccagcgagctggccctactgaaggccgtggacacctggagctggggggagcgtgcctcccatgaggaggtggagggcttggtggagaagatccgcttccccatgatgctccctgaggagctctttgagctgcagttcaacctgtccctgtactggagccacgaggccctgttccagaagaagactctgcaggccctggaattccacactgtgcccttccagttgctggcccggtacaaaggcctgaacctcaccgaggatacctacaagccccggatttacacctcgcccacctggagtgcctttgtgacagacagttcctggagtgcacggaagtcacaactggtctatcagtccagacgggggcctttggtcaaatattcttctgattacttccaagccccctctgactacagatactacccctaccagtccttccagactccacaacaccccagcttcctcttccaggacaagagggtgtcctggtccctggtctacctccccaccatccagagctgctggaactacggcttctcctgctcctcggacgagctccctgtcctgggcctcaccaagtctggcggctcagatcgcaccattgcctacgaaaacaaagccctgatgctctgcgaagggctcttcgtggcagacgtcaccgatttcgagggctggaaggctgcgattcccagtgccctggacaccaacagctcgaagagcacctcctccttcccctgcccggcagggcacttcaacggcttccgcacggtcatccgccccttctacctgaccaactcctcaggtgtggactagacggcgtggcccaagggtggtgagaaccggagaaccccaggacgccctcactgcaggctcccctcctcggcttccttcctctctgcaatgaccttcaacaaccggccaccagatgtcgccctactcacctgagcgctcagcttcaagaaattactggaaggcttccactagggtccaccaggagttctcccaccacctcaccagtttccaggtggtaagcaccaggacgccctcgaggttgctctgggatccccccacagcccctggtcagtctgcccttgtcactggtctgaggtcattaaaattacattgaggttccta

SEQ ID NO: 390293 - DNA, 2307 bp, Homo sapiens
aggctgtacggtcccaagccgttaatcctgaccacgctccatactgggagaggcttctgggtcaaaggaccagtctgcagagggatcctgtggctggaagcgaggaggctccacacggccgttgcagctaccgcagccaggatctgggcatccaggcacggccatgacccctccgaggctcttctgggtgtggctgctggttgcaggaacccaaggcgtgaacgatggtgacatgcggctggccgatgggggcgccaccaaccagggccgcgtggagatcttctacagaggccagtggggcactgtgtgtgacaacctgtgggacctgactgatgccagcgtcgtctgccgggccctgggcttcgagaacgccacccaggctctgggcagagctgccttcgggcaaggatcaggccccatcatgctggacgaggtccagtgcacgggaaccgaggcctcactggccgactgcaagtccctgggctggctgaagagcaactgcaggcacgagagagacgctggtgtggtctgcaccaatgaaaccaggagcacccacaccctggacctctccagggagctctcggaggcccttggccagatctttgacagccagcggggctgcgacctgtccatcagcgtgaatgtgcagggcgaggacgccctgggcttctgtggccacacggtcatcctgactgccaacctggaggcccaggccctgtggaaggagccgggcagcaatgtcaccatgagtgtggatgctgagtgtgtgcccatggtcagggaccttctcaggtacttctactcccgaaggattgacatcaccctgtcgtcagtcaagtgcttccacaagctggcctctgcctatggggccaggcagctgcagggctactgcgcaagcctctttgccatcctcctcccccaggacccctcgttccagatgcccctggacctgtatgcctatgcagtggccacaggggacgccctgctggagaagctctgcctacagttcctggcctggaacttcgaggccttgacgcaggccgaggcctggcccagtgtccccacagacctgctccaactgctgctgcccaggagcgacctggcggtgcccagcgagctggccctactgaaggccgtggacacctggagctggggggagcgtgcctcccatgaggaggtggagggcttggtggagaagatccgcttccccatgatgctccctgaggagctctttgagctgcagttcaacctgtccctgtactggagccacgaggccctgttccagaagaagactctgcaggccctggaattccacactgtgcccttccagttgctggcccggtacaaaggcctgaacctcaccgaggatacctacaagccccggatttacacctcgcccacctggagtgcctttgtgacagacagttcctggagtgcacggaagtcacaactggtctatcagtccagacgggggcctttggtcaaatattcttctgattacttccaagccccctctgactacagatactacccctaccagtccttccagactccacaacaccccagcttcctcttccaggacaagagggtgtcctggtccctggtctacctccccaccatccagagctgctggaactacggcttctcctgctcctcggacgagctccctgtcctgggcctcaccaagtctggcggctcagatcgcaccattgcctacgaaaacaaagccctgatgctctgcgaagggctcttcgtggcagacgtcaccgatttcgagggctggaaggctgcgattcccagtgccctggacaccaacagctcgaagagcacctcctccttcccctgcccggcagggcacttcaacggcttccgcacggtcatccgccccttctacctgaccaactcctcaggtgtggactagacggcgtggcccaagggtggtgagaaccggagaaccccaggacgccctcactgcaggctcccctcctcggcttccttcctctctgcaatgaccttcaacaaccggccaccagatgtcgccctactcacctgagcgctcagcttcaagaaattactggaaggcttccactagggtccaccaggagttctcccaccacctcaccagtttccaggtggtaagcaccaggacgccctcgaggttgctctgggatccccccacagcccctggtcagtctgcccttgtcactggtctgaggtcattaaaattacattgaggttcctaaaaaaacacgaaaatctgcaaggaaacatatacgggccggcaaaaagaggttagacaggacatga

SEQ ID NO: 390294 - DNA, 2544 bp, Homo sapiens
aggctgtacggtcccaagccgttaatcctgaccacgctccatactgggagaggcttctgggtcaaaggaccagtctgcagagggatcctgtggctggaagcgaggaggctccacacggccgttgcagctaccgcagccaggatctgggcatccaggcacggccatgacccctccgaggctcttctgggtgtggctgctggttgcaggaacccaaggcgtgaacgatggtgacatgcggctggccgatgggggcgccaccaaccagggccgcgtggagatcttctacagaggccagtggggcactgtgtgtgacaacctgtgggacctgactgatgccagcgtcgtctgccgggccctgggcttcgagaacgccacccaggctctgggcagagctgccttcgggcaaggatcaggccccatcatgctggacgaggtccagtgcacgggaaccgaggcctcactggccgactgcaagtccctgggctggctgaagagcaactgcaggcacgagagagacgctggtgtggtctgcaccaatgaaaccaggagcacccacaccctggacctctccagggagctctcggaggcccttggccagatctttgacagccagcggggctgcgacctgtccatcagcgtgaatgtgcagggcgaggacgccctgggcttctgtggccacacggtcatcctgactgccaacctggaggcccaggccctgtggaaggagccgggcagcaatgtcaccatgagtgtggatgctgagtgtgtgcccatggtcagggaccttctcaggtacttctactcccgaaggattgacatcaccctgtcgtcagtcaagtgcttccacaagctggcctctgcctatggggccaggcagctgcagggctactgcgcaagcctctttgccatcctcctcccccaggacccctcgttccagatgcccctggacctgtatgcctatgcagtggccacaggggacgccctgctggagaagctctgcctacagttcctggcctggaacttcgaggccttgacgcaggccgaggcctggcccagtgtccccacagacctgctccaactgctgctgcccaggagcgacctggcggtgcccagcgagctggccctactgaaggccgtggacacctggagctggggggagcgtgcctcccatgaggaggtggagggcttggtggagaagatccgcttccccatgatgctccctgaggagctctttgagctgcagttcaacctgtccctgtactggagccacgaggccctgttccagaagaagactctgcaggccctggaattccacactgtgcccttccagttgctggcccggtacaaaggcctgaacctcaccgaggatacctacaagccccggatttacacctcgcccacctggagtgcctttgtgacagacagttcctggagtgcacggaagtcacaactggtctatcagtccagacgggggcctttggtcaaatattcttctgattacttccaagccccctctgactacagatactacccctaccagtccttccagactccacaacaccccagcttcctcttccaggacaagagggtgtcctggtccctggtctacctccccaccatccagagctgctggaactacggcttctcctgctcctcggacgagctccctgtcctgggcctcaccaagtctggcggctcagatcgcaccattgcctacgaaaacaaagccctgatgctctgcgaagggctcttcgtggcagacgtcaccgatttcgagggctggaaggctgcgattcccagtgccctggacaccaacagctcgaagagcacctcctccttcccctgcccggcagggcacttcaacggcttccgcacggtcatccgccccttctacctgaccaactcctcaggtgtggactagacggcgtggcccaagggtggtgagaaccggagaaccccaggacgccctcactgcaggctcccctcctcggcttccttcctctctgcaatgaccttcaacaaccggccaccagatgtcgccctactcacctgagcgctcagcttcaagaaattactggaaggcttccactagggtccaccaggagttctcccaccacctcaccagtttccaggtggtaagcaccaggacgccctcgaggttgctctgggatccccccacagcccctggtcagtctgcccttgtcactggtctgaggtcattaaaattacattgaggttcctaaaaaaaaaaaaaaaaaaaaaaaaaaaaaaaaaaaaaaaaaaaaaaaaaaaaaaaaaaaaagggggggcccgcaaaaaaaattcccccggggggcgcacccaatgtaacacaggaccccgagtcttgggacagaagggcggccccaatagagagacgaccaattaacaaacacaagacgagcagggcccggcaacacacaccccaacaggggcggggaacaagcgagaaaagagagacacacctgggaaggagacccgcacaacgagcggcgggcgacaaatggggggacaccccccccacga

SEQ ID NO: 390295 - DNA, 2249 bp, Homo sapiens
aggctgtacggtcccaagccgttaatcctgaccacgctccatactgggagaggcttctgggtcaaaggaccagtctgcagagggatcctgtggctggaagcgaggaggctccacacggccgttgcagctaccgcagccaggatctgggcatccaggcacggccatgacccctccgaggctcttctgggtgtggctgctggttgcaggaacccaaggcgtgaacgatggtgacatgcggctggccgatgggggcgccaccaaccagggccgcgtggagatcttctacagaggccagtggggcactgtgtgtgacaacctgtgggacctgactgatgccagcgtcgtctgccgggccctgggcttcgagaacgccacccaggctctgggcagagctgccttcgggcaaggatcaggccccatcatgctggacgaggtccagtgcacgggaaccgaggcctcactggccgactgcaagtccctgggctggctgaagagcaactgcaggcacgagagagacgctggtgtggtctgcaccaatgaaaccaggagcacccacaccctggacctctccagggagctctcggaggcccttggccagatctttgacagccagcggggctgcgacctgtccatcagcgtgaatgtgcagggcgaggacgccctgggcttctgtggccacacggtcatcctgactgccaacctggaggcccaggccctgtggaaggagccgggcagcaatgtcaccatgagtgtggatgctgagtgtgtgcccatggtcagggaccttctcaggtacttctactcccgaaggattgacatcaccctgtcgtcagtcaagtgcttccacaagctggcctctgcctatggggccaggcagctgcagggctactgcgcaagcctctttgccatcctcctcccccaggacccctcgttccagatgcccctggacctgtatgcctatgcagtggccacaggggacgccctgctggagaagctctgcctacagttcctggcctggaacttcgaggccttgacgcaggccgaggcctggcccagtgtccccacagacctgctccaactgctgctgcccaggagcgacctggcggtgcccagcgagctggccctactgaaggccgtggacacctggagctggggggagcgtgcctcccatgaggaggtggagggcttggtggagaagatccgcttccccatgatgctccctgaggagctctttgagctgcagttcaacctgtccctgtactggagccacgaggccctgttccagaagaagactctgcaggccctggaattccacactgtgcccttccagttgctggcccggtacaaaggcctgaacctcaccgaggatacctacaagccccggatttacacctcgcccacctggagtgcctttgtgacagacagttcctggagtgcacggaagtcacaactggtctatcagtccagacgggggcctttggtcaaatattcttctgattacttccaagccccctctgactacagatactacccctaccagtccttccagactccacaacaccccagcttcctcttccaggacaagagggtgtcctggtccctggtctacctccccaccatccagagctgctggaactacggcttctcctgctcctcggacgagctccctgtcctgggcctcaccaagtctggcggctcagatcgcaccattgcctacgaaaacaaagccctgatgctctgcgaagggctcttcgtggcagacgtcaccgatttcgagggctggaaggctgcgattcccagtgccctggacaccaacagctcgaagagcacctcctccttcccctgcccggcagggcacttcaacggcttccgcacggtcatccgccccttctacctgaccaactcctcaggtgtggactagacggcgtggcccaagggtggtgagaaccggagaaccccaggacgccctcactgcaggctcccctcctcggcttccttcctctctgcaatgaccttcaacaaccggccaccagatgtcgccctactcacctgagcgctcagcttcaagaaattactggaaggcttccactagggtccaccaggagttctcccaccacctcaccagtttccaggtggtaagcaccaggacgccctcgaggttgctctgggatccccccacagcccctggtcagtctgcccttgtcactcgggtcgttacacaagctcattcagtgggcagctcgccagtt

SEQ ID NO: 390296 - DNA, 2181 bp, Homo sapiens
aggctgtacggtcccaagccgttaatcctgaccacgctccatactgggagaggcttctgggtcaaaggaccagtctgcagagggatcctgtggctggaagcgaggaggctccacacggccgttgcagctaccgcagccaggatctgggcatccaggcacggccatgacccctccgaggctcttctgggtgtggctgctggttgcaggaacccaaggcgtgaacgatggtgacatgcggctggccgatgggggcgccaccaaccagggccgcgtggagatcttctacagaggccagtggggcactgtgtgtgacaacctgtgggacctgactgatgccagcgtcgtctgccgggccctgggcttcgagaacgccacccaggctctgggcagagctgccttcgggcaaggatcaggccccatcatgctggacgaggtccagtgcacgggaaccgaggcctcactggccgactgcaagtccctgggctggctgaagagcaactgcaggcacgagagagacgctggtgtggtctgcaccaatgaaaccaggagcacccacaccctggacctctccagggagctctcggaggcccttggccagatctttgacagccagcggggctgcgacctgtccatcagcgtgaatgtgcagggcgaggacgccctgggcttctgtggccacacggtcatcctgactgccaacctggaggcccaggccctgtggaaggagccgggcagcaatgtcaccatgagtgtggatgctgagtgtgtgcccatggtcagggaccttctcaggtacttctactcccgaaggattgacatcaccctgtcgtcagtcaagtgcttccacaagctggcctctgcctatggggccaggcagctgcagggctactgcgcaagcctctttgccatcctcctcccccaggacccctcgttccagatgcccctggacctgtatgcctatgcagtggccacaggggacgccctgctggagaagctctgcctacagttcctggcctggaacttcgaggccttgacgcaggccgaggcctggcccagtgtccccacagacctgctccaactgctgctgcccaggagcgacctggcggtgcccagcgagctggccctactgaaggccgtggacacctggagctggggggagcgtgcctcccatgaggaggtggagggcttggtggagaagatccgcttccccatgatgctccctgaggagctctttgagctgcagttcaacctgtccctgtactggagccacgaggccctgttccagaagaagactctgcaggccctggaattccacactgtgcccttccagttgctggcccggtacaaaggcctgaacctcaccgaggatacctacaagccccggatttacacctcgcccacctggagtgcctttgtgacagacagttcctggagtgcacggaagtcacaactggtctatcagtccagacgggggcctttggtcaaatattcttctgattacttccaagccccctctgactacagatactacccctaccagtccttccagactccacaacaccccagcttcctcttccaggacaagagggtgtcctggtccctggtctacctccccaccatccagagctgctggaactacggcttctcctgctcctcggacgagctccctgtcctgggcctcaccaagtctggcggctcagatcgcaccattgcctacgaaaacaaagccctgatgctctgcgaagggctcttcgtggcagacgtcaccgatttcgagggctggaaggctgcgattcccagtgccctggacaccaacagctcgaagagcacctcctccttcccctgcccggcagggcacttcaacggcttccgcacggtcatccgccccttctacctgaccaactcctcaggtgtggactagacggcgtggcccaagggtggtgagaaccggagaaccccaggacgccctcactgcaggctcccctcctcggcttccttcctctctgcaatgaccttcaacaaccggccaccagatgtcgccctactcacctgagcgctcagcttcaagaaattactggaaggcttccactagggtccaccaggagttctcccaccacctcaccagtttccaggtggtaagcaccagggttaagggctaaccggctggctcctctatcctcg

SEQ ID NO: 390297 - DNA, 2013 bp, Homo sapiens
aggctgtacggtcccaagccgttaatcctgaccacgctccatactgggagaggcttctgggtcaaaggaccagtctgcagagggatcctgtggctggaagcgaggaggctccacacggccgttgcagctaccgcagccaggatctgggcatccaggcacggccatgacccctccgaggctcttctgggtgtggctgctggttgcaggaacccaaggcgtgaacgatggtgacatgcggctggccgatgggggcgccaccaaccagggccgcgtggagatcttctacagaggccagtggggcactgtgtgtgacaacctgtgggacctgactgatgccagcgtcgtctgccgggccctgggcttcgagaacgccacccaggctctgggcagagctgccttcgggcaaggatcaggccccatcatgctggacgaggtccagtgcacgggaaccgaggcctcactggccgactgcaagtccctgggctggctgaagagcaactgcaggcacgagagagacgctggtgtggtctgcaccaatgaaaccaggagcacccacaccctggacctctccagggagctctcggaggcccttggccagatctttgacagccagcggggctgcgacctgtccatcagcgtgaatgtgcagggcgaggacgccctgggcttctgtggccacacggtcatcctgactgccaacctggaggcccaggccctgtggaaggagccgggcagcaatgtcaccatgagtgtggatgctgagtgtgtgcccatggtcagggaccttctcaggtacttctactcccgaaggattgacatcaccctgtcgtcagtcaagtgcttccacaagctggcctctgcctatggggccaggcagctgcagggctactgcgcaagcctctttgccatcctcctcccccaggacccctcgttccagatgcccctggacctgtatgcctatgcagtggccacaggggacgccctgctggagaagctctgcctacagttcctggcctggaacttcgaggccttgacgcaggccgaggcctggcccagtgtccccacagacctgctccaactgctgctgcccaggagcgacctggcggtgcccagcgagctggccctactgaaggccgtggacacctggagctggggggagcgtgcctcccatgaggaggtggagggcttggtggagaagatccgcttccccatgatgctccctgaggagctctttgagctgcagttcaacctgtccctgtactggagccacgaggccctgttccagaagaagactctgcaggccctggaattccacactgtgcccttccagttgctggcccggtacaaaggcctgaacctcaccgaggatacctacaagccccggatttacacctcgcccactggaactacggcttctcctgctcctcggacgagctccctgtcctgggcctcaccaagtctggcggctcagatcgcaccattgcctacgaaaacaaagccctgatgctctgcgaagggctcttcgtggcagacgtcaccgatttcgagggctggaaggctgcgattcccagtgccctggacaccaacagctcgaagagcacctcctccttcccctgcccggcagggcacttcaacggcttccgcacggtcatccgccccttctacctgaccaactcctcaggtgtggactagacggcgtggcccaagggtggtgagaaccggagaaccccaggacgccctcactgcaggctcccctcctcggcttccttcctctctgcaatgaccttcaacaaccggccaccagatgtcgccctactcacctgagcgctcagcttcaagaaattactggaaggcttccactagggtccaccaggagttctcccaccacctcaccagtttccaggtggtaagcaccaggacgccctcgaggttgctctgggatccccccacagcccctggtcagtctgcccttgtcactggtctgaggtcattaaaattacattgaggttccta

SEQ ID NO: 390298 - DNA, 2028 bp, Homo sapiens
aggctgtacggtcccaagccgttaatcctgaccacgctccatactgggagaggcttctgggtcaaaggaccagtctgcagagggatcctgtggctggaagcgaggaggctccacacggccgttgcagctaccgcagccaggatctgggcatccaggcacggccatgacccctccgaggctcttctgggtgtggctgctggttgcaggaacccaaggcgtgaacgatggtgacatgcggctggccgatgggggcgccaccaaccagggccgcgtggagatcttctacagaggccagtggggcactgtgtgtgacaacctgtgggacctgactgatgccagcgtcgtctgccgggccctgggcttcgagaacgccacccaggctctgggcagagctgccttcgggcaaggatcaggccccatcatgctggacgaggtccagtgcacgggaaccgaggcctcactggccgactgcaagtccctgggctggctgaagagcaactgcaggcacgagagagacgctggtgtggtctgcaccaatgaaaccaggagcacccacaccctggacctctccagggagctctcggaggcccttggccagatctttgacagccagcggggctgcgacctgtccatcagcgtgaatgtgcagggcgaggacgccctgggcttctgtggccacacggtcatcctgactgccaacctggaggcccaggccctgtggaaggagccgggcagcaatgtcaccatgagtgtggatgctgagtgtgtgcccatggtcagggaccttctcaggtacttctactcccgaaggattgacatcaccctgtcgtcagtcaagtgcttccacaagctggcctctgcctatggggccaggcagctgcagggctactgcgcaagcctctttgccatcctcctcccccaggacccctcgttccagatgcccctggacctgtatgcctatgcagtggccacaggggacgccctgctggagaagctctgcctacagttcctggcctggaacttcgaggccttgacgcaggccgaggcctggcccagtgtccccacagacctgctccaactgctgctgcccaggagcgacctggcggtgcccagcgagctggccctactgaaggccgtggacacctggagctggggggagcgtgcctcccatgaggaggtggagggcttggtggagaagatccgcttccccatgatgctccctgaggagctctttgagctgcagttcaacctgtccctgtactggagccacgaggccctgttccagaagaagactctgcaggccctggaattccacactgtgcccttccagttgctggcccggtacaaaggcctgaacctcaccgaggatacctacaagccccggatttacacctcgcccacctggagtgcctttgtgacagacagttcctggagtgcacggaagtcacaactggtctatcagtccagacgggggcctttggtcaaatattcttctgattacttccaagccccctctgactacagatactacccctaccagtccttccagactccacaacaccccagcttcctcttccaggacaagagggtgtcctggtccctggtctacctccccaccatccagagctgctggaactacggcttctcctgctcctcggacgagctccctgtcctgggcctcaccaagtctggcggctcagatcgcaccattgcctacgaaaacaaagccctgatgctctgcgaagggctcttcgtggcagacgtcaccgatttcgagggctggaaggctgcgattcccagtgccctggacaccaacagctcgaagagcacctcctccttcccctgcccggcagggcacttcaacggcttccgcacggtcatccgccccttctacctgaccaactcctcaggtgtggactagacggcgtggcccaagggtggtgagaaccggagaaccccaggacgccctcactgcaggctctggagttgggcaggcctctggagtgtctggtcaactcttccgctccg

SEQ ID NO: 390299 - DNA, 2144 bp, Homo sapiens
aggctgtacggtcccaagccgttaatcctgaccacgctccatactgggagaggcttctgggtcaaaggaccagtctgcagagggatcctgtggctggaagcgaggaggctccacacggccgttgcagctaccgcagccaggatctgggcatccaggcacggccatgacccctccgaggctcttctgggtgtggctgctggttgcaggaacccaaggcgtgaacgatggtgacatgcggctggccgatgggggcgccaccaaccagggccgcgtggagatcttctacagaggccagtggggcactgtgtgtgacaacctgtgggacctgactgatgccagcgtcgtctgccgggccctgggcttcgagaacgccacccaggctctgggcagagctgccttcgggcaaggatcaggccccatcatgctggacgaggtccagtgcacgggaaccgaggcctcactggccgactgcaagtccctgggctggctgaagagcaactgcaggcacgagagagacgctggtgtggtctgcaccaatgaaaccaggagcacccacaccctggacctctccagggagctctcggaggcccttggccagatctttgacagccagcggggctgcgacctgtccatcagcgtgaatgtgcagggcgaggacgccctgggcttctgtggccacacggtcatcctgactgccaacctggaggcccaggccctgtggaaggagccgggcagcaatgtcaccatgagtgtggatgctgagtgtgtgcccatggtcagggaccttctcaggtacttctactcccgaaggattgacatcaccctgtcgtcagtcaagtgcttccacaagctggcctctgcctatggggccaggcagctgcagggctactgcgcaagcctctttgccatcctcctcccccaggacccctcgttccagatgcccctggacctgtatgcctatgcagtggccacaggggacgccctgctggagaagctctgcctacagttcctggcctggaacttcgaggccttgacgcaggccgaggcctggcccagtgtccccacagacctgctccaactgctgctgcccaggagcgacctggcggtgcccagcgagctggccctactgaaggccgtggacacctggagctggggggagcgtgcctcccatgaggaggtggagggcttggtggagaagatccgcttccccatgatgctccctgaggagctctttgagctgcagttcaacctgtccctgtactggagccacgaggccctgttccagaagaagactctgcaggccctggaattccacactgtgcccttccagttgctggcccggtacaaaggcctgaacctcaccgaggatacctacaagccccggatttacacctcgcccacctggagtgcctttgtgacagacagttcctggagtgcacggaagtcacaactggtctatcagtccagacgggggcctttggtcaaatattcttctgattacttccaagccccctctgactacagatactacccctaccagtccttccagactccacaacaccccagcttcctcttccaggacaagagggtgtcctggtccctggtctacctccccaccatccagagctgctggaactacggcttctcctgctcctcggacgagctccctgtcctgggcctcaccaagtctggcggctcagatcgcaccattgcctacgaaaacaaagccctgatgctctgcgaagggctcttcgtggcagacgtcaccgatttcgagggctggaaggctgcgattcccagtgccctggacaccagtggactagacggcgtggcccaagggtggtgagaaccggagaaccccaggacgccctcactgcaggctcccctcctcggcttccttcctctctgcaatgaccttcaacaaccggccaccagatgtcgccctactcacctgagcgctcagcttcaagaaattactggaaggcttccactagggtccaccaggagttctcccaccacctcaccagtttccaggtggtaagcaccaggacgccctcgaggttgctctgggatccccccacagcccctggtcagtctgcccttgtcactggtctgaggtcattaaaattacattgaggttccta

SEQ ID NO: 390300 - DNA, 2287 bp, Homo sapiens
ccacgcgtcgccacgcgtcgcccacgcgtccgcggacgcgtgggcttctgggtcaaaggaccagtctgcagagggatcctgtggctggaagcgaggaggctccacacggccgttgcagctaccgcagccaggatctgggcatccaggcacggccatgacccctccgaggctcttctgggtgtggctgctggttgcaggaacccaagaggtatccccagtgatgatgacttggaggttcccgggggctcacctgggttcaggcgtgaacgatggtgacatgcggctggccgatgggggcgccaccaaccagggccgcgtggagatcttctacagaggccagtggggcactgtgtgtgacaacctgtgggacctgactgatgccagcgtcgtctgccgggccctgggcttcgagaacgccacccaggctctgggcagagctgccttcgggcaaggatcaggccccatcatgctggacgaggtccagtgcacgggaaccgaggcctcactggccgactgcaagtccctgggctggctgaagagcaactgcaggcacgagagagacgctggtgtggtctgcaccaatgaaaccaggagcacccacaccctggacctctccagggagctctcggaggcccttggccagatctttgacagccagcggggctgcgacctgtccatcagcgtgaatgtgcagggcgaggacgccctgggcttctgtggccacacggtcatcctgactgccaacctggaggcccaggccctgtggaaggagccgggcagcaatgtcaccatgagtgtggatgctgagtgtgtgcccatggtcagggaccttctcaggtacttctactcccgaaggattgacatcaccctgtcgtcagtcaagtgcttccacaagctggcctctgcctatggggccaggcagctgcagggctactgcgcaagcctctttgccatcctcctcccccaggacccctcgttccagatgcccctggacctgtatgcctatgcagtggccacaggggacgccctgctggagaagctctgcctacagttcctggcctggaacttcgaggccttgacgcaggccgaggcctggcccagtgtccccacagacctgctccaactgctgctgcccaggagcgacctggcggtgcccagcgagctggccctactgaaggccgtggacacctggagctggggggagcgtgcctcccatgaggaggtggagggcttggtggagaagatccgcttccccatgatgctccctgaggagctctttgagctgcagttcaacctgtccctgtactggagccacgaggccctgttccagaagaagactctgcaggccctggaattccacactgtgcccttccagttgctggcccggtacaaaggcctgaacctcaccgaggatacctacaagccccggatttacacctcgcccacctggagtgcctttgtgacagacagttcctggagtgcacggaagtcacaactggtctatcagtccagacgggggcctttggtcaaatattcttctgattacttccaagccccctctgactacagatactacccctaccagtccttccagactccacaacaccccagcttcctcttccaggacaagagggtgtcctggtccctggtctacctccccaccatccagagctgctggaactacggcttctcctgctcctcggacgagctccctgtcctgggcctcaccaagtctggcggctcagatcgcaccattgcctacgaaaacaaagccctgatgctctgcgaagggctcttcgtggcagacgtcaccgatttcgagggctggaaggctgcgattcccagtgccctggacaccaacagctcgaagagcacctcctccttcccctgcccggcagggcacttcaacggcttccgcacggtcatccgccccttctacctgaccaactcctcaggtgtggactagacggcgtggcccaagggtggtgagaaccggagaaccccaggacgccctcactgcaggctcccctcctcggcttccttcctctctgcaatgaccttcaacaaccggccaccagatgtcgccctactcacctgagcgctcagcttcaagaaattactggaaggcttccactagggtccaccaggagttctcccaccacctcaccagtttccaggtggtaagcaccaggacgccctcgaggttgctctgggatccccccacagcccctggtcagtctgcccttgtcactggtctgaggtcattaaaattacattgaggttccta

SEQ ID NO: 390301 - DNA, 2430 bp, Homo sapiens
ccacgcgtcgccacgcgtcgcccacgcgtccgcggacgcgtgggcttctgggtcaaaggaccagtctgcagagggatcctgtggctggaagcgaggaggctccacacggccgttgcagctaccgcagccaggatctgggcatccaggcacggccatgacccctccgaggctcttctgggtgtggctgctggttgcaggaacccaaggtgagctgagcccctgggaaataccaaaagcagaagtgtggaaggctggtgcaccctggggctgctcagagcttcaaggagatattctgcctggggcccggggcccagcggttagccagatcttctctcctgcttgaagcaccaggtatccccagtgatgatgacttggaggttcccgggggctcacctgggttcaggcgtgaacgatggtgacatgcggctggccgatgggggcgccaccaaccagggccgcgtggagatcttctacagaggccagtggggcactgtgtgtgacaacctgtgggacctgactgatgccagcgtcgtctgccgggccctgggcttcgagaacgccacccaggctctgggcagagctgccttcgggcaaggatcaggccccatcatgctggacgaggtccagtgcacgggaaccgaggcctcactggccgactgcaagtccctgggctggctgaagagcaactgcaggcacgagagagacgctggtgtggtctgcaccaatgaaaccaggagcacccacaccctggacctctccagggagctctcggaggcccttggccagatctttgacagccagcggggctgcgacctgtccatcagcgtgaatgtgcagggcgaggacgccctgggcttctgtggccacacggtcatcctgactgccaacctggaggcccaggccctgtggaaggagccgggcagcaatgtcaccatgagtgtggatgctgagtgtgtgcccatggtcagggaccttctcaggtacttctactcccgaaggattgacatcaccctgtcgtcagtcaagtgcttccacaagctggcctctgcctatggggccaggcagctgcagggctactgcgcaagcctctttgccatcctcctcccccaggacccctcgttccagatgcccctggacctgtatgcctatgcagtggccacaggggacgccctgctggagaagctctgcctacagttcctggcctggaacttcgaggccttgacgcaggccgaggcctggcccagtgtccccacagacctgctccaactgctgctgcccaggagcgacctggcggtgcccagcgagctggccctactgaaggccgtggacacctggagctggggggagcgtgcctcccatgaggaggtggagggcttggtggagaagatccgcttccccatgatgctccctgaggagctctttgagctgcagttcaacctgtccctgtactggagccacgaggccctgttccagaagaagactctgcaggccctggaattccacactgtgcccttccagttgctggcccggtacaaaggcctgaacctcaccgaggatacctacaagccccggatttacacctcgcccacctggagtgcctttgtgacagacagttcctggagtgcacggaagtcacaactggtctatcagtccagacgggggcctttggtcaaatattcttctgattacttccaagccccctctgactacagatactacccctaccagtccttccagactccacaacaccccagcttcctcttccaggacaagagggtgtcctggtccctggtctacctccccaccatccagagctgctggaactacggcttctcctgctcctcggacgagctccctgtcctgggcctcaccaagtctggcggctcagatcgcaccattgcctacgaaaacaaagccctgatgctctgcgaagggctcttcgtggcagacgtcaccgatttcgagggctggaaggctgcgattcccagtgccctggacaccaacagctcgaagagcacctcctccttcccctgcccggcagggcacttcaacggcttccgcacggtcatccgccccttctacctgaccaactcctcaggtgtggactagacggcgtggcccaagggtggtgagaaccggagaaccccaggacgccctcactgcaggctcccctcctcggcttccttcctctctgcaatgaccttcaacaaccggccaccagatgtcgccctactcacctgagcgctcagcttcaagaaattactggaaggcttccactagggtccaccaggagttctcccaccacctcaccagtttccaggtggtaagcaccaggacgccctcgaggttgctctgggatccccccacagcccctggtcagtctgcccttgtcactggtctgaggtcattaaaattacattgaggttccta

SEQ ID NO: 390302 - DNA, 2062 bp, Homo sapiens
  misc_feature (5)..(6): n is a, c, g, or t
gacgnntgggcgcgagcggacgctcgcgatctacagcgtgaacgatggtgacatgcggctggccgatgggggcgccaccaaccagggccgcgtggagatcttctacagaggccagtggggcactgtgtgtgacaacctgtgggacctgactgatgccagcgtcgtctgccgggccctgggcttcgagaacgccacccaggctctgggcagagctgccttcgggcaaggatcaggccccatcatgctggacgaggtccagtgcacgggaaccgaggcctcactggccgactgcaagtccctgggctggctgaagagcaactgcaggcacgagagagacgctggtgtggtctgcaccaatgaaaccaggagcacccacaccctggacctctccagggagctctcggaggcccttggccagatctttgacagccagcggggctgcgacctgtccatcagcgtgaatgtgcagggcgaggacgccctgggcttctgtggccacacggtcatcctgactgccaacctggaggcccaggccctgtggaaggagccgggcagcaatgtcaccatgagtgtggatgctgagtgtgtgcccatggtcagggaccttctcaggtacttctactcccgaaggattgacatcaccctgtcgtcagtcaagtgcttccacaagctggcctctgcctatggggccaggcagctgcagggctactgcgcaagcctctttgccatcctcctcccccaggacccctcgttccagatgcccctggacctgtatgcctatgcagtggccacaggggacgccctgctggagaagctctgcctacagttcctggcctggaacttcgaggccttgacgcaggccgaggcctggcccagtgtccccacagacctgctccaactgctgctgcccaggagcgacctggcggtgcccagcgagctggccctactgaaggccgtggacacctggagctggggggagcgtgcctcccatgaggaggtggagggcttggtggagaagatccgcttccccatgatgctccctgaggagctctttgagctgcagttcaacctgtccctgtactggagccacgaggccctgttccagaagaagactctgcaggccctggaattccacactgtgcccttccagttgctggcccggtacaaaggcctgaacctcaccgaggatacctacaagccccggatttacacctcgcccacctggagtgcctttgtgacagacagttcctggagtgcacggaagtcacaactggtctatcagtccagacgggggcctttggtcaaatattcttctgattacttccaagccccctctgactacagatactacccctaccagtccttccagactccacaacaccccagcttcctcttccaggacaagagggtgtcctggtccctggtctacctccccaccatccagagctgctggaactacggcttctcctgctcctcggacgagctccctgtcctgggcctcaccaagtctggcggctcagatcgcaccattgcctacgaaaacaaagccctgatgctctgcgaagggctcttcgtggcagacgtcaccgatttcgagggctggaaggctgcgattcccagtgccctggacaccaacagctcgaagagcacctcctccttcccctgcccggcagggcacttcaacggcttccgcacggtcatccgccccttctacctgaccaactcctcaggtgtggactagacggcgtggcccaagggtggtgagaaccggagaaccccaggacgccctcactgcaggctcccctcctcggcttccttcctctctgcaatgaccttcaacaaccggccaccagatgtcgccctactcacctgagcgctcagcttcaagaaattactggaaggcttccactagggtccaccaggagttctcccaccacctcaccagtttccaggtggtaagcaccaggacgccctcgaggttgctctgggatccccccacagcccctggtcagtctgcccttgtcactggtctgaggtcattaaaattacattgaggttccta

SEQ ID NO: 390303 - DNA, 1862 bp, Homo sapiens
aggctgtacggtcccaagccgttaatcctgaccacgctccatactgggagaggcttctgggtcaaaggaccagtctgcagagggatcctgtggctggaagcgaggaggctccacacggccgttgcagctaccgcagccaggatctgggcatccaggcacggccatgacccctccgaggctcttctgggtgtggctgctggttgcaggaacccaaggcgtgaacgatggtgacatgcggctggccgatgggggcgccaccaaccagggccgcgtggagatcttctacagaggccagtggggcactgtgtgtgacaacctgtgggacctgactgatgccagcgtcgtctgccgggccctgggcttcgagaacgccacccaggctctgggcagagctgccttcgggcaaggatcaggccccatcatgctggacgaggtccagtgcacgggaaccgaggcctcactggccgactgcaagtccctgggctggctgaagagcaactgcaggcacgagagagacgctggtgtggtctgcaccaatgaaaccaggagcacccacaccctggacctctccagggagctctcggaggcccttggccagatctttgacagccagcggggctgcgacctgtccatcagcgtgaatgtgcagggcgaggacgccctgggcttctgtggccacacggtcatcctgactgccaacctggaggcccaggccctgtggaaggagccgggcagcaatgtcaccatgagtgtggatgctgagtgtgtgcccatggtcagggaccttctcaggtacttctactcccgaaggattgacatcaccctgtcgtcagtcaagtgcttccacaagctggcctctgcctatggggccaggcagctgcagggctactgcgcaagcctctttgccatcctcctcccccaggacccctcgttccagatgcccctggacctgtatgcctatgcagtggccacaggggacgccctgctggagaagctctgcctacagttcctggcctggaacttcgaggccttgacgcaggccgaggcctggcccagtgtccccacagacctgctccaactgctgctgcccaggagcgacctggcggtgcccagcgagctggccctactgaaggccgtggacacctggagctggggggagcgtgcctcccatgaggaggtggagggcttggtggagaagatccgcttccccatgatgctccctgaggagctctttgagctgcagttcaacctgtccctgtactggagccacgaggccctgttccagaagaagactctgcaggccctggaattccacactgtgcccttccagttgctggcccggtacaaaggcctgaacctcaccgaggatacctacaagccccggatttacacctcgcccacctggagtgcctttgtgacagacagttcctggagtgcacggaagtcacaactggtctatcagtccagacgggggcctttggtcaaatattcttctgattacttccaagccccctctgactacagatactacccctaccagtccttccagactccacaacaccccagcttcctcttccaggacaagagggtgtcctggtccctggtctacctccccaccatccagagctgctggaactacggcttctcctgctcctcggacgagctccctgtcctgggcctcaccaagtctggcggctcagatcgcaccattgcctacgaaaacaaagccctgatgctctgcgaagggctcttcgtggcagacgtcacacgccctcgaggttgctctgggatccccccacagcccctggtcagtctgcccttgtcactggtctgaggtcattaaaattacattgaggttccta

SEQ ID NO: 390304 - DNA, 1698 bp, Homo sapiens
aggctgtacggtcccaagccgttaatcctgaccacgctccatactgggagaggcttctgggtcaaaggaccagtctgcagagggatcctgtggctggaagcgaggaggctccacacggccgttgcagctaccgcagccaggatctgggcatccaggcacggccatgacccctccgaggctcttctgggtgtggctgctggttgcaggaacccaaggcgtgaacgatggtgacatgcggctggccgatgggggcgccaccaaccagggccgcgtggagatcttctacagaggccagtggggcactgtgtgtgacaacctgtgggacctgactgatgccagcgtcgtctgccgggccctgggcttcgagaacgccacccaggctctgggcagagctgccttcgggcaaggatcaggccccatcatgctggacgaggtccagtgcacgggaaccgaggcctcactggccgactgcaagtccctgggctggctgaagagcaactgcaggcacgagagagacgctggtgtggtctgcaccaatgaaaccaggagcacccacaccctggacctctccagggagctctcggaggcccttggccagatctttgacagccagcggggctgcgacctgtccatcagcgtgaatgtgcagggcgaggacgccctgggcttctgtggccacacggtcatcctgactgccaacctggaggcccaggccctgtggaaggagccgggcagcaatgtcaccatgagtgtggatgctgagtgtgtgcccatggtcagggaccttctcaggtacttctactcccgaaggattgacatcaccctgtcgtcagtcaagtgcttccacaagctggcctctgcctatggggccaggcagctgcagggctactgcgcaagcctctttgccatcctcctcccccaggacccctcgttccagatgcccctggacctgtatgcctatgcagtggccacaggggacgccctgctggagaagctctgcctacagttcctggcctggaacttcgaggccttgacgcaggccgaggcctggcccagtgtccccacagacctgctccaactgctgctgcccaggagcgacctggcggtgcccagcgagctggccctactgaaggccgtggacacctggagctggggggagcgtgcctcccatgaggaggtggagggcttggtggagaagatccgcttccccatgatgctccctgaggagctctttgagctgcagttcaacctgtccctgtactggagccacgaggccctgttccagaagaagactctgcaggccctggaattccacactgtgcccttccagttgctggcccggtacaaaggcctgaacctcaccgaggatacctacaagccccggatttacacctcgcccacctggagtgcctttgtgacagacagttcctggagtgcacggaagtcacaactggtctatcagtccagacgggggcctttggtcaaatattcttctgattacttccaagccccctctgactacagatactacccctaccagtccttccagactccacaacaccccagcttcctcttccaggacaagagggtgtcctggtccctggtctacctccccaccatccagagctgctggaactacggcttctcctgctcctcggacgatggtctgaggtcattaaaattacattgaggttccta

SEQ ID NO: 390305 - DNA, 1787 bp, Homo sapiens
aggctgtacggtcccaagccgttaatcctgaccacgctccatactgggagaggcttctgggtcaaaggaccagtctgcagagggatcctgtggctggaagcgaggaggctccacacggccgttgcagctaccgcagccaggatctgggcatccaggcacggccatgacccctccgaggctcttctgggtgtggctgctggttgcaggaacccaaggcgtgaacgatggtgacatgcggctggccgatgggggcgccaccaaccagggccgcgtggagatcttctacagaggccagtggggcactgtgtgtgacaacctgtgggacctgactgatgccagcgtcgtctgccgggccctgggcttcgagaacgccacccaggctctgggcagagctgccttcgggcaaggatcaggccccatcatgctggacgaggtccagtgcacgggaaccgaggcctcactggccgactgcaagtccctgggctggctgaagagcaactgcaggcacgagagagacgctggtgtggtctgcaccaatgaaaccaggagcacccacaccctggacctctccagggagctctcggaggcccttggccagatctttgacagccagcggggctgcgacctgtccatcagcgtgaatgtgcagggcgaggacgccctgggcttctgtggccacacggtcatcctgactgccaacctggaggcccaggccctgtggaaggagccgggcagcaatgtcaccatgagtgtggatgctgagtgtgtgcccatggtcagggaccttctcaggtacttctactcccgaaggattgacatcaccctgtcgtcagtcaagtgcttccacaagctggcctctgcctatggggccaggcagctgcagggctactgcgcaagcctctttgccatcctcctcccccaggacccctcgttccagatgcccctggacctgtatgcctatgcagtggccacaggggacgccctgctggagaagctctgcctacagttcctggcctggaacttcgaggccttgacgcaggccgaggcctggcccagtgtccccacagacctgctccaactgctgctgcccaggagcgacctggcggtgcccagcgagctggccctactgaaggccgtggacacctggagctggggggagcgtgcctcccatgaggaggtggagggcttggtggagaagatccgcttccccatgatgctccctgaggagctctttgagctgcagttcaacctgtccctgtactggagccacgaggccctgttccagaagaagactctgcaggccctggaattccacactgtgcccttccagttgctggcccggtacaaaggcctgaacctcaccgaggatacctacaagccccggatttacacctcgcccacctggagtgcctttgtgacagacagttcctggagtgcacggaagtcacaactggtctatcagtccagacgggggcctttggtcaaatattcttctgattacttccaagccccctctgactacagatactacccctaccagtccttccagactccacaacaccccagcttcctcttccaggacaagagggtgtcctggtccctggtctacctccccaccatccagagctgctggaactacggcttctcctgctcctcggacgaggaccgaccgctcggacgacgtatactactaacagaccgcaaccctcaacaccaccttgcttcgaccccgccggaggagaaccccattctataccaacacctattctgaggaatcctcgagacta

SEQ ID NO: 390306 - DNA, 2407 bp, Homo sapiens
ccacgcgtcgccacgcgtcgcccacgcgtccgcggacgcgtgggcttctgggtcaaaggaccagtctgcagagggatcctgtggctggaagcgaggaggctccacacggccgttgcagctaccgcagccaggatctgggcatccaggcacggccatgacccctccgaggctcttctgggtgtggctgctggttgcaggaacccaaggtgagctgagcccctgggaaataccaaaagcagaagtgtggaaggctggtgcaccctggggctgctcagagcttcaaggagatattctgcctggggcccggggcccagcggttagccagatcttctctcctgcttgaagcaccgcgtgaacgatggtgacatgcggctggccgatgggggcgccaccaaccagggccgcgtggagatcttctacagaggccagtggggcactgtgtgtgacaacctgtgggacctgactgatgccagcgtcgtctgccgggccctgggcttcgagaacgccacccaggctctgggcagagctgccttcgggcaaggatcaggccccatcatgctggacgaggtccagtgcacgggaaccgaggcctcactggccgactgcaagtccctgggctggctgaagacagcccaaaaaacccttggccaggggcccaccggaagcaagcaagaaccgcttgggtgatggtcctgcaccaactgaaaccaggagcacccacaccctggacctctccagggagctctcggaggcccttggccagatctttgacagccagcggggctgcgacctgtccatcagcgtgaatgtgcagggcgaggacgccctgggcttctgtggccacacggtcatcctgactgccaacctggaggcccaggccctgtggaaggagccgggcagcaatgtcaccatgagtgtggatgctgagtgtgtgcccatggtcagggaccttctcaggtacttctactcccgaaggattgacatcaccctgtcgtcagtcaagtgcttccacaagctggcctctgcctatggggccaggcagctgcagggctactgcgcaagcctctttgccatcctcctcccccaggacccctcgttccagatgcccctggacctgtatgcctatgcagtggccacaggggacgccctgctggagaagctctgcctacagttcctggcctggaacttcgaggccttgacgcaggccgaggcctggcccagtgtccccacagacctgctccaactgctgctgcccaggagcgacctggcggtgcccagcgagctggccctactgaaggccgtggacacctggagctggggggagcgtgcctcccatgaggaggtggagggcttggtggagaagatccgcttccccatgatgctccctgaggagctctttgagctgcagttcaacctgtccctgtactggagccacgaggccctgttccagaagaagactctgcaggccctggaattccacactgtgcccttccagttgctggcccggtacaaaggcctgaacctcaccgaggatacctacaagccccggatttacacctcgcccacctggagtgcctttgtgacagacagttcctggagtgcacggaagtcacaactggtctatcagtccagacgggggcctttggtcaaatattcttctgattacttccaagccccctctgactacagatactacccctaccagtccttccagactccacaacaccccagcttcctcttccaggacaagagggtgtcctggtccctggtctacctccccaccatccagagctgctggaactacggcttctcctgctcctcggacgagctccctgtcctgggcctcaccaagtctggcggctcagatcgcaccattgcctacgaaaacaaagccctgatgctctgcgaagggctcttcgtggcagacgtcaccgatttcgagggctggaaggctgcgattcccagtgccctggacaccaacagctcgaagagcacctcctccttcccctgcccggcagggcacttcaacggcttccgcacggtcatccgccccttctacctgaccaactcctcaggtgtggactagacggcgtggcccaagggtggtgagaaccggagaaccccaggacgccctcactgcaggctcccctcctcggcttccttcctctctgcaatgaccttcaacaaccggccaccagatgtcgccctactcacctgagcgctcagcttcaagaaattactggaaggcttccactagggtccaccaggagttctcccaccacctcaccagtttccaggtggtaagcaccaggacgccctcgaggttgctctgggatccccccacagcccctggtcagtctgcccttgtcactggtctgaggtcattaaaattacattgaggttccta

SEQ ID NO: 390307 - DNA, 1819 bp, Homo sapiens
ccacgcgtcgccacgcgtcgcccacgcgtccgcggacgcgtgggcttctgggtcaaaggaccagtctgcagagggatcctgtggctggaagcgaggaggctccacacggccgttgcagctaccgcagccaggatctgggcatccaggcacggccatgacccctccgaggctcttctgggtgtggctgctggttgcaggaacccaagccatcagcgtgaatgtgcagggcgaggacgccctgggcttctgtggccacacggtcatcctgactgccaacctggaggcccaggccctgtggaaggagccgggcagcaatgtcaccatgagtgtggatgctgagtgtgtgcccatggtcagggaccttctcaggtacttctactcccgaaggattgacatcaccctgtcgtcagtcaagtgcttccacaagctggcctctgcctatggggccaggcagctgcagggctactgcgcaagcctctttgccatcctcctcccccaggacccctcgttccagatgcccctggacctgtatgcctatgcagtggccacaggggacgccctgctggagaagctctgcctacagttcctggcctggaacttcgaggccttgacgcaggccgaggcctggcccagtgtccccacagacctgctccaactgctgctgcccaggagcgacctggcggtgcccagcgagctggccctactgaaggccgtggacacctggagctggggggagcgtgcctcccatgaggaggtggagggcttggtggagaagatccgcttccccatgatgctccctgaggagctctttgagctgcagttcaacctgtccctgtactggagccacgaggccctgttccagaagaagactctgcaggccctggaattccacactgtgcccttccagttgctggcccggtacaaaggcctgaacctcaccgaggatacctacaagccccggatttacacctcgcccacctggagtgcctttgtgacagacagttcctggagtgcacggaagtcacaactggtctatcagtccagacgggggcctttggtcaaatattcttctgattacttccaagccccctctgactacagatactacccctaccagtccttccagactccacaacaccccagcttcctcttccaggacaagagggtgtcctggtccctggtctacctccccaccatccagagctgctggaactacggcttctcctgctcctcggacgagctccctgtcctgggcctcaccaagtctggcggctcagatcgcaccattgcctacgaaaacaaagccctgatgctctgcgaagggctcttcgtggcagacgtcaccgatttcgagggctggaaggctgcgattcccagtgccctggacaccaacagctcgaagagcacctcctccttcccctgcccggcagggcacttcaacggcttccgcacggtcatccgccccttctacctgaccaactcctcaggtgtggactagacggcgtggcccaagggtggtgagaaccggagaaccccaggacgccctcactgcaggctcccctcctcggcttccttcctctctgcaatgaccttcaacaaccggccaccagatgtcgccctactcacctgagcgctcagcttcaagaaattactggaaggcttccactagggtccaccaggagttctcccaccacctcaccagtttccaggtggtaagcaccaggacgccctcgaggttgctctgggatccccccacagcccctggtcagtctgcccttgtcactggtctgaggtcattaaaattacattgaggttccta

SEQ ID NO: 390308 - DNA, 1763 bp, Homo sapiens
atacgaatcgagctggtaccccccgactagcccgacaggtcatcatcatgtcttctgtgtatacacgccacctgtgccgcctccactgccctgactggggccagctccgaccctggttccccgaagggaatctgaagctgccaaagccccccatcagcgtgaatgtgcagggcgaggacgccctgggcttctgtggccacacggtcatcctgactgccaacctggaggcccaggccctgtggaaggagccgggcagcaatgtcaccatgagtgtggatgctgagtgtgtgcccatggtcagggaccttctcaggtacttctactcccgaaggattgacatcaccctgtcgtcagtcaagtgcttccacaagctggcctctgcctatggggccaggcagctgcagggctactgcgcaagcctctttgccatcctcctcccccaggacccctcgttccagatgcccctggacctgtatgcctatgcagtggccacaggggacgccctgctggagaagctctgcctacagttcctggcctggaacttcgaggccttgacgcaggccgaggcctggcccagtgtccccacagacctgctccaactgctgctgcccaggagcgacctggcggtgcccagcgagctggccctactgaaggccgtggacacctggagctggggggagcgtgcctcccatgaggaggtggagggcttggtggagaagatccgcttccccatgatgctccctgaggagctctttgagctgcagttcaacctgtccctgtactggagccacgaggccctgttccagaagaagactctgcaggccctggaattccacactgtgcccttccagttgctggcccggtacaaaggcctgaacctcaccgaggatacctacaagccccggatttacacctcgcccacctggagtgcctttgtgacagacagttcctggagtgcacggaagtcacaactggtctatcagtccagacgggggcctttggtcaaatattcttctgattacttccaagccccctctgactacagatactacccctaccagtccttccagactccacaacaccccagcttcctcttccaggacaagagggtgtcctggtccctggtctacctccccaccatccagagctgctggaactacggcttctcctgctcctcggacgagctccctgtcctgggcctcaccaagtctggcggctcagatcgcaccattgcctacgaaaacaaagccctgatgctctgcgaagggctcttcgtggcagacgtcaccgatttcgagggctggaaggctgcgattcccagtgccctggacaccaacagctcgaagagcacctcctccttcccctgcccggcagggcacttcaacggcttccgcacggtcatccgccccttctacctgaccaactcctcaggtgtggactagacggcgtggcccaagggtggtgagaaccggagaaccccaggacgccctcactgcaggctcccctcctcggcttccttcctctctgcaatgaccttcaacaaccggccaccagatgtcgccctactcacctgagcgctcagcttcaagaaattactggaaggcttccactagggtccaccaggagttctcccaccacctcaccagtttccaggtggtaagcaccaggacgccctcgaggttgctctgggatccccccacagcccctggtcagtctgcccttgtcactggtctgaggtcattaaaattacattgaggttccta

SEQ ID NO: 390309 - DNA, 1640 bp, Homo sapiens
gcatgcgtgtgtgtgcaactgcgtgagtgcatgtgtgactgcgtgtgtacatgtgcatgcatgagtattgcacacacacgcatgctcactcccacactgtgtgcactcaggtggctgtgttggacagttgggcccagggctcccctgctgtcctgtggggccggcatctgctctccttctttctccccaggtacttctactcccgaaggattgacatcaccctgtcgtcagtcaagtgcttccacaagctggcctctgcctatggggccaggcagctgcagggctactgcgcaagcctctttgccatcctcctcccccaggacccctcgttccagatgcccctggacctgtatgcctatgcagtggccacaggggacgccctgctggagaagctctgcctacagttcctggcctggaacttcgaggccttgacgcaggccgaggcctggcccagtgtccccacagacctgctccaactgctgctgcccaggagcgacctggcggtgcccagcgagctggccctactgaaggccgtggacacctggagctggggggagcgtgcctcccatgaggaggtggagggcttggtggagaagatccgcttccccatgatgctccctgaggagctctttgagctgcagttcaacctgtccctgtactggagccacgaggccctgttccagaagaagactctgcaggccctggaattccacactgtgcccttccagttgctggcccggtacaaaggcctgaacctcaccgaggatacctacaagccccggatttacacctcgcccacctggagtgcctttgtgacagacagttcctggagtgcacggaagtcacaactggtctatcagtccagacgggggcctttggtcaaatattcttctgattacttccaagccccctctgactacagatactacccctaccagtccttccagactccacaacaccccagcttcctcttccaggacaagagggtgtcctggtccctggtctacctccccaccatccagagctgctggaactacggcttctcctgctcctcggacgagctccctgtcctgggcctcaccaagtctggcggctcagatcgcaccattgcctacgaaaacaaagccctgatgctctgcgaagggctcttcgtggcagacgtcaccgatttcgagggctggaaggctgcgattcccagtgccctggacaccaacagctcgaagagcacctcctccttcccctgcccggcagggcacttcaacggcttccgcacggtcatccgccccttctacctgaccaactcctcaggtgtggactagacggcgtggcccaagggtggtgagaaccggagaaccccaggacgccctcactgcaggctcccctcctcggcttccttcctctctgcaatgaccttcaacaaccggccaccagatgtcgccctactcacctgagcgctcagcttcaagaaattactggaaggcttccactagggtccaccaggagttctcccaccacctcaccagtttccaggtggtaagcaccaggacgccctcgaggttgctctgggatccccccacagcccctggtcagtctgcccttgtcactggtctgaggtcattaaaattacattgaggttccta

SEQ ID NO: 390310 - DNA, 1421 bp, Homo sapiens
ttctgaggagtcccggtgtggttcttgtgctggcctctgcctatggggccaggcagctgcagggctactgcgcaagcctctttgccatcctcctcccccaggacccctcgttccagatgcccctggacctgtatgcctatgcagtggccacaggggacgccctgctggagaagctctgcctacagttcctggcctggaacttcgaggccttgacgcaggccgaggcctggcccagtgtccccacagacctgctccaactgctgctgcccaggagcgacctggcggtgcccagcgagctggccctactgaaggccgtggacacctggagctggggggagcgtgcctcccatgaggaggtggagggcttggtggagaagatccgcttccccatgatgctccctgaggagctctttgagctgcagttcaacctgtccctgtactggagccacgaggccctgttccagaagaagactctgcaggccctggaattccacactgtgcccttccagttgctggcccggtacaaaggcctgaacctcaccgaggatacctacaagccccggatttacacctcgcccacctggagtgcctttgtgacagacagttcctggagtgcacggaagtcacaactggtctatcagtccagacgggggcctttggtcaaatattcttctgattacttccaagccccctctgactacagatactacccctaccagtccttccagactccacaacaccccagcttcctcttccaggacaagagggtgtcctggtccctggtctacctccccaccatccagagctgctggaactacggcttctcctgctcctcggacgagctccctgtcctgggcctcaccaagtctggcggctcagatcgcaccattgcctacgaaaacaaagccctgatgctctgcgaagggctcttcgtggcagacgtcaccgatttcgagggctggaaggctgcgattcccagtgccctggacaccaacagctcgaagagcacctcctccttcccctgcccggcagggcacttcaacggcttccgcacggtcatccgccccttctacctgaccaactcctcaggtgtggactagacggcgtggcccaagggtggtgagaaccggagaaccccaggacgccctcactgcaggctcccctcctcggcttccttcctctctgcaatgaccttcaacaaccggccaccagatgtcgccctactcacctgagcgctcagcttcaagaaattactggaaggcttccactagggtccaccaggagttctcccaccacctcaccagtttccaggtggtaagcaccaggacgccctcgaggttgctctgggatccccccacagcccctggtcagtctgcccttgtcactggtctgaggtcattaaaattacattgaggttccta

SEQ ID NO: 390311 - DNA, 1290 bp, Homo sapiens
aggctgtacggtcccaagccgttaatcctgaccacgctccatactgggagaggcttctgggtcaaaggaccagtctgcagagggatcctgtggctggaagcgaggaggctccacacggccgttgcagctaccgcagccaggatctgggcatccaggcacggccatgacccctccgaggctcttctgggtgtggctgctggttgcaggaacccaaggcgtgaacgatggtgacatgcggctggccgatgggggcgccaccaaccagggccgcgtggagatcttctacagaggccagtggggcactgtgtgtgacaacctgtgggacctgactgatgccagcgtcgtctgccgggccctgggcttcgagaacgccacccaggctctgggcagagctgccttcgggcaaggatcaggccccatcatgctggacgaggtccagtgcacgggaaccgaggcctcactggccgactgcaagtccctgggctggctgaagagcaactgcaggcacgagagagacgctggtgtggtctgcaccaatgaaaccaggagcacccacaccctggacctctccagggagctctcggaggcccttggccagatctttgacagccagcggggctgcgacctgtccatcagcgtgaatgtgcagggcgaggacgccctgggcttctgtggccacacggtcatcctgactgccaacctggaggcccaggccctgtggaaggagccgggcagcaatgtcaccatgagtgtggatgctgagtgtgtgcccatggtcagggaccttctcaggtacttctactcccgaaggattgacatcaccctgtcgtcagtcaagtgcttccacaagctggcctctgcctatggggccaggcagctgcagggctactgcgcaagcctctttgccatcctcctcccccaggacccctcgttccagatgcccctggacctgtatgcctatgcagtggccacaggggacgccctgctggagaagctctgcctacagttcctggcctggaacttcgaggccttgacgcaggccgaggcctggcccagtgtccccacagacctgctccaactgctgctgcccaggagcgacctggcggtgcccagcgagctggccctactgaaggccgtggacacctggagctggggggagcgtgcctcccatgaggaggtggagggcttggtggagaagatccgcttccccatgatgctccctgaggagctctttgagctgcagttcaacctgtcccttttccagagcgatgggatcgctctagagtcacc

SEQ ID NO: 390312 - DNA, 1124 bp, Homo sapiens
tgattagaggatcctgtggaggcaggaagagctggggggagcgtgcctcccatgaggaggtggagggcttggtggagaagatccgcttccccatgatgctccctgaggagctctttgagctgcagttcaacctgtccctgtactggagccacgaggccctgttccagaagaagactctgcaggccctggaattccacactgtgcccttccagttgctggcccggtacaaaggcctgaacctcaccgaggatacctacaagccccggatttacacctcgcccacctggagtgcctttgtgacagacagttcctggagtgcacggaagtcacaactggtctatcagtccagacgggggcctttggtcaaatattcttctgattacttccaagccccctctgactacagatactacccctaccagtccttccagactccacaacaccccagcttcctcttccaggacaagagggtgtcctggtccctggtctacctccccaccatccagagctgctggaactacggcttctcctgctcctcggacgagctccctgtcctgggcctcaccaagtctggcggctcagatcgcaccattgcctacgaaaacaaagccctgatgctctgcgaagggctcttcgtggcagacgtcaccgatttcgagggctggaaggctgcgattcccagtgccctggacaccaacagctcgaagagcacctcctccttcccctgcccggcagggcacttcaacggcttccgcacggtcatccgccccttctacctgaccaactcctcaggtgtggactagacggcgtggcccaagggtggtgagaaccggagaaccccaggacgccctcactgcaggctcccctcctcggcttccttcctctctgcaatgaccttcaacaaccggccaccagatgtcgccctactcacctgagcgctcagcttcaagaaattactggaaggcttccactagggtccaccaggagttctcccaccacctcaccagtttccaggtggtaagcaccaggacgccctcgaggttgctctgggatccccccacagcccctggtcagtctgcccttgtcactggtctgaggtcattaaaattacattgaggttccta

SEQ ID NO: 390313 - DNA, 1144 bp, Homo sapiens
  misc_feature (1025)..(1026): n is a, c, g, or t
  misc_feature (1043)..(1043): n is a, c, g, or t
  misc_feature (1049)..(1049): n is a, c, g, or t
  misc_feature (1053)..(1053): n is a, c, g, or t
  misc_feature (1057)..(1057): n is a, c, g, or t
  misc_feature (1059)..(1059): n is a, c, g, or t
  misc_feature (1061)..(1061): n is a, c, g, or t
  misc_feature (1068)..(1068): n is a, c, g, or t
  misc_feature (1080)..(1080): n is a, c, g, or t
  misc_feature (1144)..(1144): n is a, c, g, or t
aggctgtacggtcccaagccgttaatcctgaccacgctccatactgggagaggcttctgggtcaaaggaccagtctgcagagggatcctgtggctggaagcgaggaggctccacacggccgttgcagctaccgcagccaggatctgggcatccaggcacggccatgacccctccgaggctcttctgggtgtggctgctggttgcaggaacccaaggcgtgaacgatggtgacatgcggctggccgatgggggcgccaccaaccagggccgcgtggagatcttctacagaggccagtggggcactgtgtgtgacaacctgtgggacctgactgatgccagcgtcgtctgccgggccctgggcttcgagaacgccacccaggctctgggcagagctgccttcgggcaaggatcaggccccatcatgctggacgaggtccagtgcacgggaaccgaggcctcactggccgactgcaagtccctgggctggctgaagagcaactgcaggcacgagagagacgctggtgtggtctgcaccaatgaaaccaggagcacccacaccctggacctctccagggagctctcggaggcccttggccagatctttgacagccagcggggctgcgacctgtccatcagcgtgaatgtgcagggcgaggacgccctgggcttctgtggccacacggtcatcctgactgccaacctggaggcccaggccctgtggaaggagccgggcagcaatgtcaccatgagtgtggatgctgagtgtgtgcccatggtcagggaccttctcaggtacttctactcccgaaggattgacatcaccctgtcgtcagtcaagtgcttccacaagctggcctctgcctatggggccaggcagctgcagggctactgcgcaagcctctttgccatcctcctcccccaggacccctcgttccagatgcccctggacctgtatgcctatgcagtggccacaggggacgccctgctggagaagctctgctaaattctggctggactcgagcttnngaggcgagctggccatntccaanactntcantntntgcagangactgcgtgcangagtggctatgagcgtgaactgagtggggagtctcatagagtgaggtgtgaaatccttcctaan

SEQ ID NO: 390314 - DNA, 985 bp, Homo sapiens
ggtcgtgtcggtccgagtggtcctgcgagggaagactctgcaggccctggaattccacactgtgcccttccagttgctggcccggtacaaaggcctgaacctcaccgaggatacctacaagccccggatttacacctcgcccacctggagtgcctttgtgacagacagttcctggagtgcacggaagtcacaactggtctatcagtccagacgggggcctttggtcaaatattcttctgattacttccaagccccctctgactacagatactacccctaccagtccttccagactccacaacaccccagcttcctcttccaggacaagagggtgtcctggtccctggtctacctccccaccatccagagctgctggaactacggcttctcctgctcctcggacgagctccctgtcctgggcctcaccaagtctggcggctcagatcgcaccattgcctacgaaaacaaagccctgatgctctgcgaagggctcttcgtggcagacgtcaccgatttcgagggctggaaggctgcgattcccagtgccctggacaccaacagctcgaagagcacctcctccttcccctgcccggcagggcacttcaacggcttccgcacggtcatccgccccttctacctgaccaactcctcaggtgtggactagacggcgtggcccaagggtggtgagaaccggagaaccccaggacgccctcactgcaggctcccctcctcggcttccttcctctctgcaatgaccttcaacaaccggccaccagatgtcgccctactcacctgagcgctcagcttcaagaaattactggaaggcttccactagggtccaccaggagttctcccaccacctcaccagtttccaggtggtaagcaccaggacgccctcgaggttgctctgggatccccccacagcccctggtcagtctgcccttgtcactggtctgaggtcattaaaattacattgaggttccta

SEQ ID NO: 390315 - DNA, 857 bp, Homo sapiens
tctgcagaggaccagattgtcacaggaagggaactggggtgttgtggagtctggaaggactgataggggtagtatctgtagtcagggggcctttggtcaaatattcttctgattacttccaagccccctctgactacagatactacccctaccagtccttccagactccacaacaccccagcttcctcttccaggacaagagggtgtcctggtccctggtctacctccccaccatccagagctgctggaactacggcttctcctgctcctcggacgagctccctgtcctgggcctcaccaagtctggcggctcagatcgcaccattgcctacgaaaacaaagccctgatgctctgcgaagggctcttcgtggcagacgtcaccgatttcgagggctggaaggctgcgattcccagtgccctggacaccaacagctcgaagagcacctcctccttcccctgcccggcagggcacttcaacggcttccgcacggtcatccgccccttctacctgaccaactcctcaggtgtggactagacggcgtggcccaagggtggtgagaaccggagaaccccaggacgccctcactgcaggctcccctcctcggcttccttcctctctgcaatgaccttcaacaaccggccaccagatgtcgccctactcacctgagcgctcagcttcaagaaattactggaaggcttccactagggtccaccaggagttctcccaccacctcaccagtttccaggtggtaagcaccaggacgccctcgaggttgctctgggatccccccacagcccctggtcagtctgcccttgtcactggtctgaggtcattaaaattacattgaggttccta

SEQ ID NO: 390316 - DNA, 921 bp, Homo sapiens
aggctgtacggtcccaagccgttaatcctgaccacgctccatactgggagaggcttctgggtcaaaggaccagtctgcagagggatcctgtggctggaagcgaggaggctccacacggccgttgcagctaccgcagccaggatctgggcatccaggcacggccatgacccctccgaggctcttctgggtgtggctgctggttgcaggaacccaaggcgtgaacgatggtgacatgcggctggccgatgggggcgccaccaaccagggccgcgtggagatcttctacagaggccagtggggcactgtgtgtgacaacctgtgggacctgactgatgccagcgtcgtctgccgggccctgggcttcgagaacgccacccaggctctgggcagagctgccttcgggcaaggatcaggccccatcatgctggacgaggtccagtgcacgggaaccgaggcctcactggccgactgcaagtccctgggctggctgaagagcaactgcaggcacgagagagacgctggtgtggtctgcaccaatgaaaccaggagcacccacaccctggacctctccagggagctctcggaggcccttggccagatctttgacagccagcggggctgcgacctgtccatcagcgtgaatgtgcagggcgaggacgccctgggcttctgtggccacacggtcatcctgactgccaacctggaggcccaggccctgtggaaggagccgggcagcaatgtcaccatgagtgtggatgctgagtgtgtgcccatggtcagggaccttctcaggtgagccgtctcgtcctcaggctctggggccgccaggggctttgtcctcctcccctcttcaaaagcacagccccccacacacacacctgcacatactcatgcatgcacatgtacacacgcagtcacaca

SEQ ID NO: 390317 - DNA, 495 bp, Homo sapiens
actagtgactttgttttcgtagcaatggtgcgatctgagccgccatattggtgaggccaggacaggtacagctcgaagagcacctcctccttcccctgcccggcagggcacttcaacggcttccgcacggtcatccgccccttctacctgaccaactcctcaggtgtggactagacggcgtggcccaagggtggtgagaaccggagaaccccaggacgccctcactgcaggctcccctcctcggcttccttcctctctgcaatgaccttcaacaaccggccaccagatgtcgccctactcacctgagcgctcagcttcaagaaattactggaaggcttccactagggtccaccaggagttctcccaccacctcaccagtttccaggtggtaagcaccaggacgccctcgaggttgctctgggatccccccacagcccctggtcagtctgcccttgtcactggtctgaggtcattaaaattacattgaggttccta

SEQ ID NO: 390318 - DNA, 360 bp, Homo sapiens
ctgacttacaggatcttaaacgacccgaaggtggactagacggcgtggcccaagggtggtgagaaccggagaaccccaggacgccctcactgcaggctcccctcctcggcttccttcctctctgcaatgaccttcaacaaccggccaccagatgtcgccctactcacctgagcgctcagcttcaagaaattactggaaggcttccactagggtccaccaggagttctcccaccacctcaccagtttccaggtggtaagcaccaggacgccctcgaggttgctctgggatccccccacagcccctggtcagtctgcccttgtcactggtctgaggtcattaaaattacattgaggttccta

SEQ ID NO: 390319 - DNA, 236 bp, Homo sapiens
  misc_feature (21)..(21): n is a, c, g, or t
atgcccttcggcggccggccnccggaaaaacccaaggaggcacctgagcgctcagcttcaagaaattactggaaggcttccactagggtccaccaggagttctcccaccacctcaccagtttccaggtggtaagcaccaggacgccctcgaggttgctctgggatccccccacagcccctggtcagtctgcccttgtcactggtctgaggtcattaaaattacattgaggttccta

SEQ ID NO: 390320 - DNA, 473 bp, Homo sapiens
  misc_feature (334)..(334): n is a, c, g, or t
  misc_feature (336)..(337): n is a, c, g, or t
  misc_feature (341)..(341): n is a, c, g, or t
  misc_feature (361)..(361): n is a, c, g, or t
  misc_feature (370)..(370): n is a, c, g, or t
  misc_feature (372)..(373): n is a, c, g, or t
  misc_feature (396)..(396): n is a, c, g, or t
  misc_feature (400)..(403): n is a, c, g, or t
  misc_feature (440)..(440): n is a, c, g, or t
  misc_feature (451)..(451): n is a, c, g, or t
  misc_feature (458)..(458): n is a, c, g, or t
  misc_feature (473)..(473): n is a, c, g, or t
aggctgtacggtcccaagccgttaatcctgaccacgctccatactgggagaggcttctgggtcaaaggaccagtctgcagagggatcctgtggctggaagcgaggaggctccacacggccgttgcagctaccgcagccaggatctgggcatccaggcacggccatgacccctccgaggctcttctgggtgtggctgctggttgcaggaacccaaggcgtgaacgatggtgacatgcggctggccgatgggggcgccaccaaccagggccgcgtggagatcttctacagaggccagtggggcactgtgtgtgacaacctgtgggaccttacttantnnatcntcttcttcctttcccttttnttctataantnnacccattctcttttcatatcatncttnnnncaattatcattccccatcattctttactatttccatntcactttaacntattccncactttcctacttcn

SEQ ID NO: 390321 - DNA, 430 bp, Homo sapiens
cggagttctaaaatggggttgccacaggaccctaacttttcaggccatctaagcaggcagtggttttggtgttagtggtgattggtgaccaaggctggggagtgggggctccggagtcagtaccaccaagtctccatgcggagctgctgcctgagtcgggggagcagcacagagcagagggcctaaagcgggggcctggacaggcttggccaggtcctagctgctcttgttccccagggctggaaggggcggggcctcagggtccaggaatccgacacttccggtctctcttgtccctcgtcttcccaggagccttccagagtgaatgaggcagccacaaatccctcactttcagatgaagacactgaccccagagagtggcagtgccccggctcctaacgcagcccacttccctcccgccccttcttag

SEQ ID NO: 390322 - DNA, 426 bp, Homo sapiens
ttcccctgcccggcagggcacttcaacggcttccgcacggtcatccgccccttctacctgaccaactcctcaggtgtggactagacggcgtggcccaagggtggtgagaaccggagaaccccaggacgccctcactgcaggctcccctcctcggcttccttcctctctgcaatgaccttcaacaaccggccaccagatgtcgccctactcacctgagcgctcagcttcaagaaattactggaaggcttccactagggtccaccaggagttctcccaccacctcaccagtttccaggtggtaagcaccaggacgccctcgaggttgctctgggatccccccacagcccctggtcagtctgcccttgtcactggtctgaggtcattaaaattacattgaggttcctaatttgtttgtacagaaagtgt

SEQ ID NO: 390323 - DNA, 367 bp, Homo sapiens
ctgacttacaggatcttaaacgacccgaaggtggactagacggcgtggcccaagggtggtgagaaccggagaaccccaggacgccctcactgcaggctcccctcctcggcttccttcctctctgcaatgaccttcaacaaccggccaccagatgtcgccctactcacctgagcgctcagcttcaagaaattactggaaggcttccactagggtccaccaggagttctcccaccacctcaccagtttccaggtggtaagcaccaggacgccctcgaggttgctctgggatccccccacagcccctggtcagtctgcccttgtcactcgggtcgttacacaagctcattcagtgggcagctcgccagtt

SEQ ID NO: 390324 - DNA, 2233 bp, Homo sapiens
ccacgcgtcgccacgcgtcgcccacgcgtccgcggacgcgtgggcttctgggtcaaaggaccagtctgcagagggatcctgtggctggaagcgaggaggctccacacggccgttgcagctaccgcagccaggatctgggcatccaggcacggccatgacccctccgaggctcttctgggtgtggctgctggttgcaggaacccaaggcgtgaacgatggtgacatgcggctggccgatgggggcgccaccaaccagggccgcgtggagatcttctacagaggccagtggggcactgtgtgtgacaacctgtgggacctgactgatgccagcgtcgtctgccgggccctgggcttcgagaacgccacccaggctctgggcagagctgccttcgggcaaggatcaggccccatcatgctggacgaggtccagtgcacgggaaccgaggcctcactggccgactgcaagtccctgggctggctgaagagcaactgcaggcacgagagagacgctggtgtggtctgcaccaatgaaaccaggagcacccacaccctggacctctccagggagctctcggaggcccttggccagatctttgacagccagcggggctgcgacctgtccatcagcgtgaatgtgcagggcgaggacgccctgggcttctgtggccacacggtcatcctgactgccaacctggaggcccaggccctgtggaaggagccgggcagcaatgtcaccatgagtgtggatgctgagtgtgtgcccatggtcagggaccttctcaggtacttctactcccgaaggattgacatcaccctgtcgtcagtcaagtgcttccacaagctggcctctgcctatggggccaggcagctgcagggctactgcgcaagcctctttgccatcctcctcccccaggacccctcgttccagatgcccctggacctgtatgcctatgcagtggccacaggggacgccctgctggagaagctctgcctacagttcctggcctggaacttcgaggccttgacgcaggccgaggcctggcccagtgtccccacagacctgctccaactgctgctgcccaggagcgacctggcggtgcccagcgagctggccctactgaaggccgtggacacctggagctggggggagcgtgcctcccatgaggaggtggagggcttggtggagaagatccgcttccccatgatgctccctgaggagctctttgagctgcagttcaacctgtccctgtactggagccacgaggccctgttccagaagaagactctgcaggccctggaattccacactgtgcccttccagttgctggcccggtacaaaggcctgaacctcaccgaggatacctacaagccccggatttacacctcgcccacctggagtgcctttgtgacagacagttcctggagtgcacggaagtcacaactggtctatcagtccagacgggggcctttggtcaaatattcttctgattacttccaagccccctctgactacagatactacccctaccagtccttccagactccacaacaccccagcttcctcttccaggacaagagggtgtcctggtccctggtctacctccccaccatccagagctgctggaactacggcttctcctgctcctcggacgagctccctgtcctgggcctcaccaagtctggcggctcagatcgcaccattgcctacgaaaacaaagccctgatgctctgcgaagggctcttcgtggcagacgtcaccgatttcgagggctggaaggctgcgattcccagtgccctggacaccaacagctcgaagagcacctcctccttcccctgcccggcagggcacttcaacggcttccgcacggtcatccgccccttctacctgaccaactcctcaggtgtggactagacggcgtggcccaagggtggtgagaaccggagaaccccaggacgccctcactgcaggctcccctcctcggcttccttcctctctgcaatgaccttcaacaaccggccaccagatgtcgccctactcacctgagcgctcagcttcaagaaattactggaaggcttccactagggtccaccaggagttctcccaccacctcaccagtttccaggtggtaagcaccaggacgccctcgaggttgctctgggatccccccacagcccctggtcagtctgcccttgtcactggtctgaggtcattaaaattacattgaggttccta

SEQ ID NO: 390325 - DNA, 2185 bp, Homo sapiens
aggctgtacggtcccaagccgttaatcctgaccacgctccatactgggagaggcttctgggtcaaaggaccagtctgcagagggatcctgtggctggaagcgaggaggctccacacggccgttgcagctaccgcagccaggatctgggcatccaggcacggccatgacccctccgaggctcttctgggtgtggctgctggttgcaggaacccaaggcgtgaacgatggtgacatgcggctggccgatgggggcgccaccaaccagggccgcgtggagatcttctacagaggccagtggggcactgtgtgtgacaacctgtgggacctgactgatgccagcgtcgtctgccgggccctgggcttcgagaacgccacccaggctctgggcagagctgccttcgggcaaggatcaggccccatcatgctggacgaggtccagtgcacgggaaccgaggcctcactggccgactgcaagtccctgggctggctgaagagcaactgcaggcacgagagagacgctggtgtggtctgcaccaatgaaaccaggagcacccacaccctggacctctccagggagctctcggaggcccttggccagatctttgacagccagcggggctgcgacctgtccatcagcgtgaatgtgcagggcgaggacgccctgggcttctgtggccacacggtcatcctgactgccaacctggaggcccaggccctgtggaaggagccgggcagcaatgtcaccatgagtgtggatgctgagtgtgtgcccatggtcagggaccttctcaggtacttctactcccgaaggattgacatcaccctgtcgtcagtcaagtgcttccacaagctggcctctgcctatggggccaggcagctgcagggctactgcgcaagcctctttgccatcctcctcccccaggacccctcgttccagatgcccctggacctgtatgcctatgcagtggccacaggggacgccctgctggagaagctctgcctacagttcctggcctggaacttcgaggccttgacgcaggccgaggcctggcccagtgtccccacagacctgctccaactgctgctgcccaggagcgacctggcggtgcccagcgagctggccctactgaaggccgtggacacctggagctggggggagcgtgcctcccatgaggaggtggagggcttggtggagaagatccgcttccccatgatgctccctgaggagctctttgagctgcagttcaacctgtccctgtactggagccacgaggccctgttccagaagaagactctgcaggccctggaattccacactgtgcccttccagttgctggcccggtacaaaggcctgaacctcaccgaggatacctacaagccccggaagtcacaactggtctatcagtccagacgggggcctttggtcaaatattcttctgattacttccaagccccctctgactacagatactacccctaccagtccttccagactccacaacaccccagcttcctcttccaggacaagagggtgtcctggtccctggtctacctccccaccatccagagctgctggaactacggcttctcctgctcctcggacgagctccctgtcctgggcctcaccaagtctggcggctcagatcgcaccattgcctacgaaaacaaagccctgatgctctgcgaagggctcttcgtggcagacgtcaccgatttcgagggctggaaggctgcgattcccagtgccctggacaccaacagctcgaagagcacctcctccttcccctgcccggcagggcacttcaacggcttccgcacggtcatccgccccttctacctgaccaactcctcaggtgtggactagacggcgtggcccaagggtggtgagaaccggagaaccccaggacgccctcactgcaggctcccctcctcggcttccttcctctctgcaatgaccttcaacaaccggccaccagatgtcgccctactcacctgagcgctcagcttcaagaaattactggaaggcttccactagggtccaccaggagttctcccaccacctcaccagtttccaggtggtaagcaccaggacgccctcgaggttgctctgggatccccccacagcccctggtcagtctgcccttgtcactggtctgaggtcattaaaattacattgaggttccta

SEQ ID NO: 390326 - DNA, 2307 bp, Homo sapiens
aggctgtacggtcccaagccgttaatcctgaccacgctccatactgggagaggcttctgggtcaaaggaccagtctgcagagggatcctgtggctggaagcgaggaggctccacacggccgttgcagctaccgcagccaggatctgggcatccaggcacggccatgacccctccgaggctcttctgggtgtggctgctggttgcaggaacccaaggcgtgaacgatggtgacatgcggctggccgatgggggcgccaccaaccagggccgcgtggagatcttctacagaggccagtggggcactgtgtgtgacaacctgtgggacctgactgatgccagcgtcgtctgccgggccctgggcttcgagaacgccacccaggctctgggcagagctgccttcgggcaaggatcaggccccatcatgctggacgaggtccagtgcacgggaaccgaggcctcactggccgactgcaagtccctgggctggctgaagagcaactgcaggcacgagagagacgctggtgtggtctgcaccaatgaaaccaggagcacccacaccctggacctctccagggagctctcggaggcccttggccagatctttgacagccagcggggctgcgacctgtccatcagcgtgaatgtgcagggcgaggacgccctgggcttctgtggccacacggtcatcctgactgccaacctggaggcccaggccctgtggaaggagccgggcagcaatgtcaccatgagtgtggatgctgagtgtgtgcccatggtcagggaccttctcaggtacttctactcccgaaggattgacatcaccctgtcgtcagtcaagtgcttccacaagctggcctctgcctatggggccaggcagctgcagggctactgcgcaagcctctttgccatcctcctcccccaggacccctcgttccagatgcccctggacctgtatgcctatgcagtggccacaggggacgccctgctggagaagctctgcctacagttcctggcctggaacttcgaggccttgacgcaggccgaggcctggcccagtgtccccacagacctgctccaactgctgctgcccaggagcgacctggcggtgcccagcgagctggccctactgaaggccgtggacacctggagctggggggagcgtgcctcccatgaggaggtggagggcttggtggagaagatccgcttccccatgatgctccctgaggagctctttgagctgcagttcaacctgtccctgtactggagccacgaggccctgttccagaagaagactctgcaggccctggaattccacactgtgcccttccagttgctggcccggtacaaaggcctgaacctcaccgaggatacctacaagccccggatttacacctcgcccacctggagtgcctttgtgacagacagttcctggagtgcacggaagtcacaactggtctatcagtccagacgggggcctttggtcaaatattcttctgattacttccaagccccctctgactacagatactacccctaccagtccttccagactccacaacaccccagcttcctcttccaggacaagagggtgtcctggtccctggtctacctccccaccatccagagctgctggaactacggcttctcctgctcctcggacgagctccctgtcctgggcctcaccaagtctggcggctcagatcgcaccattgcctacgaaaacaaagccctgatgctctgcgaagggctcttcgtggcagacgtcaccgatttcgagggctggaaggctgcgattcccagtgccctggacaccaacagctcgaagagcacctcctccttcccctgcccggcagggcacttcaacggcttccgcacggtcatccgccccttctacctgaccaactcctcaggtgtggactagacggcgtggcccaagggtggtgagaaccggagaaccccaggacgccctcactgcaggctcccctcctcggcttccttcctctctgcaatgaccttcaacaaccggccaccagatgtcgccctactcacctgagcgctcagcttcaagaaattactggaaggcttccactagggtccaccaggagttctcccaccacctcaccagtttccaggtggtaagcaccaggctggagtagctcgtattacccaggctggagtaactctgtattgcccaggctggagtagctcgttattgcccaggggtggagtagctcttatgcccaggctggagtagctcttattgcccatgactggagttgtctctatatgacggtcccacggtgtcct

SEQ ID NO: 390327 - DNA, 2193 bp, Homo sapiens
aggctgtacggtcccaagccgttaatcctgaccacgctccatactgggagaggcttctgggtcaaaggaccagtctgcagagggatcctgtggctggaagcgaggaggctccacacggccgttgcagctaccgcagccaggatctgggcatccaggcacggccatgacccctccgaggctcttctgggtgtggctgctggttgcaggaacccaaggcgtgaacgatggtgacatgcggctggccgatgggggcgccaccaaccagggccgcgtggagatcttctacagaggccagtggggcactgtgtgtgacaacctgtgggacctgactgatgccagcgtcgtctgccgggccctgggcttcgagaacgccacccaggctctgggcagagctgccttcgggcaaggatcaggccccatcatgctggacgaggtccagtgcacgggaaccgaggcctcactggccgactgcaagtccctgggctggctgaagagcaactgcaggcacgagagagacgctggtgtggtctgcaccaatgaaaccaggagcacccacaccctggacctctccagggagctctcggaggcccttggccagatctttgacagccagcggggctgcgacctgtccatcagcgtgaatgtgcagggcgaggacgccctgggcttctgtggccacacggtcatcctgactgccaacctggaggcccaggccctgtggaaggagccgggcagcaatgtcaccatgagtgtggatgctgagtgtgtgcccatggtcagggaccttctcaggtacttctactcccgaaggattgacatcaccctgtcgtcagtcaagtgcttccacaagctggcctctgcctatggggccaggcagctgcagggctactgcgcaagcctctttgccatcctcctcccccaggacccctcgttccagatgcccctggacctgtatgcctatgcagtggccacaggggacgccctgctggagaagctctgcctacagttcctggcctggaacttcgaggccttgacgcaggccgaggcctggcccagtgtccccacagacctgctccaactgctgctgcccaggagcgacctggcggtgcccagcgagctggccctactgaaggccgtggacacctggagctggggggagcgtgcctcccatgaggaggtggagggcttggtggagaagatccgcttccccatgatgctccctgaggagctctttgagctgcagttcaacctgtccctgtactggagccacgaggccctgttccagaagaagactctgcaggccctggaattccacactgtgcccttccagttgctggcccggtacaaaggcctgaacctcaccgaggatacctacaagccccggatttacacctcgcccacctggagtgcctttgtgacagacagttcctggagtgcacggaagtcacaactggtctatcagtccagacgggggcctttggtcaaatattcttctgattacttccaagccccctctgactacagatactacccctaccagtccttccagactccacaacaccccagcttcctcttccaggacaagagggtgtcctggtccctggtctacctccccaccatccagagctgctggaactacggcttctcctgctcctcggacgagctccctgtcctgggcctcaccaagtctggcggctcagatcgcaccattgcctacgcgatttcgagggctggaaggctgcgattcccagtgccctggacaccaacagctcgaagagcacctcctccttcccctgcccggcagggcacttcaacggcttccgcacggtcatccgccccttctacctgaccaactcctcaggtgtggactagacggcgtggcccaagggtggtgagaaccggagaaccccaggacgccctcactgcaggctcccctcctcggcttccttcctctctgcaatgaccttcaacaaccggccaccagatgtcgccctactcacctgagcgctcagcttcaagaaattactggaaggcttccactagggtccaccaggagttctcccaccacctcaccagtttccaggtggtaagcaccaggacgccctcgaggttgctctgggatccccccacagcccctggtcagtctgcccttgtcactggtctgaggtcattaaaattacattgaggttccta

SEQ ID NO: 390328 - DNA, 2056 bp, Homo sapiens
aggctgtacggtcccaagccgttaatcctgaccacgctccatactgggagaggcttctgggtcaaaggaccagtctgcagagggatcctgtggctggaagcgaggaggctccacacggccgttgcagctaccgcagccaggatctgggcatccaggcacggccatgacccctccgaggctcttctgggtgtggctgctggttgcaggaacccaaggcgtgaacgatggtgacatgcggctggccgatgggggcgccaccaaccagggccgcgtggagatcttctacagaggccagtggggcactgtgtgtgacaacctgtgggacctgactgatgccagcgtcgtctgccgggccctgggcttcgagaacgccacccaggctctgggcagagctgccttcgggcaaggatcaggccccatcatgctggacgaggtccagtgcacgggaaccgaggcctcactggccgactgcaagtccctgggctggctgaagagcaactgcaggcacgagagagacgctggtgtggtctgcaccaatgaaaccaggagcacccacaccctggacctctccagggagctctcggaggcccttggccagatctttgacagccagcggggctgcgacctgtccatcagcgtgaatgtgcagggcgaggacgccctgggcttctgtggccacacggtcatcctgactgccaacctggaggcccaggccctgtggaaggagccgggcagcaatgtcaccatgagtgtggatgctgagtgtgtgcccatggtcagggaccttctcaggtacttctactcccgaaggattgacatcaccctgtcgtcagtcaagtgcttccacaagctggcctctgcctatggggccaggcagctgcagggctactgcgcaagcctctttgccatcctcctcccccaggacccctcgttccagatgcccctggacctgtatgcctatgcagtggccacaggggacgccctgctggagaagctctgcctacagttcctggcctggaacttcgaggccttgacgcaggccgaggcctggcccagtgtccccacagacctgctccaactgctgctgcccaggagcgacctggcggtgcccagcgagctggccctactgaaggccgtggacacctggagctggggggagcgtgcctcccatgaggaggtggagggcttggtggagaagatccgcttccccatgatgctccctgaggagctctttgagctgcagttcaacctgtccctgtactggagccacgaggccctgttccagaagaagactctgcaggccctggaattccacactgtgcccttccagttgctggcccggtacaaaggcctgaacctcaccgaggatacctacaagccccggatttacacctcgcccacctggagtgcctttgtgacagacagttcctggagtgcacggaagtcacaactggtctatcagtccagacgggggcctttggtcaaatattcttctgattacttccaagccccctctgactacagatactacccctaccagtccttccagactccacaacaccccagcttcctcttccaggacaagagggtgtcctggtccctggtctacctccccaccatccagagctgctggaactacggcttctcctgctcctcggacgaggcagggcacttcaacggcttccgcacggtcatccgccccttctacctgaccaactcctcaggtgtggactagacggcgtggcccaagggtggtgagaaccggagaaccccaggacgccctcactgcaggctcccctcctcggcttccttcctctctgcaatgaccttcaacaaccggccaccagatgtcgccctactcacctgagcgctcagcttcaagaaattactggaaggcttccactagggtccaccaggagttctcccaccacctcaccagtttccaggtggtaagcaccaggacgccctcgaggttgctctgggatccccccacagcccctggtcagtctgcccttgtcactggtctgaggtcattaaaattacattgaggttccta

SEQ ID NO: 390329 - DNA, 2376 bp, Homo sapiens
ccacgcgtcgccacgcgtcgcccacgcgtccgcggacgcgtgggcttctgggtcaaaggaccagtctgcagagggatcctgtggctggaagcgaggaggctccacacggccgttgcagctaccgcagccaggatctgggcatccaggcacggccatgacccctccgaggctcttctgggtgtggctgctggttgcaggaacccaaggtgagctgagcccctgggaaataccaaaagcagaagtgtggaaggctggtgcaccctggggctgctcagagcttcaaggagatattctgcctggggcccggggcccagcggttagccagatcttctctcctgcttgaagcaccgcgtgaacgatggtgacatgcggctggccgatgggggcgccaccaaccagggccgcgtggagatcttctacagaggccagtggggcactgtgtgtgacaacctgtgggacctgactgatgccagcgtcgtctgccgggccctgggcttcgagaacgccacccaggctctgggcagagctgccttcgggcaaggatcaggccccatcatgctggacgaggtccagtgcacgggaaccgaggcctcactggccgactgcaagtccctgggctggctgaagagcaactgcaggcacgagagagacgctggtgtggtctgcaccaatgaaaccaggagcacccacaccctggacctctccagggagctctcggaggcccttggccagatctttgacagccagcggggctgcgacctgtccatcagcgtgaatgtgcagggcgaggacgccctgggcttctgtggccacacggtcatcctgactgccaacctggaggcccaggccctgtggaaggagccgggcagcaatgtcaccatgagtgtggatgctgagtgtgtgcccatggtcagggaccttctcaggtacttctactcccgaaggattgacatcaccctgtcgtcagtcaagtgcttccacaagctggcctctgcctatggggccaggcagctgcagggctactgcgcaagcctctttgccatcctcctcccccaggacccctcgttccagatgcccctggacctgtatgcctatgcagtggccacaggggacgccctgctggagaagctctgcctacagttcctggcctggaacttcgaggccttgacgcaggccgaggcctggcccagtgtccccacagacctgctccaactgctgctgcccaggagcgacctggcggtgcccagcgagctggccctactgaaggccgtggacacctggagctggggggagcgtgcctcccatgaggaggtggagggcttggtggagaagatccgcttccccatgatgctccctgaggagctctttgagctgcagttcaacctgtccctgtactggagccacgaggccctgttccagaagaagactctgcaggccctggaattccacactgtgcccttccagttgctggcccggtacaaaggcctgaacctcaccgaggatacctacaagccccggatttacacctcgcccacctggagtgcctttgtgacagacagttcctggagtgcacggaagtcacaactggtctatcagtccagacgggggcctttggtcaaatattcttctgattacttccaagccccctctgactacagatactacccctaccagtccttccagactccacaacaccccagcttcctcttccaggacaagagggtgtcctggtccctggtctacctccccaccatccagagctgctggaactacggcttctcctgctcctcggacgagctccctgtcctgggcctcaccaagtctggcggctcagatcgcaccattgcctacgaaaacaaagccctgatgctctgcgaagggctcttcgtggcagacgtcaccgatttcgagggctggaaggctgcgattcccagtgccctggacaccaacagctcgaagagcacctcctccttcccctgcccggcagggcacttcaacggcttccgcacggtcatccgccccttctacctgaccaactcctcaggtgtggactagacggcgtggcccaagggtggtgagaaccggagaaccccaggacgccctcactgcaggctcccctcctcggcttccttcctctctgcaatgaccttcaacaaccggccaccagatgtcgccctactcacctgagcgctcagcttcaagaaattactggaaggcttccactagggtccaccaggagttctcccaccacctcaccagtttccaggtggtaagcaccaggacgccctcgaggttgctctgggatccccccacagcccctggtcagtctgcccttgtcactggtctgaggtcattaaaattacattgaggttccta

SEQ ID NO: 390330 - DNA, 1830 bp, Homo sapiens
aggctgtacggtcccaagccgttaatcctgaccacgctccatactgggagaggcttctgggtcaaaggaccagtctgcagagggatcctgtggctggaagcgaggaggctccacacggccgttgcagctaccgcagccaggatctgggcatccaggcacggccatgacccctccgaggctcttctgggtgtggctgctggttgcaggaacccaaggcgtgaacgatggtgacatgcggctggccgatgggggcgccaccaaccagggccgcgtggagatcttctacagaggccagtggggcactgtgtgtgacaacctgtgggacctgactgatgccagcgtcgtctgccgggccctgggcttcgagaacgccacccaggctctgggcagagctgccttcgggcaaggatcaggccccatcatgctggacgaggtccagtgcacgggaaccgaggcctcactggccgactgcaagtccctgggctggctgaagagcaactgcaggcacgagagagacgctggtgtggtctgcaccaatgaaaccaggagcacccacaccctggacctctccagggagctctcggaggcccttggccagatctttgacagccagcggggctgcgacctgtccatcagcgtgaatgtgcagggcgaggacgccctgggcttctgtggccacacggtcatcctgactgccaacctggaggcccaggccctgtggaaggagccgggcagcaatgtcaccatgagtgtggatgctgagtgtgtgcccatggtcagggaccttctcaggtacttctactcccgaaggattgacatcaccctgtcgtcagtcaagtgcttccacaagctggcctctgcctatggggccaggcagctgcagggctactgcgcaagcctctttgccatcctcctcccccaggacccctcgttccagatgcccctggacctgtatgcctatgcagtggccacaggggacgccctgctggagaagctctgcctacagttcctggcctggaacttcgaggccttgacgcaggccgaggcctggcccagtgtccccacagacctgctccaactgctgctgcccaggagcgacctggcggtgcccagcgagctggccctactgaaggccgtggacacctggagctggggggagcgtgcctcccatgaggaggtggagggcttggtggagaagatccgcttccccatgatgctccctgaggagctctttgagctgcagttcaacctgtccctgtactggagccacgaggccctgttccagaagaagactctgcaggccctggaattccacactgtgcccttccagttgctggcccggtacaaaggcctgaacctcaccgaggatacctacaagccccggatttacacctcgcccacctggagtgcctttgtgacagacagttcctggagtgcacggaagtcacaactggtctatcagtccagacgggggcctttggtcaaatattcttctgattacttccaagccccctctgactacagatactacccctaccagtccttccagactccacaacaccccagcttcctcttccaggacaagagggtgtcctggtccctggtctacctccccaccatccagagctgctggaactacggcttctcctgctcctcggacgagctccctgtcctgggcctcaccaagtctggcggctcagatcgcaccattgcctacgaaaacaaagccctgatgctctgcgaagggctcttcgtggcagacgtcacagcccctggtcagtctgcccttgtcactggtctgaggtcattaaaattacattgaggttccta

SEQ ID NO: 390331 - DNA, 2363 bp, Homo sapiens
aggctgtacggtcccaagccgttaatcctgaccacgctccatactgggagaggcttctgggtcaaaggaccagtctgcagagggatcctgtggctggaagcgaggaggctccacacggccgttgcagctaccgcagccaggatctgggcatccaggcacggccatgacccctccgaggctcttctgggtgtggctgctggttgcaggaacccaaggcgtgaacgatggtgacatgcggctggccgatgggggcgccaccaaccagggccgcgtggagatcttctacagaggccagtggggcactgtgtgtgacaacctgtgggacctgactgatgccagcgtcgtctgccgggccctgggcttcgagaacgccacccaggctctgggcagagctgccttcgggcaaggatcaggccccatcatgctggacgaggtccagtgcacgggaaccgaggcctcactggccgactgcaagtccctgggctggctgaagagcaactgcaggcacgagagagacgctggtgtggtctgcaccaatggagccttccagagtgaatgaggcagccacaaatccctcactttcagatgaagacactgaccccagagagtggcagtgccccggctcctaacgcagcccacttccctcccgccccttcttagaaaccaggagcacccacaccctggacctctccagggagctctcggaggcccttggccagatctttgacagccagcggggctgcgacctgtccatcagcgtgaatgtgcagggcgaggacgccctgggcttctgtggccacacggtcatcctgactgccaacctggaggcccaggccctgtggaaggagccgggcagcaatgtcaccatgagtgtggatgctgagtgtgtgcccatggtcagggaccttctcaggtacttctactcccgaaggattgacatcaccctgtcgtcagtcaagtgcttccacaagctggcctctgcctatggggccaggcagctgcagggctactgcgcaagcctctttgccatcctcctcccccaggacccctcgttccagatgcccctggacctgtatgcctatgcagtggccacaggggacgccctgctggagaagctctgcctacagttcctggcctggaacttcgaggccttgacgcaggccgaggcctggcccagtgtccccacagacctgctccaactgctgctgcccaggagcgacctggcggtgcccagcgagctggccctactgaaggccgtggacacctggagctggggggagcgtgcctcccatgaggaggtggagggcttggtggagaagatccgcttccccatgatgctccctgaggagctctttgagctgcagttcaacctgtccctgtactggagccacgaggccctgttccagaagaagactctgcaggccctggaattccacactgtgcccttccagttgctggcccggtacaaaggcctgaacctcaccgaggatacctacaagccccggatttacacctcgcccacctggagtgcctttgtgacagacagttcctggagtgcacggaagtcacaactggtctatcagtccagacgggggcctttggtcaaatattcttctgattacttccaagccccctctgactacagatactacccctaccagtccttccagactccacaacaccccagcttcctcttccaggacaagagggtgtcctggtccctggtctacctccccaccatccagagctgctggaactacggcttctcctgctcctcggacgagctccctgtcctgggcctcaccaagtctggcggctcagatcgcaccattgcctacgaaaacaaagccctgatgctctgcgaagggctcttcgtggcagacgtcaccgatttcgagggctggaaggctgcgattcccagtgccctggacaccaacagctcgaagagcacctcctccttcccctgcccggcagggcacttcaacggcttccgcacggtcatccgccccttctacctgaccaactcctcaggtgtggactagacggcgtggcccaagggtggtgagaaccggagaaccccaggacgccctcactgcaggctcccctcctcggcttccttcctctctgcaatgaccttcaacaaccggccaccagatgtcgccctactcacctgagcgctcagcttcaagaaattactggaaggcttccactagggtccaccaggagttctcccaccacctcaccagtttccaggtggtaagcaccaggacgccctcgaggttgctctgggatccccccacagcccctggtcagtctgcccttgtcactggtctgaggtcattaaaattacattgaggttccta

SEQ ID NO: 390332 - DNA, 1740 bp, Homo sapiens
  misc_feature (3)..(3): n is a, c, g, or t
  misc_feature (25)..(25): n is a, c, g, or t
  misc_feature (37)..(37): n is a, c, g, or t
tanggctagtacgaggctgggttgnatcggccgaggnaaaccaggagcacccacaccctggacctctccagggagctctcggaggcccttggccagatctttgacagccagcggggctgcgacctgtccatcagcgtgaatgtgcagggcgaggacgccctgggcttctgtggccacacggtcatcctgactgccaacctggaggcccaggccctgtggaaggagccgggcagcaatgtcaccatgagtgtggatgctgagtgtgtgcccatggtcagggaccttctcaggtacttctactcccgaaggattgacatcaccctgtcgtcagtcaagtgcttccacaagctggcctctgcctatggggccaggcagctgcagggctactgcgcaagcctctttgccatcctcctcccccaggacccctcgttccagatgcccctggacctgtatgcctatgcagtggccacaggggacgccctgctggagaagctctgcctacagttcctggcctggaacttcgaggccttgacgcaggccgaggcctggcccagtgtccccacagacctgctccaactgctgctgcccaggagcgacctggcggtgcccagcgagctggccctactgaaggccgtggacacctggagctggggggagcgtgcctcccatgaggaggtggagggcttggtggagaagatccgcttccccatgatgctccctgaggagctctttgagctgcagttcaacctgtccctgtactggagccacgaggccctgttccagaagaagactctgcaggccctggaattccacactgtgcccttccagttgctggcccggtacaaaggcctgaacctcaccgaggatacctacaagccccggatttacacctcgcccacctggagtgcctttgtgacagacagttcctggagtgcacggaagtcacaactggtctatcagtccagacgggggcctttggtcaaatattcttctgattacttccaagccccctctgactacagatactacccctaccagtccttccagactccacaacaccccagcttcctcttccaggacaagagggtgtcctggtccctggtctacctccccaccatccagagctgctggaactacggcttctcctgctcctcggacgagctccctgtcctgggcctcaccaagtctggcggctcagatcgcaccattgcctacgaaaacaaagccctgatgctctgcgaagggctcttcgtggcagacgtcaccgatttcgagggctggaaggctgcgattcccagtgccctggacaccaacagctcgaagagcacctcctccttcccctgcccggcagggcacttcaacggcttccgcacggtcatccgccccttctacctgaccaactcctcaggtgtggactagacggcgtggcccaagggtggtgagaaccggagaaccccaggacgccctcactgcaggctcccctcctcggcttccttcctctctgcaatgaccttcaacaaccggccaccagatgtcgccctactcacctgagcgctcagcttcaagaaattactggaaggcttccactagggtccaccaggagttctcccaccacctcaccagtttccaggtggtaagcaccaggacgccctcgaggttgctctgggatccccccacagcccctggtcagtctgcccttgtcactggtctgaggtcattaaaattacattgaggttccta

SEQ ID NO: 390333 - DNA, 1989 bp, Homo sapiens
aggctgtacggtcccaagccgttaatcctgaccacgctccatactgggagaggcttctgggtcaaaggaccagtctgcagagggatcctgtggctggaagcgaggaggctccacacggccgttgcagctaccgcagccaggatctgggcatccaggcacggccatgacccctccgaggctcttctgggtgtggctgctggttgcaggaacccaaggcgtgaacgatggtgacatgcggctggccgatgggggcgccaccaaccagggccgcgtggagatcttctacagaggccagtggggcactgtgtgtgacaacctgtgggacctgactgatgccagcgtcgtctgccgggccctgggcttcgagaacgccacccaggctctgggcagagctgccttcgggcaaggatcaggccccatcatgctggacgaggtccagtgcacgggaaccgaggcctcactggccgactgcaagtccctgggctggctgaagagcaactgcaggcacgagagagacgctggtgtggtctgcaccaatggtacttctactcccgaaggattgacatcaccctgtcgtcagtcaagtgcttccacaagctggcctctgcctatggggccaggcagctgcagggctactgcgcaagcctctttgccatcctcctcccccaggacccctcgttccagatgcccctggacctgtatgcctatgcagtggccacaggggacgccctgctggagaagctctgcctacagttcctggcctggaacttcgaggccttgacgcaggccgaggcctggcccagtgtccccacagacctgctccaactgctgctgcccaggagcgacctggcggtgcccagcgagctggccctactgaaggccgtggacacctggagctggggggagcgtgcctcccatgaggaggtggagggcttggtggagaagatccgcttccccatgatgctccctgaggagctctttgagctgcagttcaacctgtccctgtactggagccacgaggccctgttccagaagaagactctgcaggccctggaattccacactgtgcccttccagttgctggcccggtacaaaggcctgaacctcaccgaggatacctacaagccccggatttacacctcgcccacctggagtgcctttgtgacagacagttcctggagtgcacggaagtcacaactggtctatcagtccagacgggggcctttggtcaaatattcttctgattacttccaagccccctctgactacagatactacccctaccagtccttccagactccacaacaccccagcttcctcttccaggacaagagggtgtcctggtccctggtctacctccccaccatccagagctgctggaactacggcttctcctgctcctcggacgagctccctgtcctgggcctcaccaagtctggcggctcagatcgcaccattgcctacgaaaacaaagccctgatgctctgcgaagggctcttcgtggcagacgtcaccgatttcgagggctggaaggctgcgattcccagtgccctggacaccaacagctcgaagagcacctcctccttcccctgcccggcagggcacttcaacggcttccgcacggtcatccgccccttctacctgaccaactcctcaggtgtggactagacggcgtggcccaagggtggtgagaaccggagaaccccaggacgccctcactgcaggctcccctcctcggcttccttcctctctgcaatgaccttcaacaaccggccaccagatgtcgccctactcacctgagcgctcagcttcaagaaattactggaaggcttccactagggtccaccaggagttctcccaccacctcaccagtttccaggtggtaagcaccaggacgccctcgaggttgctctgggatccccccacagcccctggtcagtctgcccttgtcactggtctgaggtcattaaaattacattgaggttccta

SEQ ID NO: 390334 - DNA, 1568 bp, Homo sapiens
aggctgtacggtcccaagccgttaatcctgaccacgctccatactgggagaggcttctgggtcaaaggaccagtctgcagagggatcctgtggctggaagcgaggaggctccacacggccgttgcagctaccgcagccaggatctgggcatccaggcacggccatgacccctccgaggctcttctgggtgtggctgctggttgcaggaacccaaggcgtgaacgatggtgacatgcggctggccgatgggggcgccaccaaccagggccgcgtggagatcttctacagaggccagtggggcactgtgtgtgacaacctgtgggacctgactgatgccagcgtcgtctgccgggccctgggcttcgagaacgccacccaggctctgggcagagctgccttcgggcaaggatcaggccccatcatgctggacgaggtccagtgcacgggaaccgaggcctcactggccgactgcaagtccctgggctggctgaagagcaactgcaggcacgagagagacgctggtgtggtctgcaccaatgaaaccaggagcacccacaccctggacctctccagggagctctcggaggcccttggccagatctttgacagccagcggggctgcgacctgtccatcagcgtgaatgtgcagggcgaggacgccctgggcttctgtggccacacggtcatcctgactgccaacctggaggcccaggccctgtggaaggagccgggcagcaatgtcaccatgagtgtggatgctgagtgtgtgcccatggtcagggaccttctcaggtacttctactcccgaaggattgacatcaccctgtcgtcagtcaagtgcttccacaagctggcctctgcctatggggccaggcagctgcagggctactgcgcaagcctctttgccatcctcctcccccaggacccctcgttccagatgcccctggacctgtatgcctatgcagtggccacaggggacgccctgctggagaagctctgcctacagttcctggcctggaacttcgaggccttgacgcaggccgaggcctggcccagtgtccccacagacctgctccaactgctgctgcccaggagcgacctggcggtgcccagcgagctggccctactgaaggccgtggacacctggagctggggggagcgtgcctcccatgaggaggtggagggcttggtggagaagatccgcttccccatgatgctccctgaggagctctttgagctgcagttcaacctgtccctgtactggagccacgaggccctgttccagaagaagactctgcaggccctggaattccacactgtgcccttccagttgctggcccggtacaaaggcctgaacctcaccgaggatacctacaagccccggatttacacctcgcccacctggagtgcctttgtgacagacagttcctggagtgcacggaagtcacaactggtctatcagtccagacgggggcctttggtcaaatattcttctgattacttccaagccccctctgactacagatactaccccttcaatgataaacgcacctcatttaatgataacg

SEQ ID NO: 390335 - DNA, 2033 bp, Homo sapiens
  misc_feature (1805)..(1805): n is a, c, g, or t
  misc_feature (1953)..(1953): n is a, c, g, or t
  misc_feature (1956)..(1956): n is a, c, g, or t
  misc_feature (1965)..(1965): n is a, c, g, or t
  misc_feature (1975)..(1975): n is a, c, g, or t
aggctgtacggtcccaagccgttaatcctgaccacgctccatactgggagaggcttctgggtcaaaggaccagtctgcagagggatcctgtggctggaagcgaggaggctccacacggccgttgcagctaccgcagccaggatctgggcatccaggcacggccatgacccctccgaggctcttctgggtgtggctgctggttgcaggaacccaaggcgtgaacgatggtgacatgcggctggccgatgggggcgccaccaaccagggccgcgtggagatcttctacagaggccagtggggcactgtgtgtgacaacctgtgggacctgactgatgccagcgtcgtctgccgggccctgggcttcgagaacgccacccaggctctgggcagagctgccttcgggcaaggatcaggccccatcatgctggacgaggtccagtgcacgggaaccgaggcctcactggccgactgcaagtccctgggctggctgaagagcaactgcaggcacgagagagacgctggtgtggtctgcaccaatgaaaccaggagcacccacaccctggacctctccagggagctctcggaggcccttggccagatctttgacagccagcggggctgcgacctgtccatcagcgtgaatgtgcagggcgaggacgccctgggcttctgtggccacacggtcatcctgactgccaacctggaggcccaggccctgtggaaggagccgggcagcaatgtcaccatgagtgtggatgctgagtgtgtgcccatggtcagggaccttctcaggtacttctactcccgaaggattgacatcaccctgtcgtcagtcaagtgcttccacaagctggcctctgcctatggggccaggcagctgcagggctactgcgcaagcctctttgccatcctcctcccccaggacccctcgttccagatgcccctggacctgtatgcctatgcagtggccacaggggacgccctgctggagaagctctgcctacagttcctggcctggaacttcgaggccttgacgcaggccgaggcctggcccagtgtccccacagacctgctccaactgctgctgcccaggagcgacctggcggtgcccagcgagctggccctactgaaggccgtggacacctggagctggggggagcgtgcctcccatgaggaggtggagggcttggtggagaagatccgcttccccatgatgctccctgaggagctctttgagctgcagttcaacctgtccctgtactggagccacgaggccctgttccagaagaagactctgcaggccctggaattccacactgtgcccttccagttgctggcccggtacaaaggcctgaacctcaccgaggatacctacaagccccggatttacacctcgcccactggaactacggcttctcctgctcctcggacgagctccctgtcctgggcctcaccaagtctggcggctcagatcgcaccattgcctacgaaaacaaagccctgatgctctgcgaagggctcttcgtggcagacgtcaccgatttcgagggctggaaggctgcgattcccagtgccctggacaccaacagctcgaagagcacctcctccttcccctgcccggcagggcacttcaacggcttccgcacggtcatccgccccttctacctgaccaactcctcaggttccctcggcgtgtgcaacacgccgaaagcccatacgacgagagccctggctctttggggaggaacacacccgactcatccgagaagccatcagagggcgctatggcctcctgccatattggnattctctgttctaccatgcacacgtggcttcccaacctgtaatgaggtaaaaaagcttcatccattcagggaccccagcaacaaatctgtaatagaagatctcagtgattaaagaatgcaataattacagtgatttcaagagaaaggngangaaaagctncatgtttaancaagtttcaataagcttattgagcagcacggtgaacagggtgctggcttgttgggcct

SEQ ID NO: 390336 - DNA, 1600 bp, Homo sapiens
ctcgtatatctgtactgctgagccccgtaggtcagggcccacattatatttggtcatcattctctctcaagtgcctagcccaatgcctggcatgtagtacatagttcaatagaatagttttttgaatagaaaaaaaaaaaagcaatgaatgatatgattaaatagaaggattgacatcaccctgtcgtcagtcaagtgcttccacaagctggcctctgcctatggggccaggcagctgcagggctactgcgcaagcctctttgccatcctcctcccccaggacccctcgttccagatgcccctggacctgtatgcctatgcagtggccacaggggacgccctgctggagaagctctgcctacagttcctggcctggaacttcgaggccttgacgcaggccgaggcctggcccagtgtccccacagacctgctccaactgctgctgcccaggagcgacctggcggtgcccagcgagctggccctactgaaggccgtggacacctggagctggggggagcgtgcctcccatgaggaggtggagggcttggtggagaagatccgcttccccatgatgctccctgaggagctctttgagctgcagttcaacctgtccctgtactggagccacgaggccctgttccagaagaagactctgcaggccctggaattccacactgtgcccttccagttgctggcccggtacaaaggcctgaacctcaccgaggatacctacaagccccggatttacacctcgcccacctggagtgcctttgtgacagacagttcctggagtgcacggaagtcacaactggtctatcagtccagacgggggcctttggtcaaatattcttctgattacttccaagccccctctgactacagatactacccctaccagtccttccagactccacaacaccccagcttcctcttccaggacaagagggtgtcctggtccctggtctacctccccaccatccagagctgctggaactacggcttctcctgctcctcggacgagctccctgtcctgggcctcaccaagtctggcggctcagatcgcaccattgcctacgaaaacaaagccctgatgctctgcgaagggctcttcgtggcagacgtcaccgatttcgagggctggaaggctgcgattcccagtgccctggacaccaacagctcgaagagcacctcctccttcccctgcccggcagggcacttcaacggcttccgcacggtcatccgccccttctacctgaccaactcctcaggtgtggactagacggcgtggcccaagggtggtgagaaccggagaaccccaggacgccctcactgcaggctcccctcctcggcttccttcctctctgcaatgaccttcaacaaccggccaccagatgtcgccctactcacctgagcgctcagcttcaagaaattactggaaggcttccactagggtccaccaggagttctcccaccacctcaccagtttccaggtggtaagcaccaggacgccctcgaggttgctctgggatccccccacagcccctggtcagtctgcccttgtcactggtctgaggtcattaaaattacattgaggttccta

SEQ ID NO: 390337 - DNA, 1618 bp, Homo sapiens
aggctgtacggtcccaagccgttaatcctgaccacgctccatactgggagaggcttctgggtcaaaggaccagtctgcagagggatcctgtggctggaagcgaggaggctccacacggccgttgcagctaccgcagccaggatctgggcatccaggcacggccatgacccctccgaggctcttctgggtgtggctgctggttgcaggaacccaaggcgtgaacgatggtgacatgcggctggccgatgggggcgccaccaaccagggccgcgtggagatcttctacagaggccagtggggcactgtgtgtgacaacctgtgggacctgtatgcctatgcagtggccacaggggacgccctgctggagaagctctgcctacagttcctggcctggaacttcgaggccttgacgcaggccgaggcctggcccagtgtccccacagacctgctccaactgctgctgcccaggagcgacctggcggtgcccagcgagctggccctactgaaggccgtggacacctggagctggggggagcgtgcctcccatgaggaggtggagggcttggtggagaagatccgcttccccatgatgctccctgaggagctctttgagctgcagttcaacctgtccctgtactggagccacgaggccctgttccagaagaagactctgcaggccctggaattccacactgtgcccttccagttgctggcccggtacaaaggcctgaacctcaccgaggatacctacaagccccggatttacacctcgcccacctggagtgcctttgtgacagacagttcctggagtgcacggaagtcacaactggtctatcagtccagacgggggcctttggtcaaatattcttctgattacttccaagccccctctgactacagatactacccctaccagtccttccagactccacaacaccccagcttcctcttccaggacaagagggtgtcctggtccctggtctacctccccaccatccagagctgctggaactacggcttctcctgctcctcggacgagctccctgtcctgggcctcaccaagtctggcggctcagatcgcaccattgcctacgaaaacaaagccctgatgctctgcgaagggctcttcgtggcagacgtcaccgatttcgagggctggaaggctgcgattcccagtgccctggacaccaacagctcgaagagcacctcctccttcccctgcccggcagggcacttcaacggcttccgcacggtcatccgccccttctacctgaccaactcctcaggtgtggactagacggcgtggcccaagggtggtgagaaccggagaaccccaggacgccctcactgcaggctcccctcctcggcttccttcctctctgcaatgaccttcaacaaccggccaccagatgtcgccctactcacctgagcgctcagcttcaagaaattactggaaggcttccactagggtccaccaggagttctcccaccacctcaccagtttccaggtggtaagcaccaggacgccctcgaggttgctctgggatccccccacagcccctggtcagtctgcccttgtcactggtctgaggtcattaaaattacattgaggttccta

SEQ ID NO: 390338 - DNA, 1125 bp, Homo sapiens
acgctctctctgtgggggacgctctctctgagctggggggagcgtgcctcccatgaggaggtggagggcttggtggagaagatccgcttccccatgatgctccctgaggagctctttgagctgcagttcaacctgtccctgtactggagccacgaggccctgttccagaagaagactctgcaggccctggaattccacactgtgcccttccagttgctggcccggtacaaaggcctgaacctcaccgaggatacctacaagccccggatttacacctcgcccacctggagtgcctttgtgacagacagttcctggagtgcacggaagtcacaactggtctatcagtccagacgggggcctttggtcaaatattcttctgattacttccaagccccctctgactacagatactacccctaccagtccttccagactccacaacaccccagcttcctcttccaggacaagagggtgtcctggtccctggtctacctccccaccatccagagctgctggaactacggcttctcctgctcctcggacgagctccctgtcctgggcctcaccaagtctggcggctcagatcgcaccattgcctacgaaaacaaagccctgatgctctgcgaagggctcttcgtggcagacgtcaccgatttcgagggctggaaggctgcgattcccagtgccctggacaccaacagctcgaagagcacctcctccttcccctgcccggcagggcacttcaacggcttccgcacggtcatccgccccttctacctgaccaactcctcaggtgtggactagacggcgtggcccaagggtggtgagaaccggagaaccccaggacgccctcactgcaggctcccctcctcggcttccttcctctctgcaatgaccttcaacaaccggccaccagatgtcgccctactcacctgagcgctcagcttcaagaaattactggaaggcttccactagggtccaccaggagttctcccaccacctcaccagtttccaggtggtaagcaccaggacgccctcgaggttgctctgggatccccccacagcccctggtcagtctgcccttgtcactggtctgaggtcattaaaattacattgaggttccta

SEQ ID NO: 390339 - DNA, 1102 bp, Homo sapiens
ggtgatctagcgatcccttgctgaatggcatgaggaggtggagggcttggtggagaagatccgcttccccatgatgctccctgaggagctctttgagctgcagttcaacctgtccctgtactggagccacgaggccctgttccagaagaagactctgcaggccctggaattccacactgtgcccttccagttgctggcccggtacaaaggcctgaacctcaccgaggatacctacaagccccggatttacacctcgcccacctggagtgcctttgtgacagacagttcctggagtgcacggaagtcacaactggtctatcagtccagacgggggcctttggtcaaatattcttctgattacttccaagccccctctgactacagatactacccctaccagtccttccagactccacaacaccccagcttcctcttccaggacaagagggtgtcctggtccctggtctacctccccaccatccagagctgctggaactacggcttctcctgctcctcggacgagctccctgtcctgggcctcaccaagtctggcggctcagatcgcaccattgcctacgaaaacaaagccctgatgctctgcgaagggctcttcgtggcagacgtcaccgatttcgagggctggaaggctgcgattcccagtgccctggacaccaacagctcgaagagcacctcctccttcccctgcccggcagggcacttcaacggcttccgcacggtcatccgccccttctacctgaccaactcctcaggtgtggactagacggcgtggcccaagggtggtgagaaccggagaaccccaggacgccctcactgcaggctcccctcctcggcttccttcctctctgcaatgaccttcaacaaccggccaccagatgtcgccctactcacctgagcgctcagcttcaagaaattactggaaggcttccactagggtccaccaggagttctcccaccacctcaccagtttccaggtggtaagcaccaggacgccctcgaggttgctctgggatccccccacagcccctggtcagtctgcccttgtcactggtctgaggtcattaaaattacattgaggttccta

SEQ ID NO: 390340 - DNA, 1050 bp, Homo sapiens
  misc_feature (3)..(3): n is a, c, g, or t
  misc_feature (25)..(25): n is a, c, g, or t
  misc_feature (37)..(37): n is a, c, g, or t
tanggctagtacgaggctgggttgnatcggccgaggntctttgagctgcagttcaacctgtccctgtactggagccacgaggccctgttccagaagaagactctgcaggccctggaattccacactgtgcccttccagttgctggcccggtacaaaggcctgaacctcaccgaggatacctacaagccccggatttacacctcgcccacctggagtgcctttgtgacagacagttcctggagtgcacggaagtcacaactggtctatcagtccagacgggggcctttggtcaaatattcttctgattacttccaagccccctctgactacagatactacccctaccagtccttccagactccacaacaccccagcttcctcttccaggacaagagggtgtcctggtccctggtctacctccccaccatccagagctgctggaactacggcttctcctgctcctcggacgagctccctgtcctgggcctcaccaagtctggcggctcagatcgcaccattgcctacgaaaacaaagccctgatgctctgcgaagggctcttcgtggcagacgtcaccgatttcgagggctggaaggctgcgattcccagtgccctggacaccaacagctcgaagagcacctcctccttcccctgcccggcagggcacttcaacggcttccgcacggtcatccgccccttctacctgaccaactcctcaggtgtggactagacggcgtggcccaagggtggtgagaaccggagaaccccaggacgccctcactgcaggctcccctcctcggcttccttcctctctgcaatgaccttcaacaaccggccaccagatgtcgccctactcacctgagcgctcagcttcaagaaattactggaaggcttccactagggtccaccaggagttctcccaccacctcaccagtttccaggtggtaagcaccaggacgccctcgaggttgctctgggatccccccacagcccctggtcagtctgcccttgtcactggtctgaggtcattaaaattacattgaggttccta

SEQ ID NO: 390341 - DNA, 978 bp, Homo sapiens
aggctgtacggtcccaagccgttaatcctgaccacgctccatactgggagaggcttctgggtcaaaggaccagtctgcagagggatcctgtggctggaagcgaggaggctccacacggccgttgcagctaccgcagccaggatctgggcatccaggcacggccatgacccctccgaggctcttctgggtgtggctgctggttgcaggaacccaaggcgtgaacgatggtgacatgcggctggccgatgggggcgccaccaaccagggccgcgtggagatcttctacagaggccagtggggcactgtgtgtgacaacctgtgggacctgactgatgccagcgtcgtctgccgggccctgggcttcgagaacgccacccaggctctgggcagagctgccttcgggcaaggatcaggccccatcatgctggacgaggtccagtgcacgggaaccgaggcctcactggccgactgcaagtccctgggctggctgaagagcaactgcaggcacgagagagacgctggtgtggtctgcaccaatggtacttctactcccgaaggattgacatcaccctgtcgtcagtcaagtgcttccacaagctggcctctgcctatggggccaggcagctgcagggctactgcgcaagcctctttgccatcctcctcccccaggacccctcgttccagatgcccctggacctgtatgcctatgcagtggccacaggggacgccctgctggagaagctctgcctacagttcctggcctggaacttcgaggccttgacgcaggccgaggcctggcccagtgtccccacagacctgctccaactgctaccgcagccaggatctgggcatccaggcacggccatgacccctccgaggctcttctgggtgtggctgctggttgcaggaacccacagcccctggtcagtctgcccttgtcactggtctgaggtcattaaaattacattgaggttccta

SEQ ID NO: 390342 - DNA, 441 bp, Homo sapiens
ccacgcgtcgccacgcgtcgcccacgcgtccgcggacgcgtgggcttctgggtcaaaggaccagtctgcagagggatcctgtggctggaagcgaggaggctccacacggccgttgcagctaccgcagccaggatctgggcatccaggcacggccatgacccctccgaggctcttctgggtgtggctgctggttgcaggaacccaaggtgagctgagcccctgggaaataccaaaagcagaagtgtggaaggctggtgcaccctggggctgctcagagcttcaaggagatattctgcctggggcccggggcccagcggttagccagatcttctctcctgcttgaagcaccaggtatccccagtgatgatgacttggaggttcccgggggctcacctgggttcaggtgagatgcaggttatagagaggacactagggaatcct

SEQ ID NO: 390343 - DNA, 454 bp, Homo sapiens
cctgaactcaatctacaatccaagaaagagctgcaccagtgactaaaagatctgtgaacaagaaaaataaaatgtattgtaagccactgatattttgaggttagcatgcagcaaaactaactaatacgctctccatcaatatatgtgtgaacaaattagtaaacctacataaagaaaaatcatacagactttaaatgttgtggatttatggccgggagcagtggctcacgcctgtaatcccagcactttgggaggcccaggcaggcagatcacaaggtcaggagatcaagaccatcctgactaacatggtgaaaccccgtctctactaaaaatacaaaaaattagccaggcgtggtggcaggcgcctgtagtcccagctacttgggaggctaaggcaggagaatggcgtgaacctgggaggcagagcttgcagtgagctgagattgcgccactg

SEQ ID NO: 390344 - DNA, 433 bp, Homo sapiens
catacagtaatttccaatataaacctcactcaaaattacagtcacatgctgcacaaaccagttcaatgcacatatatgatgataagattataatacaatatttttgctatactttttcctatgtttacatatacagatatcattgtgttacaattgcctttagtattcagtacagtaacatgctgtacaggtttgtagcctaggagcaatagatcatactttcaagcctaccatctagatttatataattacactctgtgatgttcgctcagtgatgaaatcacctgagaacacgtttctcagatcatatccctgttgttaagcaatgtgactgcaattgtgctctgctgccagtttatttttgaagctttatttttcaattacttactcatggcaattttataagaatcattaaacaaatttaatccagcta

SEQ ID NO: 390345 - DNA, 345 bp, Homo sapiens
ttttttttttgagatggagtttcgctctttcacccgggactagagtgaagtggcgcgatctcggctcactgcaacctccgccccccagggttcaagaagtctcctgcctcagcctctcgagtagctgggattacaggcacccaccaccatgcctggctaatatttgtatttttagtagaaatgggggtttccccatgttggccaggctggtctcgaactcctgaccacaggtgacctacccgcctcagcctccagaagtgctgggattcgaggcatgagccaccgcgccaggccataaggtcttaattctgattctgctgttttctttctgtatggctggagctg

SEQ ID NO: 390346 - DNA, 210 bp, Homo sapiens
aatgaatggttttattaggttgtgtctgatacttaagcccagcagtggttaaagatataagagcaaataaggatttaagcaaaatattatctgattaaaggttaagtccaatggcaggctaaaaaaatgaatgtagaagataagcactaaagaaactttcaggttatgtgacaattctcagcacttttgcttgtacctaaagattttaga

SEQ ID NO: 390347 - DNA, 374 bp, Homo sapiens
ctgctgttgtttcctcctgtcgtgagtcatacaactttagaactgggtaggacctttcagatcatctattttaaccccttcactttctctgaacttctcttctagcgctgtgcactcaattctcattcatgatgtgatgccttgacctcgctgaaggacaagtagaaactttatgtgccttctctaaaagtgggatttagttagaagatttggttccaatttcaccctacccgtatagacgtgctgagggacctcaggcaagaaaagttattaaggagacttttggaaaatagtatctgaaggcatgagagagagacagtttgtgctaaataaatttttctttccctttcttcccttaactatgtatttttctc

SEQ ID NO: 390348 - DNA, 361 bp, Homo sapiens
ctcatattgaacgcataaatgtgtcaaaactaacagaatcattatttaatttgcttgaactctatattgaggaaactctaaaaagccacaactgttttcttcaaagccttcactgttgggctggatggacagggcaaagggaggttgtgagaaatccagataccaaataacactggccgaagctggtcagaaaagggaatagataattaggcgtaattagcgtgtatgaatcgttgtctctctgcccttagcttgaataaattttgaagaaaaaaaccctagtggtgaaaatcctttgatgtaggaagagtcattgtggcttggcagcataaaggcagtgttttatactttttacataatg

SEQ ID NO: 390349 - DNA, 276 bp, Homo sapiens
ctccggagtcctacagaagcagtctgcttccttcagcgtgtctatgggtcctcttggtatttattgctggtttgttcttgcagttgatctggagctgaaattcacaatgcgagcctctgcatactgctctgtcgggtgctgcaatctagtcttgcctcccatccaccatgatgatcccgatccctaacatgtgtttcttatcagctagaacagcaattctcagatttttttggtctaaggatcttttatactgttcaaatgtattgacgattccaa

SEQ ID NO: 390350 - DNA, 525 bp, Homo sapiens
caaatgacaaacacttcaactctgtcaggatggcagtttgaagaaccagttgaatgtaggaagtgaaaatgtgtaagtatattcaaagatgatgccaagtttacttgacaggaaaagaggagacagcagtgctgttttagtggaatatataggaagaacaagttgaagaaggaatccattttagtattgaacgtggtggcctaacatgacccaaacctgtgtttagtattggatatgctgacttacagatgcatgaggaacacttaggtagagatatccagtaggcattgaatttgtgtatctagaccaaaggagagagactgctttagctataaattggacaatcagctctatgaaaatgatagtgttttagaaggatgagattacttaaggctaaggtgaccccgtgatttatcatctaaacaagaactcttgaaaatagaagggactgtcattaataattatactaggatagcaggctaatccaggactggccaaagcaaatcaggagacactgttgcctct

SEQ ID NO: 390351 - DNA, 312 bp, Homo sapiens
tgatgactgaagacagcatctctctttctgtttcaaaagacctagtaaagagtaatgagaaaaatttgagagggcccaggggatgcatatctatagatatttcacaccacactcaggcagcttattgtctttagttccagtaaaaatagaccattgggaacaaattcaaaatctgtggaatctggtgttaatgtgaagtgactcttgctcttgcaaagaaatatgctttagaactcttctctagaactcagatgttttatgaatggtgatgaggataatgaagctaataattataaataataatcctatgtg

SEQ ID NO: 390352 - DNA, 169 bp, Homo sapiens
cgttttaccccactttccatacttactcttgggaaggaagtcactatgcatggtccacacataaggagtggggagttatgtaacacctcgctgagggccaagtattgacatgaattatttggaatttcctgcatggggcatttgtctctgctctgataatttgtttagt

SEQ ID NO: 390353 - DNA, 3456 bp, Homo sapiens
agcgggagccaattccggccgcgccggaagtctctactgaggaaagctatgaggatactctgttcgtaagctcccggtgaattttgttccacagactcggaagaaaggttggataagagttcactggagattgacaagtactcgggatagtgaaaagccggagttggaacatggatagccgcttgcaggagatccgggagcggcagaagttacggcgacagctcctcgcgcagcagttgggagctgaaagtgccgacagcattggtgccgtgttaaatagcaaagatgagcagagagaaattgctgaaacaagagaaacttgcagggcttcctatgatacctctgctccaaatgcaaaacgtaagtatctggatgaaggagagacagatgaagacaaaatggaagaatataaggatgaactagaaatgcaacaggatgaagaaaatttgccatatgaagaagagatttacaaagattctagtacttttcttaagggaacacagagcttaaatccccataatgattactgccaacattttgtagacactggacatagacctcagaatttcatcagggatgtaggtttagctgacagatttgaagaatatcctaaactgagggagctcatcaggctaaaggatgagttaatagctaaatctaacactcctcccatgtacttacaagccgatatagaagcctttgacatcagagaactaacacccaaatttgatgtgattcttctggaaccccctttagaagaatattacagagaaactggcatcactgctaatgaaaaatgctggacttgggatgatattatgaagttagaaattgatgagattgcagcacctcgatcatttatttttctctggtgtggttctggggaggggttggaccttggaagagtgtgtttacgaaaatggggttacagaagatgtgaagatatttgttggattaaaaccaataaaaacaatcctgggaagactaagactttagatccaaaggctgtctttcagagaacaaaggaacactgcctcatggggatcaaaggaactgtgaagcgtagcacagacggggacttcattcatgctaatgttgacattgacttaattatcacagaagaacctgaaattggcaatatagaaaaacctgtagaaatttttcatataattgagcatttttgtcttggtagaagacgccttcatctatttggaagagatagtacaattcgaccaggctggctcacagttggaccaacgcttacaaatagcaactacaatgcagaaacatatgcatcctatttcagtgctcctaattcctacttgactggttgtacagaagaaattgagagacttcgaccaaaatcgcctcctcccaaatctaaatctgaccgaggaggtggagctcccagaggtggaggaagaggtggaacttctgctggccgtggacgagaaagaaatagatctaacttccgaggagaaagaggtggctttagagggggccgtggaggagcacacagaggtggctttccacctcgataattgttgaagacattgaacctattcatcctcctctaaccttctttattgtaattaaatttcaagtgggagacttaactttagaactcacttccagcttgcactttgctttaatttctctgagctgcaagaatgtcttagcgagccttgcttgcagttgtcacacacactgtctggtttttttcaggataaatgaatgattctgccttttgttatgtgcgtgaacagaatggaacaactcaagtagcttcatcttcagagactgaatttattctgatagacttcagctaattacaaaggattttgctaatttttgggaataaataatggaaaaagatccagtctgtggtatcatgctagtgctgacagggccttgatagaatagagttggaaaagatggtaagcttttgtcagggttttaacattttcttgatgaaacaataaaaagaggtaagcttttttcttctttttttttaagttttaaataaactcagatataatttgaatactgaagaaattaagagactttgaacaaaatctcttcccaaatctaaatttgataggggaggtggagattccaggggtgggtgaaagaagagatagaacttagcaggcagacttaaaaaaaaaaaaaaagttcatcatcataatctcaattttgtggctatgactcctaatcacgcttcctaagaagcaaaggaggacaaatattcatgtgctagatagcactgtggtgtggacttgaacttggattgaccttaaattttatattcctcaaataaaagagaggcagcgacaagatacctcattatcagatgcttggtttatacattttgggactaaaatacttggtgatgaaatgacatacacctttaaacttgttatggagatagtttaatgtaaaaccaactacggaaaaccctcaacttaaggatacagcttggaaattggaactgcaattgccttttattaaaaccatatggtgtgatgtttgtttttaaaattatataagactttatgctgtcacttctcttgctgtactgtaattcatgttttaaatgaatttgataatgaaattatactattatcattcttgatgaatacttttcttatttttatgatttttctaatgaaactttaaacttttgagatttgagagtctgttttctataagtagaattactgttgttacaaaatgaaaaaggactgacctaaaatcagtctcctcttttggtctgtgatggattttaatggccgttctgtgttcatgtatacctaagatgagattatattacatccaccaaagactcagtttgaagataaggaatgagtgatagaagaaataaggctgagatccttaaaagcctaattaatttaactcgcttaacccattagtactatctagtaccagaccccttttttttgctgaaattatggtatattttcaacttcactaattacaaattatctagatttagaactctatatgtcagcattgacctgggaatgaagtcaggatagagaaattccacttgcctgtgatgggtccttagaagtatcagctaaggagtgaccctgtcctatacacagggctctctattacgttccataccctgggcctacccaaggtgacattcctgctgtttacatggcataggcacctgtgagatcagtgtcccaatttcatcttagaaaaaggtaggtatggctgctttgtcggttgaaagttaaggggagccatgatctcccatatttaggaaaaagttatttaaaaaagagcagatggtggaaaaagaatgtaagacccagaatttatccctttgacaatgaatctggcctttttaatagcaggatggaattgattcactagtttttgctaactttcactttcagtaaaggttgaggtgttgtttttgca

SEQ ID NO: 390354 - DNA, 3646 bp, Homo sapiens
agcgggagccaattccggccgcgccggaagtctctactgaggaaagctatgaggatactctgttcgtaagctcccggtgaattttgttccacagactcggaagaaaggttggataagagttcactggagattgacaagtactcgggatagtgaaaagccggagttggaacatggatagccgcttgcaggagatccgggagcggcagaagttacggcgacagctcctcgcgcagcagttgggagctgaaagtgccgacagcattggtgccgtgttaaatagcaaagatgagcagagagaaattgctgaaacaagagaaacttgcagggcttcctatgatacctctgctccaaatgcaaaacgtaagtatctggatgaaggagagacagatgaagacaaaatggaagaatataaggatgaactagaaatgcaacaggatgaagaaaatttgccatatgaagaagagatttacaaagattctagtacttttcttaagggaacacagagcttaaatccccataatgattactgccaacattttgtagacactggacatagacctcagaatttcatcagggatgtaggtttagctgacagatttgaagaatatcctaaactgagggagctcatcaggctaaaggatgagttaatagctaaatctaacactcctcccatgtacttacaagccgatatagaagcctttgacatcagagaactaacacccaaatttgatgtgattcttctggaaccccctttagaagaatattacagagaaactggcatcactgctaatgaaaaatgctggacttgggatgatattatgaagttagaaattgatgagattgcagcacctcgatcatttatttttctctggtgtggttctggggaggggttggaccttggaagagtgtgtttacgaaaatggggttacagaagatgtgaagatatttgttggattaaaaccaataaaaacaatcctgggaagactaagactttagatccaaaggctgtctttcagagaacaaaggctggctcacagttggaccaacgcttacaaatagcaactacaatgcagaaacatatgcatcctatttcagtgctcctaattcctacttgactggttgtacagaagaaattgagagacttcgaccaaaatcgcctcctcccaaatctaaatctgaccgaggaggtggagctcccagaggtggaggaagaggtggaacttctgctggccgtggacgagaaagaaatagatctaacttccgaggagaaagaggtggctttagagggggccgtggaggagcacacagaggtggctttccacctcgataattgttgaagacattgaacctattcatcctcctctaaccttctttattgtaattaaatttcaagtgggagacttaactttagaactcacttccagcttgcactttgctttaatttctctgagctgcaagaatgtcttagcgagccttgcttgcagttgtcacacacactgtctggtttttttcaggataaatgaatgattctgccttttgttatgtgcgtgaacagaatggaacaactcaagtagcttcatcttcagagactgaatttattctgatagacttcagctaattacaaaggattttgctaatttttgggaataaataatggaaaaagatccagtctgtggtatcatgctagtgctgacagggccttgatagaatagagttggaaaagatggtaagcttttgtcagggttttaacattttcttgatgaaacaataaaaagaggtaagcttttttcttctttttttttaagttttaaataaactcagatataatttgaatactgaagaaattaagagactttgaacaaaatctcttcccaaatctaaatttgataggggaggtggagattccaggggtgggtgaaagaagagatagaacttagcaggcagacttaaaaaaaaaaaaaaagttcatcatcataatctcaattttgtggctatgactcctaatcacgcttcctaagaagcaaaggaggacaaatattcatgtgctagatagcactgtggtgtggacttgaacttggattgaccttaaattttatattcctcaaataaaagagaggcagcgacaagatacctcattatcagatgcttggtttatacattttgggactaaaatacttggtgatgaaatgacatacacctttaaacttgttatggagatagtttaatgtaaaaccaactacggaaaaccctcaacttaaggatacagcttggaaattggaactgcaattgccttttattaaaaccatatggtgtgatgtttgtttttaaaattatataagactttatgctgtcacttctcttgctgtactgtaattcatgttttaaatgaatttgataatgaaattatactattatcattcttgatgaatacttttcttatttttatgatttttctaatgaaactttaaacttttgagatttgagagtctgttttctataagtagaattactgttgttacaaaatgaaaaaggactgacctaaaatcagtctcctcttttggtctgtgatggattttaatggccgttctgtgttcatgtatacctaagatgagattatattacatccaccaaagactcagtttgaagataaggaatgagtgatagaagaaataaggctgagatccttaaaagcctaattaatttaactcgcttaacccattagtactatctagtaccagaccccttttttttgctgaaattatggtatattttcaacttcactaattacaaattatctagatttagaactctatatgtcagcattgacctgggaatgaagtcaggatagagaaattccacttgcctgtgatgggtccttagaagtatcagctaaggagtgaccctgtcctatacacagggctctctattacgttccataccctgggcctacccaaggtgacattcctgctgtttacatggcataggcacctgtgagatcagtgtcccaatttcatcttagaaaaaggtaggtatggctgctttgtcggttgaaagttaaggggagccatgatctcccatatttaggaaaaagttatttaaaaaagagcagatggtggaaaaagaatgtaagacccagaatttatccctttgacaatgaatctggcctttttaatagcaggatggaattgattcactagtttttgctaactttcactttcagtaaaggttgaggtgttgtttttgcaatgactgtgtattcattgaggaaaggtttccaatgaaatttcattactctgacctcttctaatttttggtcttctttatatttacatgtcttacattccacaaaattatttagaaatgctgggcatggtggctcatgcctgtaatcccagcactttgtgaggccgatgtgggtggatcacttgaggtcgggagtttgagaccagcctgaccaatatggagaaatcccatctctgctgggaatacaaaattagctgggcgtggtggcatgtgcacgcctgtaatccccgctactcgggaggctgtggcaggagaattgcctggacccaggaggcggaggttgcagtgagccgagattggccactgcactccagcctgggcgacagagtgagactctgtctca

SEQ ID NO: 390355 - DNA, 1584 bp, Homo sapiens
agcgggagccaattccggccgcgccggaagtctctactgaggaaagctatgaggatactctgttcgtaagctcccggtgaattttgttccacagactcggaagaaaggttggataagagttcactggagattgacaagtactcgggatagtgaaaagccggagttggaacatggatagccgcttgcaggagatccgggagcggcagaagttacggcgacagctcctcgcgcagcagttgggagctgaaagtgccgacagcattggtgccgtgttaaatagcaaagatgagcagagagaaattgctgaaacaagagaaacttgcagggcttcctatgatacctctgctccaaatgcaaaacgtaagtatctggatgaaggagagacagatgaagacaaaatggaagaatataaggatgaactagaaatgcaacaggatgaagaaaatttgccatatgaagaagagatttacaaagattctagtacttttcttaagggaacacagagcttaaatccccataatgattactgccaacattttgtagacactggacatagacctcagaatttcatcagggatgtaggtttagctgacagatttgaagaatatcctaaactgagggagctcatcaggctaaaggatgagttaatagctaaatctaacactcctcccatgtacttacaagccgatatagaagcctttgacatcagagaactaacacccaaatttgatgtgattcttctggaaccccctttagaagaatattacagagaaactggcatcactgctaatgaaaaatgctggacttgggatgatattatgaagttagaaattgatgagattgcagcacctcgatcatttatttttctctggtgtggttctggggaggggttggaccttggaagagtgtgtttacgaaaatggggttacagaagatgtgaagatatttgttggattaaaaccaataaaaacaatcctgggaagactaagactttagatccaaaggctgtctttcagagaacaaaggaacactgcctcatggggatcaaaggaactgtgaagcgtagcacagacggggacttcattcatgctaatgttgacattgacttaattatcacagaagaacctgaaattggcaatatagaaaaacctgtagaaatttttcatataattgagcatttttgtcttggtagaagacgccttcatctatttggaagagatagtacaattcgaccagcctggctcacagttgccttactgtttcagcttaatggtcccctattctgttttgtcgctgctgccacacttaacttggaccatgtcgaacgtgtaccttcatgggttcttgctcagttcagatgttctaccacaaagacatctttctggttattctgtccatattgatctctttcttccctgtatttacctttctgtgtactttgtatatcagcatgtaatcctttctgtcctgtttattccaaattctttcccatggatataagacccttcacaatctttctgcagactaccattcagcctcagtacatttagctttttgtacggagtgctggaaacatgcgaaacc

SEQ ID NO: 390356 - DNA, 368 bp, Homo sapiens
tttctgttagttcctaatggaaactaatacacttaaagaacacatctatcctaataaatcttaattgttgttcttttggatttaggatgaatgggaaacaaaatacttttatgcaatatcgttttgatttcttacagattatgaagttagaaattgatgagattgcagcacctcgatcatttatttttctctggtgtggttctggggaggggttggaccttggaagagtggtaagatggtgcttttataaagtggatttttaaattaataagaaaaaaatgtaacagtatgttgcataggatgtttgaaagtggatgttattttgtcctttgtttcttaaataattctaaaatagtgagaaaaaaaaa

SEQ ID NO: 390357 - DNA, 3857 bp, Homo sapiens
agcgggagccaattccggccgcgccggaagtctctactgaggaaagctatgaggatactctgttcgtaagctcccggtgaattttgttccacagactcggaagaaaggttggataagagttcactggagattgacaagtactcgggatagtgaaaagccggagttggaacatggatagccgcttgcaggagatccgggagcggcagaagttacggcgacagctcctcgcgcagcagttgggagctgaaagtgccgacagcattggtgccgtgttaaatagcaaagatgagcagagagaaattgctgaaacaagagaaacttgcagggcttcctatgatacctctgctccaaatgcaaaacgtaagtatctggatgaaggagagacagatgaagacaaaatggaagaatataaggatgaactagaaatgcaacaggatgaagaaaatttgccatatgaagaagagatttacaaagattctagtacttttcttaagggaacacagagcttaaatccccataatgattactgccaacattttgtagacactggacatagacctcagaatttcatcagggatgtaggtttagctgacagatttgaagaatatcctaaactgagggagctcatcaggctaaaggatgagttaatagctaaatctaacactcctcccatgtacttacaagccgatatagaagcctttgacatcagagaactaacacccaaatttgatgtgattcttctggaaccccctttagaagaatattacagagaaactggcatcactgctaatgaaaaatgctggacttgggatgatattatgaagttagaaattgatgagattgcagcacctcgatcatttatttttctctggtgtggttctggggaggggttggaccttggaagagtgtgtttacgaaaatggggttacagaagatgtgaagatatttgttggattaaaaccaataaaaacaatcctgggaagactaagactttagatccaaaggctgtctttcagagaacaaaggaacactgcctcatggggatcaaaggaactgtgaagcgtagcacagacggggacttcattcatgctaatgttgacattgacttaattatcacagaagaacctgaaattggcaatatagaaaaacctgtagaaatttttcatataattgagcatttttgtcttggtagaagacgccttcatctatttggaagagatagtacaattcgaccaggctggctcacagttggaccaacgcttacaaatagcaactacaatgcagaaacatatgcatcctatttcagtgctcctaattcctacttgactggttgtacagaagaaattgagagacttcgaccaaaatcgcctcctcccaaatctaaatctgaccgaggaggtggagctcccagaggtggaggaagaggtggaacttctgctggccgtggacgagaaagaaatagatctaacttccgaggagaaagaggtggctttagagggggccgtggaggagcacacagaggtggctttccacctcgataattgttgaagacattgaacctattcatcctcctctaaccttctttattgtaattaaatttcaagtgggagacttaactttagaactcacttccagcttgcactttgctttaatttctctgagctgcaagaatgtcttagcgagccttgcttgcagttgtcacacacactgtctggtttttttcaggataaatgaatgattctgccttttgttatgtgcgtgaacagaatggaacaactcaagtagcttcatcttcagagactgaatttattctgatagacttcagctaattacaaaggattttgctaatttttgggaataaataatggaaaaagatccagtctgtggtatcatgctagtgctgacagggccttgatagaatagagttggaaaagatggtaagcttttgtcagggttttaacattttcttgatgaaacaataaaaagaggtaagcttttttcttctttttttttaagttttaaataaactcagatataatttgaatactgaagaaattaagagactttgaacaaaatctcttcccaaatctaaatttgataggggaggtggagattccaggggtgggtgaaagaagagatagaacttagcaggcagacttaaaaaaaaaaaaaaagttcatcatcataatctcaattttgtggctatgactcctaatcacgcttcctaagaagcaaaggaggacaaatattcatgtgctagatagcactgtggtgtggacttgaacttggattgaccttaaattttatattcctcaaataaaagagaggcagcgacaagatacctcattatcagatgcttggtttatacattttgggactaaaatacttggtgatgaaatgacatacacctttaaacttgttatggagatagtttaatgtaaaaccaactacggaaaaccctcaacttaaggatacagcttggaaattggaactgcaattgccttttattaaaaccatatggtgtgatgtttgtttttaaaattatataagactttatgctgtcacttctcttgctgtactgtaattcatgttttaaatgaatttgataatgaaattatactattatcattcttgatgaatacttttcttatttttatgatttttctaatgaaactttaaacttttgagatttgagagtctgttttctataagtagaattactgttgttacaaaatgaaaaaggactgacctaaaatcagtctcctcttttggtctgtgatggattttaatggccgttctgtgttcatgtatacctaagatgagattatattacatccaccaaagactcagtttgaagataaggaatgagtgatagaagaaataaggctgagatccttaaaagcctaattaatttaactcgcttaacccattagtactatctagtaccagaccccttttttttgctgaaattatggtatattttcaacttcactaattacaaattatctagatttagaactctatatgtcagcattgacctgggaatgaagtcaggatagagaaattccacttgcctgtgatgggtccttagaagtatcagctaaggagtgaccctgtcctatacacagggctctctattacgttccataccctgggcctacccaaggtgacattcctgctgtttacatggcataggcacctgtgagatcagtgtcccaatttcatcttagaaaaaggtaggtatggctgctttgtcggttgaaagttaaggggagccatgatctcccatatttaggaaaaagttatttaaaaaagagcagatggtggaaaaagaatgtaagacccagaatttatccctttgacaatgaatctggcctttttaatagcaggatggaattgattcactagtttttgctaactttcactttcagtaaaggttgaggtgttgtttttgcaatgactgtgtattcattgaggaaaggtttccaatgaaatttcattactctgacctcttctaatttttggtcttctttatatttacatgtcttacattccacaaaattatttagaaatgctgggcatggtggctcatgcctgtaatcccagcactttgtgaggccgatgtgggtggatcacttgaggtcgggagtttgagaccagcctgaccaatatggagaaatcccatctctgctgggaatacaaaattagctgggcgtggtggcatgtgcacgcctgtaatccccgctactcgggaggctgtggcaggagaattgcctggacccaggaggcggaggttgcagtgagccgagattggccactgcactccagcctgggcgacagagtgagactctgtctca

SEQ ID NO: 390358 - DNA, 3617 bp, Homo sapiens
agcgggagccaattccggccgcgccggaagtctctactgaggaaagctatgaggatactctgttcgtaagctcccggtgaattttgttccacagactcggaagaaaggttggataagagttcactggagattgacaagtactcgggatagtgaaaagccggagttggaacatggatagccgcttgcaggagatccgggagcggcagaagttacggcgacagctcctcgcgcagcagttgggagctgaaagtgccgacagcattggtgccgtgttaaatagcaaagatgagcagagagaaattgctgaaacaagagaaacttgcagggcttcctatgatacctctgctccaaatgcaaaacgtaagtatctggatgaaggagagacagatgaagacaaaatggaagaatataaggatgaactagaaatgcaacaggatgaagaaaatttgccatatgaagaagagatttacaaagattctagtacttttcttaagggaacacagagcttaaatccccataatgattactgccaacattttgtagacactggacatagacctcagaatttcatcagggatgtaggtttagctgacagatttgaagaatatcctaaactgagggagctcatcaggctaaaggatgagttaatagctaaatctaacactcctcccatgtacttacaagccgatatagaagcctttgacatcagagaactaacacccaaatttgatgtgattcttctggaaccccctttagaagaatattacagagaaactggcatcactgctaatgaaaaatgctggacttgggatgatattatgaagttagaaattgatgagattgcagcacctcgatcatttatttttctctggtgtggttctggggaggggttggaccttggaagagtgtgtttacgaaaatggggttacagaagatgtgaagatatttgttggattaaaaccaataaaaacaatcctgggaagactaagactttagatccaaaggctgtctttcagagaacaaaggaacactgcctcatggggatcaaaggaactgtgaagcgtagcacagacggggacttcattcatgctaatgttgacattgacttaattatcacagaagaacctgaaattggcaatatagaaaaacctgtagaaatttttcatataattgagcatttttgtcttggtagaagacgccttcatctatttggaagagatagtacaattcgaccaggctggctcacagttggaccaacgcttacaaatagcaactacaatgcagaaacatatgcatcctatttcagtgctcctaattcctacttgactggttgtacagaagaaattgagagacttcgaccaaaatcgcctcctcccaaatctaaatctgaccgaggaggtggagctcccagaggtggaggaagaggtggaacttctgctggccgtggacgagaaagaaatagatctaacttccgaggagaaagaggataaatgaatgattctgccttttgttatgtgcgtgaacagaatggaacaactcaagtagcttcatcttcagagactgaatttattctgatagacttcagctaattacaaaggattttgctaatttttgggaataaataatggaaaaagatccagtctgtggtatcatgctagtgctgacagggccttgatagaatagagttggaaaagatggtaagcttttgtcagggttttaacattttcttgatgaaacaataaaaagaggtaagcttttttcttctttttttttaagttttaaataaactcagatataatttgaatactgaagaaattaagagactttgaacaaaatctcttcccaaatctaaatttgataggggaggtggagattccaggggtgggtgaaagaagagatagaacttagcaggcagacttaaaaaaaaaaaaaaagttcatcatcataatctcaattttgtggctatgactcctaatcacgcttcctaagaagcaaaggaggacaaatattcatgtgctagatagcactgtggtgtggacttgaacttggattgaccttaaattttatattcctcaaataaaagagaggcagcgacaagatacctcattatcagatgcttggtttatacattttgggactaaaatacttggtgatgaaatgacatacacctttaaacttgttatggagatagtttaatgtaaaaccaactacggaaaaccctcaacttaaggatacagcttggaaattggaactgcaattgccttttattaaaaccatatggtgtgatgtttgtttttaaaattatataagactttatgctgtcacttctcttgctgtactgtaattcatgttttaaatgaatttgataatgaaattatactattatcattcttgatgaatacttttcttatttttatgatttttctaatgaaactttaaacttttgagatttgagagtctgttttctataagtagaattactgttgttacaaaatgaaaaaggactgacctaaaatcagtctcctcttttggtctgtgatggattttaatggccgttctgtgttcatgtatacctaagatgagattatattacatccaccaaagactcagtttgaagataaggaatgagtgatagaagaaataaggctgagatccttaaaagcctaattaatttaactcgcttaacccattagtactatctagtaccagaccccttttttttgctgaaattatggtatattttcaacttcactaattacaaattatctagatttagaactctatatgtcagcattgacctgggaatgaagtcaggatagagaaattccacttgcctgtgatgggtccttagaagtatcagctaaggagtgaccctgtcctatacacagggctctctattacgttccataccctgggcctacccaaggtgacattcctgctgtttacatggcataggcacctgtgagatcagtgtcccaatttcatcttagaaaaaggtaggtatggctgctttgtcggttgaaagttaaggggagccatgatctcccatatttaggaaaaagttatttaaaaaagagcagatggtggaaaaagaatgtaagacccagaatttatccctttgacaatgaatctggcctttttaatagcaggatggaattgattcactagtttttgctaactttcactttcagtaaaggttgaggtgttgtttttgcaatgactgtgtattcattgaggaaaggtttccaatgaaatttcattactctgacctcttctaatttttggtcttctttatatttacatgtcttacattccacaaaattatttagaaatgctgggcatggtggctcatgcctgtaatcccagcactttgtgaggccgatgtgggtggatcacttgaggtcgggagtttgagaccagcctgaccaatatggagaaatcccatctctgctgggaatacaaaattagctgggcgtggtggcatgtgcacgcctgtaatccccgctactcgggaggctgtggcaggagaattgcctggacccaggaggcggaggttgcagtgagccgagattggccactgcactccagcctgggcgacagagtgagactctgtctca

SEQ ID NO: 390359 - DNA, 1039 bp, Homo sapiens
agcgggagccaattccggccgcgccggaagtctctactgaggaaagctatgaggatactctgttcgtaagctcccggtgaattttgttccacagactcggaagaaaggttggataagagttcactggagattgacaagtactcgggatagtgaaaagccggagttggaacatggatagccgcttgcaggagatccgggagcggcagaagttacggcgacagctcctcgcgcagcagttgggagctgaaagtgccgacagcattggtgccgtgttaaatagcaaagatgagcagagagaaattgctgaaacaagagaaacttgcagggcttcctatgatacctctgctccaaatgcaaaacgtaagtatctggatgaaggagagacagatgaagacaaaatggaagaatataaggatgaactagaaatgcaacaggatgaagaaaatttgccatatgaagaagagatttacaaagattctagtacttttcttaagggaacacagagcttaaatccccataatgattactgccaacattttgtagacactggacatagacctcagaatttcatcagggatgtaggtttagctgacagatttgaagaatatcctaaactgagggagctcatcaggctaaaggatgagttaatagctaaatctaacactcctcccatgtacttacaagccgatatagaagcctttgacatcagagaactaacacccaaatttgatgtgattcttctggaaccccctttagaagaatattacagagaaactggcatcactgctaatgaaaaatgctggacttgggatgatattatgaagttagaaattgatgagattgcagcacctcgatcatttatttttctctggtgtggttctggggaggggttggaccttggaagagtggtaagatggtgcttttataaagtggatttttaaattaataagaaaaaaatgtaacagtatgttgcataggatgtttgaaagtggatgttattttgtcctttgtttcttaaataattctaaaatagtgagaa

SEQ ID NO: 390360 - DNA, 471 bp, Homo sapiens
cagtgagccaattcgaggccctgtctaaaaaaaggggggaagggagggcagtaagagcaagataatgtgagaggcctgagaaacaacaaaggcccaggattgaaagaagacaactctgtcagcctggcaggaatgggaaactctaaacttgagtaaggcatttcaccttgctctgttcagtgtatcttgtttacaaattggaaatcttagttgagttaaaacactgcagtattcttcaaagtgttatccctggctacttgcaatgagtcactttgaatgcttgtggaaatgcttgggccaggcacagtggcttatgcctgtaatcccagcactttgggaggcactgttgggaggatcacttgagcctgggagtttgacgctgtgatgagctgtgatcaggtgactgcactccagcctgggcaacacagcaagactctgtctcctaaaagaaaaaaaaaaaaaaagtcgacg

SEQ ID NO: 390361 - DNA, 299 bp, Homo sapiens
tggatttcttaacctgctagtcagtcggttgtcctttgacaagcttgcagtatttcagtgctatggtagggacgcatggtttcttgcccttctccctgtattcttcagtaacttctacagcatttttttacccctaaaaatgcctcaaacctgccttaactttattctttatgggccgagctctctccttccttttgtaataagcttctgtttctattttctcacctactgttcccttctcaactttctgtctgaacttgaacattcttctcctcctgatcaatacctaagaatgcttt

SEQ ID NO: 390362 - DNA, 589 bp, Homo sapiens
  misc_feature (583)..(589): n is a, c, g, or t
gagccatggagaatcatttcccgatggaaataggactgagtcttaacgaatttccagatttccaacatttccctctgtattttagtaacctgattctatgtactttgcatttccctccttttttgaaaaggattgtctgtaatgactatctcaacctcactaaaaattgtgtgggtcagtgaattaacttgcttctttagcccaggggttggcaaaccttttctgtaaaaagccaaatagtaaatatttttagctttgtgcctgtttttgcatagtttaccaaataattttgctaccagagctatgcattttgctatgtcttgattcatttattgtattcctacttggaaattattcccttggcaatgcacaactgaacttttatactcatctctatatacgtgtgtatagacatatgtatttttctacatatgcctatatttttgtatatggatattttgggtagcaagctttgtaatgatttctcctagtctgttacatttattcctataatttttgttttattgattgcataaaaagtttttatttttcatgtaaaaataaaagttttcaatattgaaannnnnnn

SEQ ID NO: 390363 - DNA, 412 bp, Homo sapiens
aaagaaagaaaactggctgggcacagttggctcacacctgtaatcccagcactttgggaggccaaggcaggtggatcacttgagtccaggagtttgagatgagcctggacaacagagtgaaacactgtctctacaaaaagtacaaaaattagctggatatggtggcacgtgcctatagtctcagctactcagcaggctgaggtgagaggatcgcctgagcccaggagacgtaggctgcaataagctaagatcacaccactgcaccctaccctgggagacatagtgagatcctgtcttgaaaagagaaaagaaagggaaagcgaagggcagcaggagactgctgagtgggaaaacacagctctagtctttaagctcttctttaacctatttctctccgtggccttttcaagaa

SEQ ID NO: 390364 - DNA, 374 bp, Homo sapiens
gagggcagaccacacctgcagtctgtgtcgggcccctcactgccctggcatcactctggggctctgctgggactttcttgtttgttttaaaggaaagttgagtgtttcctgagtgtgcgtaaagccaatgtactacttaaactgagtatttataattctttcttttaagaaataaaacaataataaaataccataaaccttgctttaattattcacaggtgtcaacttgtaatcatcatggggaaagggccaatgagatgccttatttaaaaaaggcacttgcctgcttttctttgaagttttgctaaaatgcttcattataacatgttcttgtttataaataaattccagcctttcaaagattgcggtgtttg

SEQ ID NO: 390365 - DNA, 348 bp, Homo sapiens
gctcactgcaacctccacctcctgcgttcaagcgattctcttgcctcaacctcctgagtagccagaactacaggtgtgcgccactactaaaaatacaaaaaattagccaggcgtggtagctcacacctgtagtcccagctactcgagaggctgaggcaggaagatcacttgagcccaggaggttaaggctgcagtgagccatgattgtgccactgcactctagcctgaatgaataaataaccacctgcttaaaagttacaggataccattgattgcttgattgattgatgaaggaaagaataaatccaggtggtggtacattccacaggaaaattaagaaggactgtt

SEQ ID NO: 390366 - DNA, 713 bp, Homo sapiens
cttgcaggattaggaacatcatctggcctgaacagaaggtaaaattgctgtctgattttctttttagagaaacctgttagtgaagctggcgattcagttctttctggtatacatttaggacctgttaaatatatattctgcctcaaggggaaatcatattctaaaaagtaaacaattcataggcaattcttgtaccttgagaatccattaatggctttcagaaggcaaattttgttgtcaaggggacaggttatatgggcaacttgcttctattaatacttttctgggcagattaactaaatgaactaatatttaacttggtctaatagaatgttagccagaacagtgcctggtaacaacaacaataatactagctaacatttcttaagtggtcactatgtcccataactattatacatgtgttaactaatttaatcctcacaaaaatgcaatgaggtagctgttatttttactcccactttataaatgagaaaatatagtaatatagcatattttacatatatacagtaatattgtagcaggacgagctgcagacaaaacccctcagacaccgagttaaggaagggctttattcggctgggagcgtcggcaagactcacgtctccaacaactgagctccccaagtgagcaattcctgtcccttttaagggcttacaactctaagggggtccgcgtgagaggatcgtgatcga

SEQ ID NO: 390367 - DNA, 118 bp, Homo sapiens
gaggtgatagaccacaaataaaagaaaaccgcagatgcaccacgcatgtagagagacggagaggggcaggaatgttgtctgcctgccgccacctcatttttgaaggctgctaagccag

SEQ ID NO: 390368 - DNA, 318 bp, Homo sapiens
tcttggcgattttaatgctttggaaaagatctcatggttttatctccaaaggaggaaattaatttgatgccatggaaattagttttctagtcgtatgccttgaatgagtgaagaatttctttttcatggtggtactaaatttggggaaagctatagaaactttcatctggaagcttacacttttcctcttttttgaaaatttggtgagagacttggatattttattattttctgtaaaagagtgtaatttgttatacaggtctaatattgatccttttttggaagtatggaaagaatctgagtataaagcagaattac

SEQ ID NO: 390369 - DNA, 2415 bp, Homo sapiens
agcggagtggccgcgctcggcgctgccatgttgaggagccgccgctgccgttgccgccgccgccgccgccgctttgttgtcgcctcctccggctgaggaggctccccgagcggggggagtggggaggaggggggtcggccgccgcagccatggaggccaactggaccgcgttcctgttccaggcccatgaagcttcccatcaccaacagcaggcagcacagaacagcttgctgcccctcctgagctctgccgtggagccccctgatcagaaaccattgcttccaataccaataactcagaaacctcagggtgcaccagaaacattaaaggatgccattgggattaaaaaagaaaaacccaaaacttcatttgtgtgcacttactgcagtaaagctttcagggacagctatcacctgaggcgccacgaatcctgccacacagggatcaagttggtgtcccggccaaagaaaacccccaccacggtggttccccttatctctaccatcgctggggacagcagccgaacttcgttggtctcgaccattgcaggcatcttgtcaacagtcactacatcttcctcgggcaccaaccccagtagcagtgccagcaccacagctatgccagtgacccagtctgtcaagaaacccagtaagcctgtcaagaagaaccatgcttgtgagatgtgtgggaaggccttccgagatgtgtaccatctcaatcgacacaagctctcccattcagatgagaaaccctttgagtgtcctatttgtaatcagcgcttcaagaggaaggaccggatgacttaccatgtgaggtctcatgaaggaggcatcaccaaaccctatacttgcagtgtttgtgggaaaggcttctcaaggcctgaccacttaagctgtcatgtaaaacatgtccattcaacagaaagacccttcaaatgccaaacgtgcactgctgcctttgccaccaaagacagactgcggacacacatggtgcgccatgaaggcaaggtatcatgtaacatctgtgggaagctcctgagtgcagcatacatcaccagccacttaaagactcatgggcagagccaaagtatcaactgtaatacatgtaaacaaggcatcagtaaaacatgcatgagtgaagagaccagtaaccaaaagcagcagcagcagcagcagcagcaacaacaacaacaacaacatgtgacaagctggccagggaagcaagtagaaacactgagactgtgggaagaagctgttaaagcaaggaagaaagaagctgctaacctgtgccaaacctccacggctgctacgacacctgtgactctcactactccattcagtataacatcctctgtgtcgtctgggactatgtcaaacccagtcacagtggcagctgcaatgagcatgagaagtccagtaaatgtttcaagtgcagttaacataaccagcccaatgaacatagggcatcctgtaactataaccagtccattatccatgacctctcctttaacactcactaccccagtcaacctccccacccccgtcactgccccagtgaatatagcacaccctgtcaccatcacatctccaatgaatctacccacacctatgacattagccgcccctctcaatatagcaatgagacctgtagagagcatgcctttcttgccccaagctttgcctacatcaccgccttggtaaacagtattataaaatcaaaatatgggtaaaagtaaatatttaccagcaacttaacttttagttgattaaagcaaaaagtaaaccatgaaattgggagattttattacattagttaataagagtgtggtagcatttttctccaatttggctgggattattcaaagtagggtgtgtatgtaacttatcactggaccactttagtttaatcagaaattccttttagctgacaacattgcttaaacaggatagtagttggcaagatgaaatgccagaattaaaaccaatcataagtagaacccacttcaaaataaaaaaacagcattactatttctaatcccaaggaatcactttattgtaaacactagcagaactcttctccctatacaaggtggatggctgattttaacctgaaattttaaatccacagattgagagctagtgtagaattgtctgtgtttattgtttttatgagtaaatacatgcattgtcataataaaatgcatttcagagaatatgcattttacctttgggaatatgttaatttcaggcagcattccctatgggaaaggtgataccagctctgatatgcaaagcatatgataatttatcattctaacttcaacgtataatagggattgtgacctgatatttggagatgtaaatattgctcagcatattaatcccgatggaatatagcattgtagttgacttttta

SEQ ID NO: 390370 - DNA, 4793 bp, Homo sapiens
agcggagtggccgcgctcggcgctgccatgttgaggagccgccgctgccgttgccgccgccgccgccgccgctttgttgtcgcctcctccggctgaggaggctccccgagcggggggagtggggaggaggggggtcggccgccgcagccatggaggccaactggaccgcgttcctgttccagctattaaaatctttttttccacctgatggagaagtgtgaaaacaaatatttaatcctgggcttggcaatgtgtgcagtgaaatttgttggaaaacttaaaatttagagccgagagcagttgaatgggtaaagagaatatttcagtcttttctatggaaaggcccatgaagcttcccatcaccaacagcaggcagcacagaacagcttgctgcccctcctgagctctgccgtggagccccctgatcagaaaccattgcttccaataccaataactcagaaacctcagggtgcaccagaaacattaaaggatgccattgggattaaaaaagaaaaacccaaaacttcatttgtgtgcacttactgcagtaaagctttcagggacagctatcacctgaggcgccacgaatcctgccacacagggatcaagttggtgtcccggccaaagaaaacccccaccacggtggttccccttatctctaccatcgctggggacagcagccgaacttcgttggtctcgaccattgcaggcatcttgtcaacagtcactacatcttcctcgggcaccaaccccagtagcagtgccagcaccacagctatgccagtgacccagtctgtcaagaaacccagtaagcctgtcaagaagaaccatgcttgtgagatgtgtgggaaggccttccgagatgtgtaccatctcaatcgacacaagctctcccattcagatgagaaaccctttgagtgtcctatttgtaatcagcgcttcaagaggaaggaccggatgacttaccatgtgaggtctcatgaaggaggcatcaccaaaccctatacttgcagtgtttgtgggaaaggcttctcaaggcctgaccacttaagctgtcatgtaaaacatgtccattcaacagaaagacccttcaaatgccaaacgtgcactgctgcctttgccaccaaagacagactgcggacacacatggtgcgccatgaaggcaaggtatcatgtaacatctgtgggaagctcctgagtgcagcatacatcaccagccacttaaagactcatgggcagagccaaagtatcaactgtaatacatgtaaacaaggcatcagtaaaacatgcatgagtgaagagaccagtaaccaaaagcagcagcagcagcagcagcagcagcagcagcagcaacaacaacaacaacaacatgtgacaagctggccagggaagcaagtagaaacactgagactgtgggaagaagctgttaaagcaaggaagaaagaagctgctaacctgtgccaaacctccacggctgctacgacacctgtgactctcactactccattcagtataacatcctctgtgtcgtctgggactatgtcaaacccagtcacagtggcagctgcaatgagcatgagaagtccagtaaatgtttcaagtgcagttaacataaccagcccaatgaacatagggcatcctgtaactataaccagtccattatccatgacctctcctttaacactcactaccccagtcaacctccccacccccgtcactgccccagtgaatatagcacaccctgtcaccatcacatctccaatgaatctacccacacctatgacattagccgcccctctcaatatagcaatgagacctgtagagagcatgcctttcttgccccaagctttgcctacatcaccgccttggtaaacagtattataaaatcaaaatatgggtaaaagtaaatatttaccagcaacttaacttttagttgattaaagcaaaaagtaaaccatgaaattgggagattttattacattagttaataagagtgtggtagcatttttctccaatttggctgggattattcaaagtagggtgtgtatgtaacttatcactggaccactttagtttaatcagaaattccttttagctgacaacattgcttaaacaggatagtagttggcaagatgaaatgccagaattaaaaccaatcataagtagaacccacttcaaaataaaaaaacagcattactatttctaatcccaaggaatcactttattgtaaacactagcagaactcttctccctatacaaggtggatggctgattttaacctgaaattttaaatccacagattgagagctagtgtagaattgtctgtgtttattgtttttatgagtaaatacatgcattgtcataataaaatgcatttcagagaatatgcattttacctttgggaatatgttaatttcaggcagcattccctatgggaaaggtgataccagctctgatatgcaaagcatatgataatttatcattctaacttcaacgtataatagggattgtgacctgatatttggagatgtaaatattgctcagcatattaatcccgatggaatatagcattgtagttgactttttaaaaaaaaaaaaaatttaaaaaaaatctacaaattgtgttttgctaagaaaagcctcaactgacagaggagaagtcaagtgtgtggacaggcaagctcctaataaacagagtccagtgggattcctatttaggagccaaggagtactttggaacagtacaaatatattgctttaaattggaagacgctggaggcactgggatgtgatatgcccctctctctcccaatcagagcctgttgatattacaacagggacagatgtgttagttgctcactagagtttatgtcttatattaaattgtatacagtttttattctaaccactaactaggtagtgtatgccccttcagaacatgcagagtgtatctttttttaaatttctccttccgtttcttaagtattgcgcagatttgttcaactttgtaaatatggacatcactttttttttctttgagaaaacacttgtatcagctttgtggtgttttcagggagacagctgtctgcattccctgtagaaacccagcaatgattatgcacgttgagacatgtgctttttatttcttagcaagatattttatctctgtacataaagtagaaaccaaaagctagggaaacagatactctttacaccatcatgccacgcattgtttttaaagcattgcgttaaaaaaaaaattaactaaaccaagatgctgtgattttttaagttgcaatatgtttttggtttttttcattttttaatcattgcagttaagagaaatggaaattagttgtgttaatcttgcagaatgtttgcaggactgactatcaaactggatgatttccatttataccctactgtgtcagttcaagcatcaaaataccttgcatctgagacagacttcctacatcagggacaggtatctgtgtgtcattatacaaaacagttctagggggttgaactacatagtaaaaaaataaaataaatagtacttagtgtaaaataattttataaatgatcttttgtactttaggacattaaattgtacaacttttgtatatataaaagcttaggaactttctgtttagcaggaaggcaacacattcctacacttttaatgtatatgtttgttataatgtccatgtaaacatgccctatgtttgtgccttttaattagtttgtctcaataaacaaaatgtagagaaaaatatgtagctatgactttgttacaactgttcttatccacagtacaaaaatggtttgtttttaatatgtagagcattatgtgtggactactggaaggactcgtgtagggaaagcccaagaatgaccttgctgaggcctggattgggaggcacagtggccacatttggaggaagttcacatttcctggcatgcagacccaaaactgggttctggctctgcctgctgggatctgttatctctggtgggctggcagtcataattcacaattcagacagcccaggcttcctccacagtggtccaaggagcagtcctcagtgggggcaggtgtgggccctacccctaagctagaatgtggttgtcagaaccctgaaagtattagttctaaaaaaaaaaagatatatactagaagtaattgttttatcaattcattgtataataaacaggagtgagacttcattgtatgacttcagttaaaatactattttgtatgcattctttattcacttaagaagcttgtctgcaataataaagccacgtcatgtcttcttttgggagggagagagtcgatggcaggagggggttttgggtgggccactgaaaaggggtaccgaataggttgtgtgatgaaattctgtgtcttggaactggaattgagtttcgatgttgatgaactgattcaaccaggtgttgaaggcacgacagccactgctctacgaaaaggcagagtacgtttttcccttctggttgtaacctggttgagagcttcccctttatcagattggcagctaaacagttgtattagataatccttaaatctgacatccagcctgttacgctctagggctcgctgcttggcctgcgtttgctttttattgtgtatccgttcccctcctacggtgtgctcctgaatgaaggtttctatgtaagcagatgatgattttacctgtcaataccagcactgtattactaacatgcaaaatactgcagatttattttgaaaattaaagttaactggtcacaaa

SEQ ID NO: 390371 - DNA, 4823 bp, Homo sapiens
agcggagtggccgcgctcggcgctgccatgttgaggagccgccgctgccgttgccgccgccgccgccgccgctttgttgtcgcctcctccggctgaggaggctccccgagcggggggagtggggaggaggggggtcggccgccgcagccatggaggccaactggaccgcgttcctgttccagctattaaaatctttttttccacctgatggagaagtgtgaaaacaaatatttaatcctgggcttggcaatgtgtgcagtgaaatttgttggaaaacttaaaatttagagccgagagcagttgaatgggtaaagagaatatttcagtcttttctatggaaaggcccatgaagcttcccatcaccaacagcaggcagcacagaacagcttgctgcccctcctgagctctgccgtggagccccctgatcagaaaccattgcttccaataccaataactcagaaacctcagggtgcaccagaaacattaaaggatgccattgggattaaaaaagaaaaacccaaaacttcatttgtgtgcacttactgcagtaaagctttcagggacagctatcacctgaggcgccacgaatcctgccacacagggatcaagttggtgtcccggccaaagaaaacccccaccacggtggttccccttatctctaccatcgctggggacagcagccgaacttcgttggtctcgaccattgcaggcatcttgtcaacagtcactacatcttcctcgggcaccaaccccagtagcagtgccagcaccacagctatgccagtgacccagtctgtcaagaaacccagtaagcctgtcaagaagaaccatgcttgtgagatgtgtgggaaggccttccgagatgtgtaccatctcaatcgacacaagctctcccattcagatgagaaaccctttgagtgtcctatttgtaatcagcgcttcaagaggaaggaccggatgacttaccatgtgaggtctcatgaaggaggcatcaccaaaccctatacttgcagtgtttgtgggaaaggcttctcaaggcctgaccacttaagctgtcatgtaaaacatgtccattcaacagaaagacccttcaaatgccaaacgtgcactgctgcctttgccaccaaagacagactgcggacacacatggtgcgccatgaaggcaaggtatcatgtaacatctgtgggaagctcctgagtgcagcatacatcaccagccacttaaagactcatgggcagagccaaagtatcaactgtaatacatgtaaacaaggcatcagtaaaacatgcatgagtgaagagaccagtaaccaaaagcagcagcagcagcagcagcagcagcagcagcagcaacaacaacaacaacaacatgtgacaagctggccagggaagcaagtagaaacactgagactgtgggaagaagctgttaaagcaaggaagaaagaagctgctaacctgtgccaaacctccacggctgctacgacacctgtgactctcactactccattcagtataacatcctctgtgtcgtctgggactatgtcaaacccagtcacagtggcagctgcaatgagcatgagaagtccagtaaatgtttcaagtgcagttaacataaccagcccaatgaacatagggcatcctgtaactataaccagtccattatccatgacctctcctttaacactcactaccccagtcaacctccccacccccgtcactgccccagtgaatatagcacaccctgtcaccatcacatctccaatgaatctacccacacctatgacattagccgcccctctcaatatagcaatgagacctgtagagagcatgcctttcttgccccaagctttgcctacatcaccgccttggtaaacagtattataaaatcaaaatatgggtaaaagtaaatatttaccagcaacttaacttttagttgattaaagcaaaaagtaaaccatgaaattgggagattttattacattagttaataagagtgtggtagcatttttctccaatttggctgggattattcaaagtagggtgtgtatgtaacttatcactggaccactttagtttaatcagaaattccttttagctgacaacattgcttaaacaggatagtagttggcaagatgaaatgccagaattaaaaccaatcataagtagaacccacttcaaaataaaaaaacagcattactatttctaatcccaaggaatcactttattgtaaacactagcagaactcttctccctatacaaggtggatggctgattttaacctgaaattttaaatccacagattgagagctagtgtagaattgtctgtgtttattgtttttatgagtaaatacatgcattgtcataataaaatgcatttcagagaatatgcattttacctttgggaatatgttaatttcaggcagcattccctatgggaaaggtgataccagctctgatatgcaaagcatatgataatttatcattctaacttcaacgtataatagggattgtgacctgatatttggagatgtaaatattgctcagcatattaatcccgatggaatatagcattgtagttgactttttaaaaaaaaaaaaaatttaaaaaaaatctacaaattgtgttttgctaagaaaagcctcaactgacagaggagaagtcaagtgtgtggacaggcaagctcctaataaacagagtccagtgggattcctatttaggagccaaggagtactttggaacagtacaaatatattgctttaaattggaagacgctggaggcactgggatgtgatatgcccctctctctcccaatcagagcctgttgatattacaacagggacagatgtgttagttgctcactagagtttatgtcttatattaaattgtatacagtttttattctaaccactaactaggtagtgtatgccccttcagaacatgcagagtgtatctttttttaaatttctccttccgtttcttaagtattgcgcagatttgttcaactttgtaaatatggacatcactttttttttctttgagaaaacacttgtatcagctttgtggtgttttcagggagacagctgtctgcattccctgtagaaacccagcaatgattatgcacgttgagacatgtgctttttatttcttagcaagatattttatctctgtacataaagtagaaaccaaaagctagggaaacagatactctttacaccatcatgccacgcattgtttttaaagcattgcgttaaaaaaaaaattaactaaaccaagatgctgtgattttttaagttgcaatatgtttttggtttttttcattttttaatcattgcagttaagagaaatggaaattagttgtgttaatcttgcagaatgtttgcaggactgactatcaaactggatgatttccatttataccctactgtgtcagttcaagcatcaaaataccttgcatctgagacagacttcctacatcagggacaggtatctgtgtgtcattatacaaaacagttctagggggttgaactacatagtaaaaaaataaaataaatagtacttagtgtaaaataattttataaatgatcttttgtactttaggacattaaattgtacaacttttgtatatataaaagcttaggaactttctgtttagcaggaaggcaacacattcctacacttttaatgtatatgtttgttataatgtccatgtaaacatgccctatgtttgtgccttttaattagtttgtctcaataaacaaaatgtagagaaaaatatgtagctatgactttgttacaactgttcttatccacagtacaaaaatggtttgtttttaatatgtagagcattatgtgtggactactggaaggactcgtgtagggaaagcccaagaatgaccttgctgaggcctggattgggaggcacagtggccacatttggaggaagttcacatttcctggcatgcagacccaaaactgggttctggctctgcctgctgggatctgttatctctggtgggctggcagtcataattcacaattcagacagcccaggcttcctccacagtggtccaaggagcagtcctcagtgggggcaggtgtgggccctacccctaagctagaatgtggttgtcagaaccctgaaagtattagttctaaaaaaaaaaagatatatactagaagtaattgttttatcaattcattgtataataaacaggagtgagacttcattgtatgacttcagttaaaatactattttgtatgcattctttattcacttaagaagcttgtctgcaataataaagccacgtcatgtcttcttttgggagggagagagtcgatggcaggagggggttttgggtgggccactgaaaaggggtaccgaataggttgtgtgatgaaattctgtgtcttggaactggaattgagtttcgatgttgatgaactgattcaaccaggtgttgaaggcacgacagccactgctctacgaaaaggcagagtacgtttttcccttctggttgtaacctggttgagagcttcccctttatcagattggcagctaaacagttgtattagataatccttaaatctgacatccagcctgttacgctctagggctcgctgcttggcctgcgtttgctttttattgtgtatccgttcccctcctacggtgtgctcctgaatgaaggtttctatgtaagcagatgatgattttacctgtcaataccagcactgtattactaacatgcaaaatactgcagatttattttgaaaattaaagttaactggtcacaaaaaacagagactaccacacaaaacaaagggg

SEQ ID NO: 390372 - DNA, 1885 bp, Homo sapiens
cccacgcgtccggacccacgcgtccggaacatgcagagtgtatctttttttaaatttctccttccgtttcttaagtattgcgcagatttgttcaactttgtaaatatggacatcactttttttttctttgagaaaacacttgtatcagctttgtggtgttttcagggagacagctgtctgcattccctgtagaaacccagcaatgattatgcacgttgagacatgtgctttttatttcttagcaagatattttatctctgtacataaagtagaaaccaaaagctagggaaacagatactctttacaccatcatgccacgcattgtttttaaagcattgcgttaaaaaaaaaattaactaaaccaagatgctgtgattttttaagttgcaatatgtttttggtttttttcattttttaatcattgcagttaagagaaatggaaattagttgtgttaatcttgcagaatgtttgcaggactgactatcaaactggatgatttccatttataccctactgtgtcagttcaagcatcaaaataccttgcatctgagacagacttcctacatcagggacaggtatctgtgtgtcattatacaaaacagttctagggggttgaactacatagtaaaaaaataaaataaatagtacttagtgtaaaataattttataaatgatcttttgtactttaggacattaaattgtacaacttttgtatatataaaagcttaggaactttctgtttagcaggaaggcaacacattcctacacttttaatgtatatgtttgttataatgtccatgtaaacatgccctatgtttgtgccttttaattagtttgtctcaataaacaaaatgtagagaaaaatatgtagctatgactttgttacaactgttcttatccacagtacaaaaatggtttgtttttaatatgtagagcattatgtgtggactactggaaggactcgtgtagggaaagcccaagaatgaccttgctgaggcctggattgggaggcacagtggccacatttggaggaagttcacatttcctggcatgcagacccaaaactgggttctggctctgcctgctgggatctgttatctctggtgggctggcagtcataattcacaattcagacagcccaggcttcctccacagtggtccaaggagcagtcctcagtgggggcaggtgtgggccctacccctaagctagaatgtggttgtcagaaccctgaaagtattagttctaaaaaaaaaaagatatatactagaagtaattgttttatcaattcattgtataataaacaggagtgagacttcattgtatgacttcagttaaaatactattttgtatgcattctttattcacttaagaagcttgtctgcaataataaagccacgtcatgtcttcttttgggagggagagagtcgatggcaggagggggttttgggtgggccactgaaaaggggtaccgaataggttgtgtgatgaaattctgtgtcttggaactggaattgagtttcgatgttgatgaactgattcaaccaggtgttgaaggcacgacagccactgctctacgaaaaggcagagtacgtttttcccttctggttgtaacctggttgagagcttcccctttatcagattggcagctaaacagttgtattagataatccttaaatctgacatccagcctgttacgctctagggctcgctgcttggcctgcgtttgctttttattgtgtatccgttcccctcctacggtgtgctcctgaatgaaggtttctatgtaagcagatgatgattttacctgtcaataccagcactgtattactaacatgcaaaatactgcagatttattttgaaaattaaagttaactggtcacaaa

SEQ ID NO: 390373 - DNA, 1831 bp, Homo sapiens
gcctactactactaaattcgcggccgcgtcgacttgttcaactttgtaaatatggacatcactttttttttctttgagaaaacacttgtatcagctttgtggtgttttcagggagacagctgtctgcattccctgtagaaacccagcaatgattatgcacgttgagacatgtgctttttatttcttagcaagatattttatctctgtacataaagtagaaaccaaaagctagggaaacagatactctttacaccatcatgccacgcattgtttttaaagcattgcgttaaaaaaaaaattaactaaaccaagatgctgtgattttttaagttgcaatatgtttttggtttttttcattttttaatcattgcagttaagagaaatggaaattagttgtgttaatcttgcagaatgtttgcaggactgactatcaaactggatgatttccatttataccctactgtgtcagttcaagcatcaaaataccttgcatctgagacagacttcctacatcagggacaggtatctgtgtgtcattatacaaaacagttctagggggttgaactacatagtaaaaaaataaaataaatagtacttagtgtaaaataattttataaatgatcttttgtactttaggacattaaattgtacaacttttgtatatataaaagcttaggaactttctgtttagcaggaaggcaacacattcctacacttttaatgtatatgtttgttataatgtccatgtaaacatgccctatgtttgtgccttttaattagtttgtctcaataaacaaaatgtagagaaaaatatgtagctatgactttgttacaactgttcttatccacagtacaaaaatggtttgtttttaatatgtagagcattatgtgtggactactggaaggactcgtgtagggaaagcccaagaatgaccttgctgaggcctggattgggaggcacagtggccacatttggaggaagttcacatttcctggcatgcagacccaaaactgggttctggctctgcctgctgggatctgttatctctggtgggctggcagtcataattcacaattcagacagcccaggcttcctccacagtggtccaaggagcagtcctcagtgggggcaggtgtgggccctacccctaagctagaatgtggttgtcagaaccctgaaagtattagttctaaaaaaaaaaagatatatactagaagtaattgttttatcaattcattgtataataaacaggagtgagacttcattgtatgacttcagttaaaatactattttgtatgcattctttattcacttaagaagcttgtctgcaataataaagccacgtcatgtcttcttttgggagggagagagtcgatggcaggagggggttttgggtgggccactgaaaaggggtaccgaataggttgtgtgatgaaattctgtgtcttggaactggaattgagtttcgatgttgatgaactgattcaaccaggtgttgaaggcacgacagccactgctctacgaaaaggcagagtacgtttttcccttctggttgtaacctggttgagagcttcccctttatcagattggcagctaaacagttgtattagataatccttaaatctgacatccagcctgttacgctctagggctcgctgcttggcctgcgtttgctttttattgtgtatccgttcccctcctacggtgtgctcctgaatgaaggtttctatgtaagcagatgatgattttacctgtcaataccagcactgtattactaacatgcaaaatactgcagatttattttgaaaattaaagttaactggtcacaaa

SEQ ID NO: 390374 - DNA, 1866 bp, Homo sapiens
tgtttccctttgtcttttcaagcttattacatatctaatatactcttattatgtcttgcagcattcagttgttcaactttgtaaatatggacatcactttttttttctttgagaaaacacttgtatcagctttgtggtgttttcagggagacagctgtctgcattccctgtagaaacccagcaatgattatgcacgttgagacatgtgctttttatttcttagcaagatattttatctctgtacataaagtagaaaccaaaagctagggaaacagatactctttacaccatcatgccacgcattgtttttaaagcattgcgttaaaaaaaaaattaactaaaccaagatgctgtgattttttaagttgcaatatgtttttggtttttttcattttttaatcattgcagttaagagaaatggaaattagttgtgttaatcttgcagaatgtttgcaggactgactatcaaactggatgatttccatttataccctactgtgtcagttcaagcatcaaaataccttgcatctgagacagacttcctacatcagggacaggtatctgtgtgtcattatacaaaacagttctagggggttgaactacatagtaaaaaaataaaataaatagtacttagtgtaaaataattttataaatgatcttttgtactttaggacattaaattgtacaacttttgtatatataaaagcttaggaactttctgtttagcaggaaggcaacacattcctacacttttaatgtatatgtttgttataatgtccatgtaaacatgccctatgtttgtgccttttaattagtttgtctcaataaacaaaatgtagagaaaaatatgtagctatgactttgttacaactgttcttatccacagtacaaaaatggtttgtttttaatatgtagagcattatgtgtggactactggaaggactcgtgtagggaaagcccaagaatgaccttgctgaggcctggattgggaggcacagtggccacatttggaggaagttcacatttcctggcatgcagacccaaaactgggttctggctctgcctgctgggatctgttatctctggtgggctggcagtcataattcacaattcagacagcccaggcttcctccacagtggtccaaggagcagtcctcagtgggggcaggtgtgggccctacccctaagctagaatgtggttgtcagaaccctgaaagtattagttctaaaaaaaaaaagatatatactagaagtaattgttttatcaattcattgtataataaacaggagtgagacttcattgtatgacttcagttaaaatactattttgtatgcattctttattcacttaagaagcttgtctgcaataataaagccacgtcatgtcttcttttgggagggagagagtcgatggcaggagggggttttgggtgggccactgaaaaggggtaccgaataggttgtgtgatgaaattctgtgtcttggaactggaattgagtttcgatgttgatgaactgattcaaccaggtgttgaaggcacgacagccactgctctacgaaaaggcagagtacgtttttcccttctggttgtaacctggttgagagcttcccctttatcagattggcagctaaacagttgtattagataatccttaaatctgacatccagcctgttacgctctagggctcgctgcttggcctgcgtttgctttttattgtgtatccgttcccctcctacggtgtgctcctgaatgaaggtttctatgtaagcagatgatgattttacctgtcaataccagcactgtattactaacatgcaaaatactgcagatttattttgaaaattaaagttaactggtcacaaa

SEQ ID NO: 390375 - DNA, 1196 bp, Homo sapiens
  misc_feature (16)..(16): n is a, c, g, or t
  misc_feature (45)..(45): n is a, c, g, or t
cggttcggcctccgcnctgtgaaggcagagagccgctgccgccgntttctgtttagcaggaaggcaacacattcctacacttttaatgtatatgtttgttataatgtccatgtaaacatgccctatgtttgtgccttttaattagtttgtctcaataaacaaaatgtagagaaaaatatgtagctatgactttgttacaactgttcttatccacagtacaaaaatggtttgtttttaatatgtagagcattatgtgtggactactggaaggactcgtgtagggaaagcccaagaatgaccttgctgaggcctggattgggaggcacagtggccacatttggaggaagttcacatttcctggcatgcagacccaaaactgggttctggctctgcctgctgggatctgttatctctggtgggctggcagtcataattcacaattcagacagcccaggcttcctccacagtggtccaaggagcagtcctcagtgggggcaggtgtgggccctacccctaagctagaatgtggttgtcagaaccctgaaagtattagttctaaaaaaaaaaagatatatactagaagtaattgttttatcaattcattgtataataaacaggagtgagacttcattgtatgacttcagttaaaatactattttgtatgcattctttattcacttaagaagcttgtctgcaataataaagccacgtcatgtcttcttttgggagggagagagtcgatggcaggagggggttttgggtgggccactgaaaaggggtaccgaataggttgtgtgatgaaattctgtgtcttggaactggaattgagtttcgatgttgatgaactgattcaaccaggtgttgaaggcacgacagccactgctctacgaaaaggcagagtacgtttttcccttctggttgtaacctggttgagagcttcccctttatcagattggcagctaaacagttgtattagataatccttaaatctgacatccagcctgttacgctctagggctcgctgcttggcctgcgtttgctttttattgtgtatccgttcccctcctacggtgtgctcctgaatgaaggtttctatgtaagcagatgatgattttacctgtcaataccagcactgtattactaacatgcaaaatactgcagatttattttgaaaattaaagttaactggtcacaaa

SEQ ID NO: 390376 - DNA, 2070 bp, Homo sapiens
agcggagtggccgcgctcggcgctgccatgttgaggagccgccgctgccgttgccgccgccgccgccgccgctttgttgtcgcctcctccggctgaggaggctccccgagcggggggagtggggaggaggggggtcggccgccgcagccatggaggccaactggaccgcgttcctgttccagctattaaaatctttttttccacctgatggagaagtgtgaaaacaaatatttaatcctgggcttggcaatgtgtgcagtgaaatttgttggaaaacttaaaatttagagccgagagcagttgaatgggtaaagagaatatttcagtcttttctatggaaaggcccatgaagcttcccatcaccaacagcaggcagcacagaacagcttgctgcccctcctgagctctgccgtggagccccctgatcagaaaccattgcttccaataccaataactcagaaacctcagggtgcaccagaaacattaaaggatgccattgggattaaaaaagaaaaacccaaaacttcatttgtgtgcacttactgcagtaaagctttcagggacagctatcacctgaggcgccacgaatcctgccacacagggatcaagttggtgtcccggccaaagaaaacccccaccacggtggttccccttatctctaccatcgctggggacagcagccgaacttcgttggtctcgaccattgcaggcatcttgtcaacagtcactacatcttcctcgggcaccaaccccagtagcagtgccagcaccacagctatgccagtgacccagtctgtcaagaaacccagtaagcctgtcaagaagaaccatgcttgtgagatgtgtgggaaggccttccgagatgtgtaccatctcaatcgacacaagctctcccattcagatgagaaaccctttgagtgtcctatttgtaatcagcgcttcaagaggaaggaccggatgacttaccatgtgaggtctcatgaaggaggcatcaccaaaccctatacttgcagtgtttgtgggaaaggcttctcaaggcctgaccacttaagctgtcatgtaaaacatgtccattcaacagaaagacccttcaaatgccaaacgtgcactgctgcctttgccaccaaagacagactgcggacacacatggtgcgccatgaaggcaaggtatcatgtaacatctgtgggaagctcctgagtgcagcatacatcaccagccacttaaagactcatgggcagagccaaagtatcaactgtaatacatgtaaacaaggcatcagtaaaacatgcatgagtgaagagaccagtaaccaaaagcagcagcagcagcagcagcagcagcagcagcagcaacaacaacaacaacaacatgtgacaagctggccagggaagcaagtagaaacactgagactgtgggaagaagctgttaaagcaaggaagaaagaagctgctaacctgtgccaaacctccacggctgctacgacacctgtgactctcactactccattcagtataacatcctctgtgtcgtctgggactatgtcaaacccagtcacagtggcagctgcaatgagcatgagaagtccagtaaatgtttcaagtgcagttaacataaccagcccaatgaacatagggcatcctgtaactataaccagtccattatccatgacctctcctttaacactcactaccccagtagcagtgccagcaccacagctatgccagtgacccagtctgtcaagaaacccagtaagcctgtcaagaagaaccatgcttgtgagatgtgtgggaaggccttccgagatgtgtaccatctcaatcgacacaagctctcccattcagatgagaaaccctttgagtgtcctatttgtaatcagcgcttcaagaggaaggaccggatgacttaccatgtgaggtctcatgaaggaggcatcaccaaaccctatacttgcagtgtttgtgggaaaggcttctcaaggcctgaccacttaagctgtcatgtaaaacatgtccattcaacagaaagacccttcaaatgccaaacgtgcactgctgcgggtgtcaccatag

SEQ ID NO: 390377 - DNA, 387 bp, Homo sapiens
cagtgaaatttgttggaaaacttaaaatttagagccgagagcagttgaatgggtaaagagaatatttcagtcttttctatggaaaggtatgaatagacttaatcagttctggttttaagtaattttcactggggatatggagttaaattatcttgtttgtttcctggagcatcctgttgaatttatattttgaaacaatttaatacctgcttgctttccagataacttggtggaaagtgaaagctatagctattaaaatgtttgatggatgattcttctaacaggacattcaagatgtgactcaccgatgttaatttgttcagtacaaaatcttttaccctctggcactggagatttcatggtgccatatcctactaccctgggtga

SEQ ID NO: 390378 - DNA, 648 bp, Homo sapiens
agcctggcctgctggaggttggctcttcccaagaaagtttttagaactcagaggaactgcatgaagtagtagtgagaacacttagccctgcattgcagaagttaactgatcctctcagcatcactgtgaggtaggtaagtaaatctgaacttgaaacctaaagtgcaaggctaaacaagttgcttaagtccttgcaggaggtatagcatcagaaggtgattcatacactgggatccctggcccccaggcttgtgctcagaaagatcctctgttctgttgaccgcttgatagaaaactggaatttgatttattaaatgtttgacatttttaatgaaaagaaattgattcagaaactttgtgaattttgctcactgttttgagaatctaaagaccctttttcttcttattttagaagctgctaacctgtgccaaacctccacggctgctacgacacctgtgactctcactactccattcagtataacatcctctgtgtcgtctgggactatgtcaaacccagtcacagtggcagctgcaatgagcatgagaagtccagtaaatgtttcaagtgcagttaacataaccagcccaatgaacatagggcatcctgtaactataaccagtccattatccatgacctctccttta

SEQ ID NO: 390379 - DNA, 216 bp, Homo sapiens
  misc_feature (214)..(214): n is a, c, g, or t
gtatataggactccccactacagcagcagcagcagcagcagcagcagcagcagcaacaacaacaacaacaacatgtgacaagctggccagggaagcaagtagaaacactgagactgtgggaagaagctgttaaagcaaggaagaaagaagctgctaaccgtgtgcacaaacctccacggtctgctactcgcttgtagatgggggtaccgcagcnta

SEQ ID NO: 390380 - DNA, 4633 bp, Homo sapiens
agcggagtggccgcgctcggcgctgccatgttgaggagccgccgctgccgttgccgccgccgccgccgccgctttgttgtcgcctcctccggctgaggaggctccccgagcggggggagtggggaggaggggggtcggccgccgcagccatggaggccaactggaccgcgttcctgttccaggcccatgaagcttcccatcaccaacagcaggcagcacagaacagcttgctgcccctcctgagctctgccgtggagccccctgatcagaaaccattgcttccaataccaataactcagaaacctcagggtgcaccagaaacattaaaggatgccattgggattaaaaaagaaaaacccaaaacttcatttgtgtgcacttactgcagtaaagctttcagggacagctatcacctgaggcgccacgaatcctgccacacagggatcaagttggtgtcccggccaaagaaaacccccaccacggtggttccccttatctctaccatcgctggggacagcagccgaacttcgttggtctcgaccattgcaggcatcttgtcaacagtcactacatcttcctcgggcaccaaccccagtagcagtgccagcaccacagctatgccagtgacccagtctgtcaagaaacccagtaagcctgtcaagaagaaccatgcttgtgagatgtgtgggaaggccttccgagatgtgtaccatctcaatcgacacaagctctcccattcagatgagaaaccctttgagtgtcctatttgtaatcagcgcttcaagaggaaggaccggatgacttaccatgtgaggtctcatgaaggaggcatcaccaaaccctatacttgcagtgtttgtgggaaaggcttctcaaggcctgaccacttaagctgtcatgtaaaacatgtccattcaacagaaagacccttcaaatgccaaacgtgcactgctgcctttgccaccaaagacagactgcggacacacatggtgcgccatgaaggcaaggtatcatgtaacatctgtgggaagctcctgagtgcagcatacatcaccagccacttaaagactcatgggcagagccaaagtatcaactgtaatacatgtaaacaaggcatcagtaaaacatgcatgagtgaagagaccagtaaccaaaagcagcagcagcagcagcagcagcagcagcagcagcaacaacaacaacaacaacatgtgacaagctggccagggaagcaagtagaaacactgagactgtgggaagaagctgttaaagcaaggaagaaagaagctgctaacctgtgccaaacctccacggctgctacgacacctgtgactctcactactccattcagtataacatcctctgtgtcgtctgggactatgtcaaacccagtcacagtggcagctgcaatgagcatgagaagtccagtaaatgtttcaagtgcagttaacataaccagcccaatgaacatagggcatcctgtaactataaccagtccattatccatgacctctcctttaacactcactaccccagtcaacctccccacccccgtcactgccccagtgaatatagcacaccctgtcaccatcacatctccaatgaatctacccacacctatgacattagccgcccctctcaatatagcaatgagacctgtagagagcatgcctttcttgccccaagctttgcctacatcaccgccttggtaaacagtattataaaatcaaaatatgggtaaaagtaaatatttaccagcaacttaacttttagttgattaaagcaaaaagtaaaccatgaaattgggagattttattacattagttaataagagtgtggtagcatttttctccaatttggctgggattattcaaagtagggtgtgtatgtaacttatcactggaccactttagtttaatcagaaattccttttagctgacaacattgcttaaacaggatagtagttggcaagatgaaatgccagaattaaaaccaatcataagtagaacccacttcaaaataaaaaaacagcattactatttctaatcccaaggaatcactttattgtaaacactagcagaactcttctccctatacaaggtggatggctgattttaacctgaaattttaaatccacagattgagagctagtgtagaattgtctgtgtttattgtttttatgagtaaatacatgcattgtcataataaaatgcatttcagagaatatgcattttacctttgggaatatgttaatttcaggcagcattccctatgggaaaggtgataccagctctgatatgcaaagcatatgataatttatcattctaacttcaacgtataatagggattgtgacctgatatttggagatgtaaatattgctcagcatattaatcccgatggaatatagcattgtagttgactttttaaaaaaaaaaaaaatttaaaaaaaatctacaaattgtgttttgctaagaaaagcctcaactgacagaggagaagtcaagtgtgtggacaggcaagctcctaataaacagagtccagtgggattcctatttaggagccaaggagtactttggaacagtacaaatatattgctttaaattggaagacgctggaggcactgggatgtgatatgcccctctctctcccaatcagagcctgttgatattacaacagggacagatgtgttagttgctcactagagtttatgtcttatattaaattgtatacagtttttattctaaccactaactaggtagtgtatgccccttcagaacatgcagagtgtatctttttttaaatttctccttccgtttcttaagtattgcgcagatttgttcaactttgtaaatatggacatcactttttttttctttgagaaaacacttgtatcagctttgtggtgttttcagggagacagctgtctgcattccctgtagaaacccagcaatgattatgcacgttgagacatgtgctttttatttcttagcaagatattttatctctgtacataaagtagaaaccaaaagctagggaaacagatactctttacaccatcatgccacgcattgtttttaaagcattgcgttaaaaaaaaaattaactaaaccaagatgctgtgattttttaagttgcaatatgtttttggtttttttcattttttaatcattgcagttaagagaaatggaaattagttgtgttaatcttgcagaatgtttgcaggactgactatcaaactggatgatttccatttataccctactgtgtcagttcaagcatcaaaataccttgcatctgagacagacttcctacatcagggacaggtatctgtgtgtcattatacaaaacagttctagggggttgaactacatagtaaaaaaataaaataaatagtacttagtgtaaaataattttataaatgatcttttgtactttaggacattaaattgtacaacttttgtatatataaaagcttaggaactttctgtttagcaggaaggcaacacattcctacacttttaatgtatatgtttgttataatgtccatgtaaacatgccctatgtttgtgccttttaattagtttgtctcaataaacaaaatgtagagaaaaatatgtagctatgactttgttacaactgttcttatccacagtacaaaaatggtttgtttttaatatgtagagcattatgtgtggactactggaaggactcgtgtagggaaagcccaagaatgaccttgctgaggcctggattgggaggcacagtggccacatttggaggaagttcacatttcctggcatgcagacccaaaactgggttctggctctgcctgctgggatctgttatctctggtgggctggcagtcataattcacaattcagacagcccaggcttcctccacagtggtccaaggagcagtcctcagtgggggcaggtgtgggccctacccctaagctagaatgtggttgtcagaaccctgaaagtattagttctaaaaaaaaaaagatatatactagaagtaattgttttatcaattcattgtataataaacaggagtgagacttcattgtatgacttcagttaaaatactattttgtatgcattctttattcacttaagaagcttgtctgcaataataaagccacgtcatgtcttcttttgggagggagagagtcgatggcaggagggggttttgggtgggccactgaaaaggggtaccgaataggttgtgtgatgaaattctgtgtcttggaactggaattgagtttcgatgttgatgaactgattcaaccaggtgttgaaggcacgacagccactgctctacgaaaaggcagagtacgtttttcccttctggttgtaacctggttgagagcttcccctttatcagattggcagctaaacagttgtattagataatccttaaatctgacatccagcctgttacgctctagggctcgctgcttggcctgcgtttgctttttattgtgtatccgttcccctcctacggtgtgctcctgaatgaaggtttctatgtaagcagatgatgattttacctgtcaataccagcactgtattactaacatgcaaaatactgcagatttattttgaaaattaaagttaactggtcacaaa

SEQ ID NO: 390381 - DNA, 3769 bp, Homo sapiens
agcggagtggccgcgctcggcgctgccatgttgaggagccgccgctgccgttgccgccgccgccgccgccgctttgttgtcgcctcctccggctgaggaggctccccgagcggggggagtggggaggaggggggtcggccgccgcagccatggaggccaactggaccgcgttcctgttccagctattaaaatctttttttccacctgatggagaagtgtgaaaacaaatatttaatcctgggcttggcaatgtgtgcagtgaaatttgttggaaaacttaaaatttagagccgagagcagttgaatgggtaaagagaatatttcagtcttttctatggaaaggcccatgaagcttcccatcaccaacagcaggcagcacagaacagcttgctgcccctcctgagctctgccgtggagccccctgatcagaaaccattgcttccaataccaataactcagaaacctcagggtgcaccagaaacattaaaggatgccattgggattaaaaaagaaaaacccaaaacttcatttgtgtgcacttactgcagtaaagctttcagggacagctatcacctgaggcgccacgaatcctgccacacagggatcaagttggtgtcccggccaaagaaaacccccaccacggtggttccccttatctctaccatcgctggggacagcagccgaacttcgttggtctcgaccattgcaggcatcttgtcaacagtcactacatcttcctcgggcaccaaccccagtagcagtgccagcaccacagctatgccagtgacccagtctgtcaagaaacccagtaagcctgtcaagaagaaccatgcttgtgagatgtgtgggaaggccttccgagatgtgtaccatctcaatcgacacaagctctcccattcagatgagaaaccctttgagtgtcctatttgtaatcagcgcttcaagaggaaggaccggatgacttaccatgtgaggtctcatgaaggaggcatcaccaaaccctatacttgcagtgtttgtgggaaaggcttctcaaggcctgaccacttaagctgtcatgtaaaacatgtccattcaacagaaagacccttcaaatgccaaacgtgcactgctgcctttgccaccaaagacagactgcggacacacatggtgcgccatgaaggcaaggtatcatgtaacatctgtgggaagctcctgagtgcagcatacatcaccagccacttaaagactcatgggcagagccaaagtatcaactgtaatacatgtaaacaaggcatcagtaaaacatgcatgagtgaagagaccagtaaccaaaagcagcagcagcagcagcagcagcagcagcagcagcaacaacaacaacaacaacatgtgacaagctggccagggaagcaagtagaaacactgagactgtgggaagaagctgttaaagcaaggaagaaagaagctgctaacctgtgccaaacctccacggctgctacgacacctgtgactctcactactccattcagtataacatcctctgtgtcgtctgggactatgtcaaacccagtcacagtggcagctgcaatgagcatgagaagtccagtaaatgtttcaagtgcagttaacataaccagcccaatgaacatagggcatcctgtaactataaccagtccattatccatgacctctcctttaacactcactaccccagtcaacctccccacccccgtcactgccccagtgaatatagcacaccctgtcaccatcacatctccaatgaatctacccacacctatgacattagccgcccctctcaatatagcaatgagacctgtagagagcatgcctttcttgccccaagctttgcctacatcaccgccttggtaaacagtattataaaatcaaaatatgggtaaaagtaaatatttaccagcaacttaacttttagttgattaaagcaaaaagtaaaccatgaaattgggagattttattacattagttaataagagtgtggtagcatttttctccaatttggctgggattattcaaagtagggtgtgtatgtaacttatcactggaccactttagtttaatcagaaattccttttagctgacaacattgcttaaacaggatagtagttggcaagatgaaatgccagaattaaaaccaatcataagtagaacccacttcaaaataaaaaaacagcattactatttctaatcccaaggaatcactttattgtaaacactagcagaactcttctccctatacaaggtggatggctgattttaacctgaaattttaaatccacagattgagagctagtgtagaattgtctgtgtttattgtttttatgagtaaatacatgcattgtcataataaaatgcatttcagagaatatgcattttacctttgggaatatgttaatttcaggcagcattccctatgggaaaggtgataccagctctgatatgcaaagcatatgataatttatcattctaacttcaacgtataatagggattgtgacctgatatttggagatgtaaatattgctcagcatattaatcccgatggaatatagcattgtagttgactttttaaaaaaaaaaaaaatttaaaaaaaatctacaaattgtgttttgctaagaaaagcctcaactgacagaggagaagtcaagtgtgtggacaggcaagctcctaataaacagagtccagtgggattcctatttaggagccaaggagtactttggaacagtacaaatatattgctttaaattggaagacgctggaggcactgggatgtgatatgcccctctctctcccaatcagagcctgttgatattacaacagggacagatgtgttagttgctcactagagtttatgtcttatattaaattgtatacagtttttattctaaccactaactaggtagtgtatgccccttcagaacatgcagagtgtatctttttttaaatttctccttccgtttcttaagtattgcgcagatttgttcaactttgtaaatatggacatcactttttttttctttgagaaaacacttgtatcagctttgtggtgttttcagggagacagctgtctgcattccctgtagaaacccagcaatgattatgcacgttgagacatgtgctttttatttcttagcaagatattttatctctgtacataaagtagaaaccaaaagctagggaaacagatactctttacaccatcatgccacgcattgtttttaaagcattgcgttaaaaaaaaaattaactaaaccaagatgctgtgattttttaagttgcaatatgtttttggtttttttcattttttaatcattgcagttaagagaaatggaaattagttgtgttaatcttgcagaatgtttgcaggactgactatcaaactggatgatttccatttataccctactgtgtcagttcaagcatcaaaataccttgcatctgagacagacttcctacatcagggacaggtatctgtgtgtcattatacaaaacagttctagggggttgaactacatagtaaaaaaataaaataaatagtacttagtgtaaaataattttataaatgatcttttgtactttaggacattaaattgtacaacttttgtatatataaaagcttaggaactttctgtttagcaggaaggcaacacattcctacacttttaatgtatatgtttgttataatgtccatgtaaacatgccctatgtttgtgccttttaattagtttgtctcaataaacaaaatgtagaga

SEQ ID NO: 390382 - DNA, 446 bp, Homo sapiens
ggaggttgcagtgagccaagatcctgccattgcactccagcctggacaacagagcgagactccgtccccccttccccctccccccaaaaaagaatatgcaggatactgagtgaaaagtacccattggatttaggaatttacaggtcatttcaacacttagcagagcagttgtgtggtgggaaacaccatttagtggtttgaaaagtgaatgggtaagaagtgaagcaactaaataccagctgtcaaaaggacacgagattgagcttcatagaggatatggggatgagcaaggattgtttttgttttgtttctttacttttttggtattgtttttaaaagaaacagatttataaatgtttaaatactaatggataaaataaaagtgagagtttgcagagagaggagagagtctgatgttctagaagaggcggaaggaaagatgcaca

SEQ ID NO: 390383 - DNA, 1254 bp, Homo sapiens
ctaatctccagcctctctggggagtaggtgattatctttcattgagaaaccaattagagctgcccttcctcccctgagaccccctccctcgtccccctctcctagtcactccgtgagaatacgcgcgcgccaccccaccgacagccgagttgctagcagagggttggatcagagagcctggtcccactccatcacacaaaactcactcttccacgctatatggtaccaagggaagggggtggggtggggggggggagatttatgccacttgatccttgaaatagcaacaattaccatgtgatctggcggatgacgcagcgcttgtaactggatcctaaagagtgtgagtgtgtgtgtatgtgtgtgacatttcgtaaatattaaactgcctttagacagtaacctgcacaaattcatcttggtctttgacttttacttcttttctatttttgatgcctggatggattcagaaaggaaggcgtgtgtgtgtgtgtgtgtgcgtgtgtgtgtgttagttactttgaagtctcatggttctgaccctagtaagaatgacagggcaataccagttccaaggtttttcagcgtaaagccttactggacagagtgaactaaaattgttggtggggaagttggatgaacatagggtaatgagccaaatgattacggaaaagagaaaggccatgtgttaactgtaaactttttgtgtctggctttttttccatctactacccttcagtcttgtatacagagcatccaaattatatcacaatctcttcctcaatggctcagaagtggtggccaccagtgctaagctgggtcacactaccagttccagtttgggggagaaattgcatctttaattatctgtgtttaggtcttacctgtgcatccaccatctaccctatgctaaaaggattattctgcacagtagaataatcgcgtattcacggattcttacaatttccttttttatatctatgtatcacagagagcatttacataacataagtcactatttgagagtttgatttgatagggaatgagaagtatttcttctgataatagtcaacacattggtaatttttttaaggaaaaaaatagttgcaactaagataccaggagattctttcctaaattgtaacttttcttaaaaaagaaaaatcaatgtataattactggctacttacaaaaaaaaaattattctaccttttctgaaacaactaaataaaggaaaaacaggtgtatatttta

SEQ ID NO: 390384 - DNA, 590 bp, Homo sapiens
ctctgcctctgcgggctgggggaccttgcaggggttacataaccagtctgtggttcagctggctcaggtgtggaggaggacagcagtggtcccgacttcacagggttgctgtgaagattaaatggcacttggggccaggcacagtggctcacacctgtaatcccagcactttggaaggccaaggtgggtgtatcacttgaggtcaggagttcaagaccagcttgaccaacatggtaaaacctcatctctgctaaaaatacaatagccaggcatggtgccatgtgggtatagtcccagctactcaggaggctgaggcaggagaatcgcttgaacccaggaagtggatgttgcagtgagctaagactgtgccactacactccagcctgggtgacagagtgagactccatctcaatcattcaatcaatcaatggcacttagactggaaagtacctgcattgctgcctgatgggagcagaggtttgaaggacagcctctactgagcatcacactgttgtctttatagttgttgttataaaataatacgtcaagttccttgaacaccgtgcacagctgtaaaatactgaaagtaa

SEQ ID NO: 390385 - DNA, 323 bp, Homo sapiens
accatgttggccgggctattcttgaactcttgacctcaagtggtccacctgctttggcctcccaaagtgctgggattacaggcgtgactcccttctcttatcttactgctaggagaacctaggcttaaagagggagggagacttgcttaaggtcacacagcaagctaacagcaacaggctagaatagaccccagataactttccaggatacagggttttctgcaccacccagagctgcccaggatgagtaatgtccacagccactctttattgagccattgttaagctctagatgccttagtccttctggtcctcacaactaa

SEQ ID NO: 390386 - DNA, 963 bp, Homo sapiens
gggaggtttaagtctgcagaagtttctgctgccttttgttcagctatgccctgcccccagaggggagtctacagcaacaagcaggcctccttgagctgcagtgggctccacccagttcgagcttcccggccactttgtttacctactcaagcctcagcaatggcggatgcccctccctgagccttgctgccgccttgtagtttcatctcagactgctgtgctagcagtgggtgaggttccatgggtgtgggaccctccaagccaggcgcaggatataatctcctggtgtgttgtttgctaagactgttggaaaagcgcagtattagggtgggagtgtcctagttttccaggtaccatctgtcacagtttcccttagctaggaaagggaattccccgaccccttgcgcttcctgggtgaggtgatgacctgccctgcttcggctcatgctctgtgggctgcgcccactgtacgacaaatcccagtgagatgaacccggtacctcagctggaaatgcagaaatcacccgtcttctgtgtcactcatgctgggacctgtagactggagttgttcctattcagccatcttggaacccttgggcagatcattgtatattttctaataccacacatgaaatggctaaacaattatttaattgtggattccaagaataacctgacccttttcattcataatgctatacatagagtacacagactgaaagacaagtggctggacacggtggctcacgcctgtaatcccaacactgggaggccaaggtgggtggatcacaaggtcaggagtttaagaccagcctggccaagatggtgaaacctcatctctactaaaagtacaaaagaaaattagccgggtgcagttgcgggcacctgtaaacccagctactcgggaggctgaggcaggagaatcacttgaaccccgggggcagaggttgcagggagcagaga

SEQ ID NO: 390387 - DNA, 409 bp, Homo sapiens
tgaatgtggccgctgtgcggatacgccccccatggtgaatgtggctgctgtgcggataggccctccttggtgaatgtggctgctgtgcagttatgccctgcatagtgaatatgggtgctgtgtggatacaccctccatggtgaatgtggctgctttcagactcagccccacctcatttgggccctgggagttggtggttcaccttgtgatcccagacagcatcagagatgggaaaagagcctgttgcctcagtgagcactacattcctgaaggaatgaaccgtctttgaagggaaacacttaacgttttcaaagaagtcctttgagctttctaagaaatgaaccttcttttcttccatggcttttccctctgggactttgaaatcttttccaacatgagctcagcaaaa

SEQ ID NO: 390388 - DNA, 732 bp, Homo sapiens
gtctttccagccgccctgtggggaaggtgtcttgcttccccttcaccttccaccatcagtgtaagtttcctgaggattccccagccgtgctgaactagatgtggtctcactgtgttgcctaggctagtctcaaactcctggcctcaaactatcatcccaccttagcctcccaaagtgccgggatcacagatttgtcccatagcataagattcacactcaatactatcatcctttgggtctctaagacaccaacctaaaagcagaagaaggcttcaaaggtggaagaagatgtgagcctgggtgattgaaaaatagatgtgccattaccctgaaataggacttcttcaaggcaaaggctgatacagtggtggctacagtctatgttgtgatttgatggaacttttcacttttcaccattcaaaccagtatccagaggtacagttgctgcataacttcctcattatccataggaccaaactaaatgtctctggtttgaaattttgactagaaattatatacatctgccagcaattattgtgggtgtaactgaagtgcacactgctcactgcccctcaataacatcattttcaaataataacattggaaagaggtactttcctaaaactttcaagtgatctacaatctcccagactacttttacaatggattttttttttttttactagatgtgttatttcaattttggccgctaaccaaaaggcaggacattgc

SEQ ID NO: 390389 - DNA, 118 bp, Homo sapiens
ctgcctcagtctcctgagtagctaggactataggtgcgcaccaccacacccagccaatgttttaaattttttgtagagatgggatctcgctttattacctgggctggtctcgaattcc

SEQ ID NO: 390390 - DNA, 393 bp, Homo sapiens
atttcccccaaattataattctcagggagaaagggttagggaaataaatttagagagaagagtggcagatgggacagatggattcaattaaggcaaagaacatcaaataattccagggatgcctcattctaatggaacatgtcattttctcctcattgcctccaggtaactcccaacagtctaggtaggaagtagggtgctcacaccgtgcctcaaccacggcaggagtttaatatcctcaaatgagagagctaacattccctcttctcttcttttcagtaatgtggtgaaacagcacatgaatcagactaagtgaatgcaggatacataatagatgcacatttctacagaaccaggtgttattcaagttaaataggtattttccattgtcat

SEQ ID NO: 390391 - DNA, 188 bp, Homo sapiens
tttctttcattctttgaacacatttataatgatgttttgaagtctattactgttaaatctgacatctgtttacgctcataggcagtttttgttgcctgccatttttttttttttttttttgcacatctcattatatatttcttgtgatctttggaaagtgaacattttacagaatacattatagcaac

SEQ ID NO: 390392 - DNA, 868 bp, Homo sapiens
tttgtgttgggccgcattcaaagctgtcctgggccacgtacaggctgtgagttggacaagcttgatctaaattaatgaagattattttgtctttcaaaatgatttttgcgccatcacaattaacagctaagtctcatctttttatacattagggctgattatttctattttgtgaaacaagattttaatccttaattcactaaaaatgcttgcccttcctataatagtgtaaaaagaccagttgatttttgtgcatgaaaattatgagctaggtataacaacatcgtgtgtttggtgcctactcatccctaacaaacaatgttcagctctcagtctacttctctgcattgtatttataaaaaataaattgtggctcagaggttaagtaacttcccaagggaagctggaaagcaaagagcttgcataagaacccaagatggctagaccaccaatcttctggtagtcaccacagggaaagtttgatgaaatgatttaaaagattggaaaactatttgaaataaacgctcatttgcattgatagctacttttggaatatttttcttctaatcaagagtttaagaaatattgttaaaatgtatcttactgaggaaagtaacttgcaaaaaacagtacattgccaaaagcagtatacacattgcctaaccaacacttaacccagtgtctatgaacttcacattgcctcacgccatatggaatgtgttgattcattcactgttccgtttttatctacaattttggtttaacaaggctatgtatttaaaataatttttaaactctttacaggtaagtcacttttgagttgtaaaattccagaagtgacttttcttgaagtaggctttaatgaaaa

SEQ ID NO: 390393 - DNA, 246 bp, Homo sapiens
cgcacccacacgggtgagcgccctttctcctgcgactggctcgactgcgacaagaagtttacgcgttccgacgagctggcccgccactacaggacgcacacgggcgagaagcgcttctcctgccccctctgccccaagcagttctcccggagcgaccacctgaccaagcatgctcgccgccactcaccagcgaggtggaaagctccgcctccggctccggtcccggcccggcgcccagcttcacca

SEQ ID NO: 390394 - DNA, 660 bp, Homo sapiens
ccagaacttccaccccgactccgaggctgccatcaaccgccagatcaacctcgagctctatgcgtcctacgtgtacttgtccatggcctattacttctcccgggatgacgtggccttgaacaacttctccaggtatttccttcaccagtcccgggaggagaccgagcacgcggagaagctgatgaggctgcagaaccagcgaggaggccggatccgcctgcaggacatcaagaagccggaacaggacgactgggaaagcgggctgcatgccatggagtgtgctctactcttggaaaagaacgtgaaccagtcgttgctggaattgcacgctctagcctcagataaaggtgacccccatttgtgcgatttcctggaaacctactacctgaatgagcaggtgaagtctatcaaagaactaggtgaccacgtgcacaacttagtgaagatgggggccccggatgctggcctggcggagtacctttttgacacacatacccttggaaatgaaaacaagcagaactaagccacgagctgccttcctcccaggctagtggatccaaagaccaaagtcagctgtctcctgctttcttgcccttaaaatcacctccatctttatattcttctgttatactattcctccaataaagtgatttgtagaaa

SEQ ID NO: 390395 - DNA, 717 bp, Homo sapiens
gagcacctttataatccccacctagagacccgggtgggcagcccaaggagaacatggtggccgggcagggcccctctttgctggctctgccaccctcaacaggcagcttccgtcgggtgccctgcgggcagctgtaaatgatgtgcgtgcgcggggagtgcgtggaggagggaagtgcggggaggggaggaagtggggggcttcaagggccaccactgaagtcacatacaccgcttctgtttcatctcattggccagagttttagctagggctgcacctagcagagcttgggaaatgtttttagtcaggtgactctgccactcatgggtgttctattaataaggaacacctttcatcacaggccaggggttggaaatgtacagccttgggcctgtttttgcaaatgaggttctgacaggcggccacacccattcatttacgtatagtacgtggctgctttcatgcctccaggcccaggtgagtagttggaacagagactttctggcccacaaggcctaaaatacttcctctctgaggcaggggcgcggtggctcacgcctgtaatcccagcactttgggaggccgaggcaggcagatcacctgaggtcaggagtttgagaccagcctggccaatgtgatgaaactctgtctctactaaaaatacaaaaattaacctggcgtggtggcaggcgcctgtaatcccagctactcaggagg

SEQ ID NO: 390396 - DNA, 868 bp, Homo sapiens
cttagttgaaacctattattgaaaagtttgtaagctcttagaaggtggtaaatctatctccatttctctcaggcattatctgtcaaagttgaagtgagcttagcaaatatttttcctggagttaagttaaagtagaaaagttaaacttaaataagcttgagtattctccactaatctttatttctgttatttcctatttgacatttatctgttaacacacttctgtccatagtacacacagtagttgacagagccaagatattggaattgttttggctctgggatggtgagtgataagtaaattttccccctttttctttcaccttttatttgcaagcaactagttggcttatgtttcctttgaaggtgtagagttaagtactccagcattcactgggtcttctctgtggctgacccaaaggtctctgatcctttcttttgaaattggtgagattgttggtccactgggcatattgaaccatccacattgcttgctctttctaaattgtgctgtagcacctgagctttctaacttggtgttatttttgtctttctgcttagttatgtgtaatggaacagtatagttgacaaaggattatttagaaaattttcatctctcttaccccctattttgcagagtgtgagctggcgccatgtctaattcaacggtatggcagtagctgtttttataaacattttcctccctcttccattagtgtatatgtagtgaagttgactttttaaagtaaattgagcatttttagatttggaaggtggctcagcagtaatctaggcagcagcttcaagatcatttcaatgctatttgttggattggaattttcaggatgcttagatatatctctcatgt

SEQ ID NO: 390397 - DNA, 671 bp, Homo sapiens
agtacccactgatgttggaaattcaacttgttccaatattgaggactgcctatacctggcatatgcgtgtcccaatttgagaaattgtttttcaagttgacttgtatggattccttacagacgctcaagcatcagtttggttttccctaaatcctgcagatcaggaaggcagtatccatgtttgctttaagaaatttcattactataaatatatgaaatattataaatataaaaattcatatattataaatatatgaaattttgtctgcagaatttttttctcaacaggcaatcctgacataataaccaattttgagatgcttcaaaaataacactgcagtagtagccactcctaaaacaaaatatttcccctttccttcaatatatgtaatcacatatgacatataaaatctgcttattggataaatttatctttaaaagactatctatatttattaaaagttaaaatacatatactctttgacctggaatcaagtacaacaatgtattttacagagctaccagcacacgtgtggaattatatatgtacaaggctactaactgaagtattagtatagtaacaaaaattaaaaatcaaccataaatagggaataaataatggtacacctatgaatgaaatactaacttctaaaacacaaagtaaaaagaaa

SEQ ID NO: 390398 - DNA, 340 bp, Homo sapiens
aatttagccttctgatattgtagtatttaataagggtttctaaaaacatatttcccttcaagagttgggcaagtgccctcattatgataatctatggtattttcatctgatctgctgagatttctgtctttgtaaggatggaataattttcctcttactaagaaatctgtgtttatctacagatttctcctgtggctcaaagtttcaagtcattaaacttacaattgttaattcaataagtgttcactaatgccttctatatgattagcaccgtgctagatggtgaagatacaatgatgaatagtgcatttccccaaatcatgaggagtccagaggttgg

SEQ ID NO: 390399 - DNA, 481 bp, Homo sapiens
gtaaacctccatccaacaatgttgagtatctcattagtctccaaacaaaaagagattaaaatttgaaggtgattgattggtttcaggagtttgtatgtaattatcctatactcctgcctatgtgaaaatatgaattctagatctacatggaacagtatatatagtagccagtaaccatatatgactatttaaagaatgaggccaggcgcggtggctcacgcctgtaatcccagcacttgggaggctgaggcgggcggatcacgaggtcaggagatcgagaccatcctggctaacacggtgaaaccccgtctctactaaaaatacaaaaaattagccaggcatggtggtgcgcgcctatagtcccagctgctggggaggctgaggcaggagaatggtgtgaacccgggaggcggagcttgcagtgagccaagatcgtgccattgcactccagcctggacgacagagtgagactctattctca

SEQ ID NO: 390400 - DNA, 418 bp, Homo sapiens
tataagggtgccaagcctggccagcacaagcacacccaaaggcagttgccagctgtgcttcattggcagagcctttatcaccatccagaggtcactgagcaaaggaaaaacatggaaacacaccatcaggcggcatgtcttaaagcacccaattgtttttccagtgggcaccaaagaccagtgctcgcattgtttcctggtttaggctttctcagttttaactcagattatcatctattctcaggatcttgtgtatctcactgttagaatgtacagactatctcaccccagcccacagtgctgacctcaccttggctgtagggctcttccatggatgaatgttctccctaattagtcaaatacagatctctaaaaacctcaaactcacaattaagggacctcttttattagtggtcaa

SEQ ID NO: 390401 - DNA, 927 bp, Homo sapiens
actttgggaggctgaggccgacaggattacctgaggtcaggagttcaagaccagcctggccaacatggtgaaacctcatgttgtctctactaaaaatacaaaaattagctgggtgtgggggcaggcgcctgtaatccccggtactctggaggctgagccaggagaatcgcttgaacccggaggcagaggttgcagtgatccaagatcgtaccactgcactccagcatggggaacagagcgataatctgtctgaaaaaaaaaaatggaataatacaaaattatactaagattcattcatgttattttttgtggctgcagtgcattcatttccactatatagtatttcattgtctgatgtaccagaatttatccactctctttttgatgcatgtttggatttgcagtcttttgctttatgaaaagtgctgctgtaaaaattattattatctgtctcctgatgcatatgtgaaagggtttttctaggagtgaaattgctggataatatgtaaataataaacataagaaaatgtcaaattcttttccaaagtagttaatcaagttatactccaccagcagtgtataaggagttctcattgatccatatcttctccaacatttaggtttctcacagttttacatttttttgccagtgaaatgtacataaaatgtatcttatggtttaatctttgtttttttttaactcagtctttctgcttttattctttattctctattgaaaataatttggtttagatttagacttagattgataaaattaaaaaaaaaaagaatttgggctgggtgtgttggctcactcctgtcatctcagcactgggggagactcagatgggtgcatcacttgagctcaggagttcaagaccagcctgggcaacatggtgaaaacccatctttattaaaaaatacaaa

SEQ ID NO: 390402 - DNA, 542 bp, Homo sapiens
actcagtgctatgatgtcctccctggggtatcgaggctcgactactgtactcatcgtgtgagtcgctgaaaggctttgttatctactccatggtctctttgagaaaaaaggcctggtcccattaagctcttgcctcgtttttgcctttcagggattattcgtgctctgtgttagatgtgaacttttggttaggtacataggaaatatctacctaagacacttgtgatttccaccaagtttgaaacagcaatctaaaagctaactcattcattaaatgatggaattgttaagttggtataaagtgatggtacaaaagcccatcagggcaggtttgaaatctaaatgcctttcagtatgcattgaacatgcgcatccatgagaaaatagtatgataaagaaagcagggtgtgaccttattggattcatatttccttatagaacctccaaattaagacaaatttccagacatttctaaaagcagcaatacaatcaagaaaacaaaacaatgagattcagtatgtagctactgcaaatttgtcaga

SEQ ID NO: 390403 - DNA, 672 bp, Homo sapiens
gtagaaatgcagtttcaccatattgcccaggctggtctcaaactcctggggtcaagtgattcacctgcctcggccttccaaagtgctgggattatgggcatgagccattatgcccagcctaatttttattattgaagatgttacttctttttgtttttcctaagacttggcagtggtttcaggcatactttttagtacctccttaaagaaagaatccattatccaaaagggtggcttggaatagttggaaatgagtgtgctctaacctttaccttcaccttcatagaagagtgtggtgaattgaaaatcactctacaaatgtctttctgaaggactttcccaattagtgggacgtagtttataacaatacattggttccctcaggatcagcggttaatctgtctttttattgaagcaggaaacaaccaggacaagatgagctcataaagtatagagcactatctctagaggaaaaattaggagagaccaacagaaccatctaagatcatctaagaacgtaagatgtagtaggttattatcgtgcattattccacataatttactacttagctaagaatccaagcaggaactacaagctattattagaaaagcaagctaaatagtttgggatgaataacctcatatcccatgcattcacctcccattaagaga

SEQ ID NO: 390404 - DNA, 216 bp, Homo sapiens
gaggagttcctccagctgtacccttaagacctgcgcacatcgctgtttgtaagtcgtatctggataagtaaaaaagaaaaggaagcacaccaagcagagccgaagtgacaaactgaaacatatctgagcttccgggagccagggccacaccctggtcatcagccctgtgcttggagacccagactccacctgacccctatcctcaggcctttcatg

SEQ ID NO: 390405 - DNA, 148 bp, Homo sapiens
caaaacacttcgtgtaggtgctttggttaactgcatgggggcagcagagcgacatggagcgctcacaaagctatggagctggccgggcctgagttcacatcaaatacatacctctcacttagtagttgtgcgactttattttcattta

SEQ ID NO: 390406 - DNA, 201 bp, Homo sapiens
ctagctgtgactgcagatgcagaccatcacacccggctaatttttctatgtttttagtagagacggggtttcgctgtgttgcccaggctagtcttgaacgcctgagctcaagtgatccgcttagtactatggttttatttggtgctttctttgaaagaacattaatgaattctcttacattatcactcattttgtttttct

SEQ ID NO: 390407 - DNA, 228 bp, Homo sapiens
atggcaccagggagtgtgaagagaagaggatgaaggaagacttcactgattgctcctgctgctgcaagaagcacttgaggcagctggtgtgggagccccaaatcacccgtaagtgaaggcaggaagagcagggaccatctctagaccagcgcttagcaggcagtgcaggggagctctgggccaggaagctggggctttgaacattgtggggtttgatgatgagagagg

SEQ ID NO: 390408 - DNA, 327 bp, Homo sapiens
tcaggcatagagcccgtagagaagatgctcttgtccagctggagccagtctgcttactcccaggaatctttaaaaacatgcacaccataatgattttattttaaaacttaataaatctgcattattttccaatgattgatgtcgaaccaaggccctttccaagggagtgcttgcgtttgccacttggaagagccaaggacttttgaacatggattcattgcttggagccctctcttgtgtaaagcatgctcgtaatgtatcacttactgttaccactttggatttcttcaaagtagagcaaaacttaggtgtacttagaaatctgag

SEQ ID NO: 390409 - DNA, 380 bp, Homo sapiens
accacaaattgacattccttcttttagtacctggtatggtattacaggcttcattcacatatagaatgttttcattttaagttttttaaagttgaagaatcttgaatataaagaaacatttatccaaatgagagttgtactacacattggataaatatagtcgtcccttaactgagtccttactaattttattgtgtcactattgtgctgcaaaacccagatatgcaatgtaaggaataatttagaggcttaaaatggcttgacacaactatcattaaatacatctcttttaacaagtaaagggttgattttttgttgttgttgtttgttttttgagatggagtctgactctgtcgcccaggctggagtgcaggggtgtg

SEQ ID NO: 390410 - DNA, 343 bp, Homo sapiens
gggcattgtttatgggggttgcgtgagtaatagaattcctgatggagacaggagatgtggaaagagagaggtaagaggggatcgcgggggcagagcgaagtatgaaatacaaagagccagggcccagcctctctgctatgccagcagtgacattcgggctgggtgattgtggcagggactgtcctatgcattgcaggatgttgagcaacatccctgggccccacctgctaagatgccagtagcagtacccccactcctatagttatgacaaccaacaatccttccagatattgcccaatgtccctgggtaacatcacttggttgtaaactactgccttaaaga

SEQ ID NO: 390411 - DNA, 1463 bp, Homo sapiens
cggggagaggtgggctgggctgcaggtcctggcgttgtgctggatcatcgcgcccgtactctgaagttttctccgtggcgctccttgagaggggttcctcctgcatcttgagaatattttgcatttcggctcccttctcttctcgctgccatcggatgccccaaataggtcctgtcccctcggtgaatcagacttcggaaaccgcctcgcttcagggtcagagtccaagtacagatgagcttgaggattctgaatgcacgcccggctctagaccttacagacacacgcttggacagacttctccatatacgacccaggaacggaccccttgagaagggattcttcacgcccgctgccctctccagcgtcctggccagtggcatcgcgttcccaggaaacctcgcttcagatattgcccaccaccccgccctattcacggttcctgggtcttcctggaggaatgacatctcagagaatgcggactcctatgttcatgtcatttgagccgccgcgtcccttatttgatgtaccccttgttggtcccggaggatggcaactagacaaaaggtcacaggcccccacacccgctccataacggcttcttggctttttgtttcttttaagcaatgaggaaagagatgactttcgtgaaaacttttgctggagaagagatccttccctctgtatatgtgtgtgggatgggaagtgtcagactcagacctttagctccttgagatcaaaaaggtttcgtgtttgctttcgtctcttctttgcatccctagcgtctttaaaagagtaggcaggcgcggtggcacatgcctgtaatcccagcactttgggggtcgaggcgggagtatcacttgaacctaggagttggagaccaacctgggcaacatagtgagacctccatctctacaaaaaataagaaaattagcccggtgccagtggtcccagctagccggtaggctgaggtgggagaattgcttgagccaggaaggttgaggttgcagtgagctatgataacaccactgcactcctgcttgggtgacagagcaagaccctgtctaaaaactatatatatatacgtgtatatatatatatgtgtgtatatatatatacgtgtatatatgtgtgtatatatatacgtgtatatatatatgatgttttctattttattttatttttgcaccttttgtactcctcctggagttcatcctgacagacagaggtttgtctggagccagagctcacaaatagttggaactgccctaaggatgccattttgttcttaaatataactagcaaatattactcaaagctgtgcacgatccccaaaccctggtccccaataatttgaataatctgaatatgcaagttaaggtattgagatgggaaccctcctgtgtggtatatcttgctcttatcctttgtgaagccaataaacttcaatttctactctcata

SEQ ID NO: 390412 - DNA, 323 bp, Homo sapiens
accttgcccttgtcaccgaacctttgtggaacgctttcaccccagctctccacatggctgggctccttctcccgctggagagccaccgtcacatcctcagagaggttctgcctgagtcctccctccaacgccgcccccaaagccattctgccttccgccagtttcattgcctccgtagaacctagaaccgtgtgaaatgatctgaggcttcctccatgcactggttctgcccgtctccctccccacttccttctctgccatccccccaaggcctggcgagtagtaggtggtcagtaaacacctgttccgtgagtgccgggtgt

SEQ ID NO: 390413 - DNA, 481 bp, Homo sapiens
gtacttactctcatgctagaatttctgatgatgggagcaaacaatagtaaagaaaagaaattccttgcctaattatggagtggagaactgacgaactctatcacatcttgggactaatttcactgctctccaatgaatgcaaatgaaaaggggaatatcccccagggtagcattacagtaaatgaatacattcacattaacaagacagtgttgggatacttttatttgaaaggatataactccttacttatcctttaagaaagcatgtgtccgacaaaaaatgctatagcagactaagggaggtaattttaaaagagtactatctaccagataataaaagtgaagaaaggttttcaaatgactgttgccaaggagaaaactgaaaaagctgggaccaagagttccagtgcaggactgttcttgcaaattctgaccacattgtagctactttgcactattattccccaaatggaaaaggcac

SEQ ID NO: 390414 - DNA, 459 bp, Homo sapiens
gggcctgatcccatagattatgaagatgaagtcttagtgggatgagaagccattggagggtttggatcaggggaatgtcgtgaaatgatttccattttagaagattactgtcgctgctgcagaagagtggatggtaatggaatgacatggcagcagggagatttattaggaggctgtggtagtgatccagtccaaaacagtacagtagattatatgttaaaagcagaagcattgaaaatgcccagatttggagtctgttttcaaggtggaactgtcaggatttcctggtagagatacatctggattatatgagtcaggatcagtagtataaactttggaatcgtcagcatagaggtcaggtttaaagctgtgacactgaatgagcgcatctaagaattaaacatagctaaagaagcagtttcaggactgagccctgggacactataggttttagaagag

SEQ ID NO: 390415 - DNA, 248 bp, Homo sapiens
tgacttcacaccatttacatttactctcatcagcaacattattcagtacccagtatattttaatcagcaagtcattcaattaatagctatagatacagccaaaaggcacaaaatgcaataaaattcacctgcatgtcaaaggaacattccactttcacaaaaagtctatagcaacacatctggataaacctgcgtcatcacaatgtgaataacatgctgagttctgccaatatgcaggtttgcagatt

SEQ ID NO: 390416 - DNA, 337 bp, Homo sapiens
agcctagaaggtagggatacatcacatctagagtagcctcagtagtatttattaccaagtgatgccttcaagttgaagaatcccaatacaagagtcttggataaaatgagagattttgtatcccacattacaagagatttggggtggatggctccagaccaggttattcttgagcactcactgatggcagaactctagcttggtttccctgtggtctcatggccttcttttcatgactacaaaaagatgaatgttgcttcaattttcaggccatcacacaaccttctggagaggaagacaaagaaactatatcttcctggtgcctctttttatcagg

SEQ ID NO: 390417 - DNA, 212 bp, Homo sapiens
tggcatggtgccctcctaggtcatggttgtccctccttgttgttcctgctgtcttcttcagttacatctgcttctctgcatttcctcattttacagtgtgtgggacgcagtcatctctgaacaggaataggcaactgtgcacctgttacaccgtgcttgatgctctgcattgatgtacactgggcccaggtttccctggtggactgcttggg

SEQ ID NO: 390418 - DNA, 1127 bp, Homo sapiens
tggggtagagccccggaaggggggccatgggggaaacctctgcccgggggggttggggtgggagcctggagatagcgctcctggagagggcagagtaggggaaagctgtgcccaggggcagggacgggagcttggaggtagagccccgggagaggacagagtgggggaaacctctgcctagggtgctgggacgcgagcctggaggcagagccccgggagggtactgcgtggaggaaacatctgcccacaggttctggggcgggagcccgggacgcggagggccgcgagccgagggaacctgggggtggggaggagggggatgcggtaggggaggtgctcctgggtccgcgcgggtggcgggtgccgcgcacttatccgttggccagctgcgttccgggatcagctaccagacggtccctgagatgaccgggaaccgggctgggggaggatagagccgagactggaggatcgattggcacctccgcccacttttcccacaacgccttcccgaacgataggttggaaaggctcctggatccaaactcgctgagggccaggcaagaaaatgtcctcaaatttattgccaacactgaattctggaggttaagtctggatacaagcattccatatggaggttcacatcaggggcccaactccttctggcctgttcctgggctatgttcttggtccaagacggctgcttccacaccagtgattacatccatattcctgccagccaggagaaaaggggaaggggggacatgccctgaagttgcattcaccacttccgctgacctgcctccaagggaggctgagaaacatagcctctactctgagtgttcatttagggttctattcctatagaagaaggaagaatggatattgggggttcactagtagtatctgctccactaccattttttttaaaaaagcatttaaaaggagccatgtttggaatttattctacagatatgtatgcacaagtgattaaagatgtgtgtacaggaatatttattgcagcattgtttacaatagcaaaagactggaatcaatcataatgtccattggaaagggttggttatgtaaactataatacaaccagggaatgggataatgggatactagac

SEQ ID NO: 390419 - DNA, 996 bp, Homo sapiens
tggggtagagccccggaaggggggccatgggggaaacctctgcccgggggggttggggtgggagcctggagatagcgctcctggagagggcagagtaggggaaagctgtgcccaggggcagggacgggagcttggaggtagagccccgggagaggacagagtgggggaaacctctgcctagggtgctgggacgcgagcctggaggcagagccccgggagggtactgcgtggaggaaacatctgcccacaggttctggggcgggagcccgggacgcggagggccgcgagccgagggaacctgggggtggggaggagggggatgcggtaggggaggtgctcctgggtccgcgcgggtggcgggtgccgcgcacttatccgttggccagctgcgttccgggatcagctaccagacggtccctgagatgaccgggaaccgggctgggggaggatagagccgagactggaggatcgattggcacctccgcccacttttcccacaacgccttcccgaacgataggttggaaaggctcctggatccaaactcgctgagggccaggcaagaaaatgtcctcaaatttattgccaacactgaattctggaggtaaagtaaaagatggctcaaccaaagaggacaggccttataagatctttttcagagatctctttcttgtcaaagaaaatgaaatggcagcaaaggaaacggaaaaatttatgaaccgtaacatgaaagtctaccagaaaactactttttcatccagaatgaagagtcattcatacctgagccaactagctttctaccctaaaaggagtggtaggtcatttgaaaagtttgggccaggtcctgctccgattcctagattaatagaaggttccgacacaaaaaggactgtccatgaatttattaatgaccagagagacaggtttctgctcgagtatgctttgtcaaccaaaagaaacacaatcaaaaagtttgaaaaagacatagcaatgaggga

SEQ ID NO: 390420 - DNA, 511 bp, Homo sapiens
tgcagccagagcttgtctgaggcctctgctgcttacttgaatcctggttgctcttcacatcttgatgagcttctcttttttagtctaataggtataaaaagcatgttgttgttgtttatttaagacagagtcccactctgtctcccaggctggaggctggagtacagtggcttgatcttggctcactgcagcctctgcctcccgggttcaagtgattctccttcctcaacctcctgagtagctgggactataggcacccatcaccatgcccagctaatttttgtatttttagtagagacggggtttcaccatgttggccaggctggtctcaaactcccaacctcaggtgatccgcctgccttggaaacagtatctttttaattgaatagttttcttatgaccaaaggaatgtattatgttaagtgaaagaagggaagaaaaggaggaggaaaagataaaattgaaaaaacaaccctttctttctacccagaaataatcccttgtaaacatc

SEQ ID NO: 390421 - DNA, 349 bp, Homo sapiens
gaatgcggagtttactgttgaatggaaaactgggatggcattgccattgcatatatccaggctttggtgctgctattctaagcagagggcctggtgaaagagtgatgttctcctttggtactgtttggtcttagtgttctttggagtctggggaggtttcacctttaaaaatcaaactgctagggccaggtgcagtggctcatgcctgtaatcccagcactttgggaggccgaggcaggtggatcactaggtcaggaaatcaagaccatcctggccaacgtggtgaaaccccatctctactaaactccatctctactaaaaatacaaaaaattagccaggcgtggtggt

SEQ ID NO: 390422 - DNA, 147 bp, Homo sapiens
tgtacagttgttggagtgaatggccacaggtgttttaatgtggaaccagggagtcattgccatatatacttgccacaatgttgcaggactcttcccttggaacccagcctctccttcagtcccgacgttctgtatctgaaaactggg

SEQ ID NO: 390423 - DNA, 560 bp, Homo sapiens
gctgtgtcaccagacggtgctcccagaggctcccctgcctgagtcacaacccgcctccccagcggtaaagagcgagggagttagaccacctccttctgcatcccagctcccccgctccctggtgtacgaccctgacattgctaacctccctggacctccgtttctcttcttcataatggacgttagtgacggtacctatgctgtaagcctgccaaaagaccaaagtgagcacattaatccatttaattcatgttttccaagtccttcaatgctggcccacctcactggagcaaaagctcaggttcttccgttggcccaagcagccctacgtgacaggtttccttttgcctcagctccttctcgttcacccgtgtcttgtcattttcctctctcacctcatctccttctcagcacctcactcattctgtttcagccgcccggccttcctgctggttcttgaacatatatgatgcctccaggcctttgcacttactattccccctgcctggaatgctcttcccacagatacccacaaggcttttcccccagtcgcaagtctt

SEQ ID NO: 390424 - DNA, 267 bp, Homo sapiens
agtagagatggggtttcaccgtgtaagccaggatggtctcgatctcctcacctcatgatccacccgccttggcctcccaaagtgctgggattacaggtgtgagccactgtacccggccccaaggtgtccttaaaatttttttattatgtaaaagttgaaacatatacagaaataaaagtgtaatgagcctctatgtacccatcacctggctgtagctgttagtacctcttggccagtcttgcttcatctgtatcccgtcccacccat

SEQ ID NO: 390425 - DNA, 322 bp, Homo sapiens
ttccattatctgatgttctctggtcatagtacaccagaatataaagaagtggctaaagatgaagttagaaaaactggagttatagaagtatcaagagcttgacagtgagaaatactgaaaagatgggacaaaaggtgccattaactttacactacacaaaagttagagttcaaacatgagaagagtgatagatgtgaatatctagtccttaattgttcttcttggaaatggtacaactgtctaggagatggaaagctgcttgatgtagtgaaaggttgagagtaagaagcttactacaatctcagctctggtaatggtctta

SEQ ID NO: 390426 - DNA, 543 bp, Homo sapiens
atgagcaccaatgatgcatttcccatggcactgttgcccctccctcacagtgaccccgattctcttccctgcatcctccccatcctccattccatgtttccccaactccatctgcttccttgtaaccaacgcatggcccacgatgagcaccagaatggaggaaatagctcgcccttcccctctcgctgctgtgtgtgtccagctcagacccgggctccttagagtatctgccaggagcagggccttaggggaccaagagcttgctgtgaaacctgaaaagctcaaaccagcagcccccttacagttggttgggaagccctcatccttacttaaaagctggtgccactgttcatagctcagggattgtacgtgcttcccccaggccaggaaaggactgaaaaagagctgggcccagtgggtatgagcggggctcagcatggcgctcacatcaaccaccactcccagatacactggaggaggacacagcaggccaccagctctgggacaagggctaccagctgagacatgctcgtactctcactc

SEQ ID NO: 390427 - DNA, 815 bp, Homo sapiens
tgggagtgagggaggcacaggagatgaagcttttgggtaagaaagaagcatcatagactagaaattcataaacctgggttctaaaattctggatttgccatttcctagtcatggactctcagttaaaaccttttacttctctgggcctctgtttataatgttagaaaattttaaaaaatgcattagaatatgcagttaggaacaaagactctggagtctggtttccctttgcttaccagctgcgtgagccagggcaagttacttaaccactctgtgctttagtttcttcatgtgtaatacagggatactaatagtacacaggctgtagtgaggattacatacatgagtgtgtgcccagtgcttgggacattgctggccacatggtccacagttcacaagtgatagcagtgatgaggacgagggtgcaaacgctggagatgatgcagaggatggatcatcatcatcctcaccactgacatcatcacctccttcctctctggcagtctcagtttgtttcccgattaagtcacagaaatgaccactagcaagaaagaaacattctcctttaaaatactatacttaggggttgggcgcagtggctcacgcctgtaatcccagcactttggaggccgaggcaggccgatcatttgaggtcagtagttcaagaccagcctggccaacttggcgaaactctgtctctactaaaaatataaaattaaccaggcgtggtggcgggcgcctgtaatcccaggtactcaggaggctgaggctggggaatcactggaactcaggaggcagaggttgcagtgagccaa

SEQ ID NO: 390428 - DNA, 741 bp, Homo sapiens
attggcatgtgctttgagcctgagattataggtcaagttataaattatggagtacttggttttgaggttaaggtacaagtaagccttaggttcaaagttcactaattatttgaaaatttcagttgaaccacacagtgatcacattgctaaatccattggtcagtcaattctcagccctcctcttggcctgccagcagcattcaacccagctgatcactgtacctcctgaaactttttcctttcttgacttccaggacaccacattctagctgttcctgctcactgattcttcatctcccaactcctaatttatgctgaagttaccctgaacttatttcttggacctcatctcttttctgtctgcactctttcccttggtgagctcatccactcacctttaaataccatctatgtgctgtgattctcaaattttcatctctatgccagactcttccaggttcatataaccactgcctacctagcatctctcctgggatgtccagtcatctcaaacctagcatgtctaactaggcctcattcttagatccagagttttactcatctaagctaatggcaactacatttttatagttgttcacaccccaaatccaggagccattctgaattcttcatgttttttcacatcatacatctgatttatcctcaaacttgtcagctctaccttcaaaatatgtcctgtatcatagatagaagactcacttcccagggatctgtgtgact

SEQ ID NO: 390429 - DNA, 578 bp, Homo sapiens
actatatgccaggtaatgtgcccttcttatgcaatccttccaaccactcaatgaggtagatactattattaattttccctagcttacagatgaggaaacatgcttaacgggattaggtaatatgcccgatgtaacaagccacagcaaataaactgaggagtcagcatttgaatcaggcttaactttagagactatgttcctgatctctgatgttatattgttgctcagagtagagacttttgagcacagatgagctgataccaggaaatgagaatttattataaagaaagaaaaggagagaaggctagggagaaaggaggagacatgcatcagtacattctcctcctgcagatgtcacacctaacgtatgacagatgacagtacagtttctgcttaattcctgaacatgtcaagaaaggatctgtttgcttctttggtaacgtgttccaggtttcattctctatgcaccaaaaatatctacgaatagctcttgcaccctcttgccggtgagagaagacacatacagtcgactctcacagttcacagtagttatgttcgataaagatgctgtgaaccct

SEQ ID NO: 390430 - DNA, 426 bp, Homo sapiens
tgtcctgccgcagagcatttgaattgttcttccctgccttgaatgctctccccatgcccctaggtctagtcagcccattcgagattggcattcattcaacagctgtcaactgggcacccactgcgtgcttgatcatgtgtttagtgggatccttatgggatgaatgtcttcctccaacacacacacacgtgtgcgcgcgcgcgcacacacacacacacactggcgccaagtcccatgtgtttttccagggttaagctgaccttagtcctctaccacccaccaaccagccccaaatgcaaccgtcataggaaaaatgcaagagcagaagacataagaagaagggacagggaaaggagaaaaaagaaagaaaagataaatatttttaaaaataaaggaaaaaagaaaaaggaatggaatgagagaaag

SEQ ID NO: 390431 - DNA, 367 bp, Homo sapiens
  misc_feature (349)..(349): n is a, c, g, or t
ccagcaaggaagtaggaaatgtggaactgaaaaagaagttagaactaaagatgtggatctgtctttggcataaagattatattaagttacttgagagtagatgagtttccaaagaagcagtgtagcaagaatagtggagggccaagactggttcctgggggtcagcaacatctaggagccagaaaaaatgccttcggtgaaagaaacggaaagatgggtctattcaaattgtagtcagccaacccatgccagaagtaagcacagaaagtaagagtgaacattggccaagcaaagtgctgggattacagacgtggagccaccatgccctggcaggaaaacacacttttgnaatgttgtgttgacctgg

SEQ ID NO: 390432 - DNA, 267 bp, Homo sapiens
tgatgtcagacttttgaaaacaccattttccggcccccaaactactagtgtctattccctaccaattcctcgttctgttgccctgcctggctttcagggctatctgcttggaggctgagttggtcatgtcagtcctcagctcatgtctacttggttctttgttcttactgacggggaatggacgcctctaactgcaacacggttctgtccaaagcatctccccagcaactgcttctaccttggctcacaattctttttttttttttt

SEQ ID NO: 390433 - DNA, 103 bp, Homo sapiens
tgttttgttgcttgttttattatgacctcagattaaattgggaaatattggcccttttgaataattgtcccaaatattacattcaaataaaagtgcaatggag

SEQ ID NO: 390434 - DNA, 423 bp, Homo sapiens
ccttgtccttgtcgctaactcttaactgctttgcttctttttttattgttttcttttgtgtgttcctgtttgtttgtgttgctgtttggcctctgggcctcgggctccgggtaggatgaacttttagatcttcagttgcaaagaaacctagagtatttggatcagcaggtaggcagagctggtgccccccttatcatcccactgccttcctgtcgcatctctccactcctccccacctcctcatcttccagccatttgacaacctttgttggtgcaagcaggacacaacaaagtggcttatgttttggtttgcgcctacacaccccttctgcgtcttctccccttctgtcgtcttctcgagaagacgacagaagggtaaattctggggaggtctggaccatagaggacatttaggatgactgg

SEQ ID NO: 390435 - DNA, 836 bp, Homo sapiens
acataataggaggctgttgcactaatacaggtgaaaggtgatatttgtctagactagggtgggaacaagggggatggaaaaaatcgaatgattaggaaaatatttaggcctgtgaacaagagtgatacttttttttttcttttttttttgatacggagtctcattctgttgccccggctggagtgcagtggcgcaacctcagctcactgcaacctctgactccctggttcaagcgattctcctgcctcagcctcccgagtagctgggattacaggcatgcaccaccacatcgggctaatttttgtatttttagtagagacagcgtttctccttgttggccaggatggtctcgatctcctggcctcatgatctgcccgtcttggcctcccacagtgctgagattacaggcatgagcaaccgtgcctgcccacaggagtgatacaaaaaaaaaaaaaacaaaaaaaaaaaaaaaacttttggggaaaagaggccaaaaaaaggtgtgagacaacaataggagagagaggcggggagaccacagaaggaaaaaaacgtgggcaacagcgcggacacacaggaaaaccgggggacaagaacacggcaagacaatcaccccagataaaaaagcacacggggagaaccacagagtgtttgagaaacaaaacacacagagggagagccaggaggagaacagaggagggacacaacaaccgggggcctcgaagaggagagcgcgaatgcaaaataaggcccgaatagtgagaaaaagggagggaaagcggaaagacacacaagaaacaaacaagagaaacagacgaagccaacagagacacaag

SEQ ID NO: 390436 - DNA, 142 bp, Homo sapiens
ggtgggaggatcgcttgagcccaggaagtagaggctgcagtgagccaagatcgtaccactgcactccagcctggacaacagagtgagaccctgtcccccaaccccacaagaaatgggatcctactctagggactattctgta

SEQ ID NO: 390437 - DNA, 559 bp, Homo sapiens
accgccggccaggcacacatgtgcatgggcaagacccgcaggggacgtgtccctgggaagaatgcttcctttggttgaaggctgtaaactcgccctgtgaggtgagacatgtcagctcccagaaaaggtcccagcctctcatgattcacgccagcacaggcagcacagcagcagagcgtgacctcctagatggcagcgtgacctcctagatggcagcgtgacctcctagatggcagctgagctcaattccacacggctcagtcctggagacaatcactcactgcaacacgcattcctcatgggggcctcttcaggagccacgggcatggggcttccctgacctctgcactcacggtgggggcgcgcacagcaggggtagacactggcccgccatatctggagctgaagtagagcccgtcttgggctcgcttagcggagaccataggtggaggtgagccagtggcctcaggcatctgcagaacccacgcacacattgactttcgcacccgcctccatctccgtggacttgactgtgtcgtgcaaaacccactccacgtgc

SEQ ID NO: 390438 - DNA, 170 bp, Homo sapiens
actctagtttgtggaagatctagaatattgtagcagtcattcatttaatatgtagtatattgacaggctctaaaaaaaagttgatggtgagtatacttgggagagccttaagtacacaacaggacaagaaaggaatcattctagggtcagcgttaggctacagcttttgg

SEQ ID NO: 390439 - DNA, 570 bp, Homo sapiens
ttctgctgtgtgctttgtattgagatgcagagatgaataacacatgctttaaagtttataatctggtagggagacaaacgtgttaatcagtaatcatagtaaggtctaatttataatacgttaatatcaacaatacattgtaatagagctgtggcatacctggtatgccaaaagtgctaaaggggcacagagagggattacctatcatatttaaaaaacaaaaatatctttttgtcttatatttatttcttttatttttttttcttatttttaagagacagggtcttactctatcaccctaaggctggtgtgcagtggtatgatcatagcccactgtaaccttgaactcttgagctcaaggggtcatcccatctcagcctcctgagtaggtgggactataggtgtgtactatgcttggttaattaaaatctgtgtgtgtgtgtgtgtgtgtgtgtgtgtgtagagataaggtctcgctgtgtttattagcaggctggtgttgaacttctggcctcaagcgatcctcgtaccttggcctcccaaagtgctgggattacagttgtgagccac

SEQ ID NO: 390440 - DNA, 385 bp, Homo sapiens
taggcttctggggcagtacagaggagtctaagtgagaggcaggcctccctgggagctgggcccaggctctctgcagccatgcctttaaggagtgcctacggggtagcacgatcagatggacaggccagggctgcccagagctgggggtgggagcaaggtaagcagagaggtgagggaaggagggtgctggcttagcaggagctgaatgaatgggcctggaggggaaaagctaagggggatggggtggcttgagtggagtaggtgaggcctaggtgaaggggagctgtggaccttccaggacggacggatgtgagcagtcctgagtggggactggagttagggtggggaagggaagccccaggcagcccctgcaggcccctgcccc

SEQ ID NO: 390441 - DNA, 582 bp, Homo sapiens
gcagtgatggatgtggattatggatgtgggattattaaacagataattatctcattatatcaaacaacagtcatgaatatatacccgaggaccgcgtgcacctacaataaatgcaaaaagggtggtaggagtgggggcagttctattctcaaagaaaggagacaaaagtggaatgggacagggaagcccatttaagatttagctggagaacctggactgccagttccgtctctccacccacactgagcatcgtcacctggggcctgggtatcgcgacgatgctcacccttccgatgtcctgtgttggcccggctcttccaggtggaaatcagagatggtcagctttttggagagacaggtccagagcccacaccatgcctcttgtggtctggacaccactggtccacacaggtactgactctgtcttttctagtacggctgcaaccaagggcccacccactgaacggcttcagaacctgaagcttattctttcacagcagtggggactgcagtccaagatcagggtgcctgcagggcatgctatctggaaaggccctaggggagagtctgttccatgcctgg

SEQ ID NO: 390442 - DNA, 428 bp, Homo sapiens
gggattaaaggcatgagccaccgcacccggcctgtctgatttcatagaaatgaaaaattttgtttgaccaaaatcaacctgagcaatgttaaaaagaaaaatgacatttagggagaaaatgttttttgcgtatataaccagagattaataacaagtctatttgaagacttctgtaaatcaccaagaaactcataatccaccccatagaaaatggtaaaccatatgaacagataaagaggaagaagtttaaatgacaaatacgctaaactgccaatctgaccattaatcagggaagtgcagattgaaaaaaggtgtcatttcctggctaattttgcagtaacaagaggaggtgaatcgtcccaggagctggggaggaacctctgctctaggtagggggacaggaggtggcaccacccacacacactgtc

SEQ ID NO: 390443 - DNA, 324 bp, Homo sapiens
cccctgtgaggcagcagctaagttaacgggcctaatttagcattttcttctccttggcgggtggagagcggggagtgtaaacctggccattctgctacataaacttgaacaacacagggtgccaagccctgtcccagacttgctggttttgagcttccaggaatggggttccggcatctgtattcttactaaagcaccccatcctccaaaccagccttggaaacgctggcttaaggataattccaaaatggattattcattcaaaaggtttcaggggagatttgaggttgaatggtgagcaaccgacttgatttgcatgagggt

SEQ ID NO: 390444 - DNA, 345 bp, Homo sapiens
tgttgctcagcctggtcttgaactcctgtcctcaagtgatcctcctgcctcagcctcccaaagtgctacatgaatagattaataagactggaaaatactaggtatgcaacaattcttctttattgaatgggtgaatacttcctgggtgaatacttccttaagaaagtaagtctaggccgggcacggtggctcacgcctgtaatcccagcactttgggaggccgaggtgggcggatcacgaggtcaggagatcgagaccatcctggctaacacggtgaaaccccgtctctactaaaaatacaaaaaattagctgggcgtggtggcgggcgcctgtggtcccagcta

SEQ ID NO: 390445 - DNA, 335 bp, Homo sapiens
ttggggttgaaagaaggttgacaggtggaggttgttagtgggaggatgctaactgaaaatgctttataaactacatgccttttccaagctgttgtggttcttctgtccagcctgccaccccttgactgtgtgtaaggtgattcttctgaccagtctactgctgcggtactctctgcgctgtatgtaagcctccagtaaaaccccgtgttttgtttgctggctctgggtcttgtttttggcctcttgaacttggtgccattccccttggagtcaataggggtccggcacaagaacctgcactttaccaaccccagaattttaccccgagtgtaatt

SEQ ID NO: 390446 - DNA, 419 bp, Homo sapiens
gtaaggattaaaagagataatggacaaaaagccctaaacgcaggaactgtaacttggtacacgctccacatgaaggagagagcttcccatcaccagaggtaatcaagcatggtgaatccggttttcacaaaacttgcagtcttacccttcccttcactgtcccctgaacccaagacttagcccataccctccttataccataaaacctatgatacatatacaccacccttccaaacgacaaatcttcttttgtcggggatggggctactctagtcccttcctcctggtgggcctcagtttcccataagtgaataggaagataaatgttgcagcttcggtttcatttggcttatctgaattatcttaagagttttcacagtgaaagcacgttcctttttttttttctttttcttcattaa

SEQ ID NO: 390447 - DNA, 730 bp, Homo sapiens
aatacttcaattaaaagcaagagattggcagaatagattagaaaggaaaaaagcaagatcttactgcatgctgcttacaagaaaccaattttaaatataaatatgcagaaaggttgaatataatggaagaaaactgataaacccacacaaattgtgcacatcagaggactggtgtatccatttaaataaaggattaagcagactccaatatcatgagtattactagagagataaataaagatcttttacaataaaaagtaagacaattcatcaggaagatataacaattataaatacgttcctataaacagtctcaagataaaagaaaataaaatggagatcaaagtaggccaaaagtaaataagatgggggactaattttaaaaaacataaattgatgaaataataaaacagacatgttttagaagattaacagtgcaaaaactggttctttgaaaagatcagctaattaccaaactgctacttaaattgatcaagaaaaataaggaggaaacacaaataactcaatatcagggataaaatatttcaaatataggtctgatagacattaaaatgattttaatagactaaaccatattacatcaataatttttataagttcaatcaaatatgtgtatttcctgaaaaatataacttactgaaattgacataagaaataaaaatagattctgaaagtcattatatctatgaagttaatggaatttatcatg

SEQ ID NO: 390448 - DNA, 453 bp, Homo sapiens
ggcaaaataaaagtagaaaatcagaataaggcaaggcaaagattggcccacatcactcattctacacagtcctaacaaatgtgaggggctgcatatttggctctgggatccctgtaaccaaagaaaagaaaaaaatagtctaagttacttggtttctacaagataaaaataagagtttctcaggggtcacaatgttttcttctattgatgatggagggaacttggttcctcgggtcctcatgaaggggggaacactgtatgccacaggggaccatctgacttgacaatgtcctgctgctgaaggaccagtggtttccaaaggccaatgcctataaaaagcatcttcaggtccagcgcgctggctcacacctgtaatcccagcactttgggaggccaaggcgggcagatcacgaggtcaggagattgacgctatcctggctaagatggtgaaac

SEQ ID NO: 390449 - DNA, 620 bp, Homo sapiens
ctggcagggaggacagcttggcagtaggtgcaggcactggacggggacctcctggctcctctcctagctcttgcagcaccagccataaggcactcagatcatgcaacttcccggtgtctccgtctctgcatctttaaaatggggctaataagaacacttttctcatagacttataaagagaattaattaaaaaaaataatgcttggctcagaatgtacactccatgaacatcacctgttaccacttaagaagggtgcgtaccctccagccgcatccatgccagttcccgttgtctcaccctgggccagcgacacccatcttaagtcacaattgagaatacaagcaagacacgctgaaatctaccagaataaaggtccatcttcacagaacaagcctgtttacacttgaacccacagtttttcagtcatatccagacttcaaggagggaagagggctccaccgcaggcttcctgtagcaagcatgggggccatatctgagtcccctgtggcgttctgtcaccatagactgtgactttcaaacagcacagtcacttctcacagtgttaaaggtcagaagtcccagatcaaggttctggcagatctggtatctggtgagtatc

SEQ ID NO: 390450 - DNA, 258 bp, Homo sapiens
aggacacaaaccatggtactacgaaaatatattatgtcacatagaatgtaccagtatccatttaggatgtacaaagatataaaagaatgactcccaccctaacttcaaggaaaacttaaatgatgcatgaaatcataagttttccttaactagtaaaacagatgaggtctcagggcaaccaactagttggatacctaaggaaatttacatgtctccatggagcagagcatggtaggacgatatttcagggcacggatt

SEQ ID NO: 390451 - DNA, 234 bp, Homo sapiens
tcatcctatattggcattttcttgacaaagtttaccatgccatactttaaaagtttacctttaggtaatagccatttgtctttaactgtagccagtagttacctccagtcaaataatgttccttctgtattagtcaactccattttattattcagaaagtttatttttaaagtactgtgtatatatgggcaaatatataaataatgtatattgtgggctctccaggatctaaaa

SEQ ID NO: 390452 - DNA, 913 bp, Homo sapiens
ccaggcaggcaggaatggcaggtgtgcactgcctggagacagtgatagtacctttccccacctctgcccgggcctggcatgtctacaggctctgatagacgttcatattgttattgttcctcacctggtgcctggtgagacattggcagctgccagtccaaagggacagccagaagacactgccaagtgtcagttccagccatggcgctaccgaggggtgcggtgtgtcgggccctgggtgccagagcgcatccacctctgtcttagtctgttttgtgctgctatgacagaatatatgagatcggataatggataaagaacagacatacatttctcacagttgtgggggctgcaggttcaagatccaggcactggcaggatagggcctggtctttctacttccatgatggggccttgaatgctgtgacctctggaggacaggaacgccacgtccaaatacagcagaagagaagaagagagagagtccactcccgcaagccctttctatagtggcattcatccattcatgagggctctgccctaagctcctcccactagtccccacctcccaacagtggcattgggggttaagtttccaacacgtgacttttgggggaacacacatccagaccatagcagcctctgaaccaccatatccaccagatcttttgctgggtggccatgaacggggtggctccagggaattcaggagacactcagaggatcagctcgatgggggtatgggcacttccaggctgaaggctcctctgagctcagctctcagctgccaggaggtggatttcatgagcatggctcggggacccctcccatgcagggctgcagtggcagtggagaatgccagcccagccggcggatctccccgcctcaagccaggagcaccatggtgcatgtg

SEQ ID NO: 390453 - DNA, 115 bp, Homo sapiens
tgttgagagatccgtgatcacagcagcatgcgaggctgcgggaactggagccatgtgaggttctgcctctcctgctgtgccccccacgctggcaggccctcctgctccggggtga

SEQ ID NO: 390454 - DNA, 405 bp, Homo sapiens
ggacctattccagcaccaggccaaacccagtggcttcaggctccagaccagctgcccacagccctgatcatgaggctagcactcacagacccagggttcaggcttatcctagtagactccagtgatggaccagcctccatggacccaagttctaggactacacttgtggatccaggtttcagactggcccctaaagccccaggacccaggctagactttgcagacctgacccccaggccagcacctgcacactcagcctccaggccaacacaagtggacccaggctctagccagactcctaagctctaggctttcagccagcctcagtggcttcagataccaggccagcaaccatgatcctacactccagacaagctgccatagatcgtgattccacacctgccc

SEQ ID NO: 390455 - DNA, 829 bp, Homo sapiens
gcacgacatccacactgagggaaggacacagagtcagaggttgggagagagtccaggtgacattattaagcacccacgtgcagccaaggtacagttaccccagaacattctcactgggatccaggtggctgtgaaggtcacctagagaggtcagcagagctcctccagcctctggagttgacagctgtgaagtcgatataataagggccccgaatcacccaacctcaatcagctccttccagtgactgccatcgtgggcactctacactgagtcatgtagcatgccagctggggcagctacttcactacatcctagagccccaccaaaagcaggaggaagaggcctgaggcaagttccggcaaatactatctgccctacagtaccaccaccaaaagaaacatttccacaggaacctgatgccccagaatgtacttgtatttacaagatgccaactacaacataaaatatctttgtctttggcaccagatttatgataggctacaagctggacaccttctgtgcaactccctgttatactgccctatggtgaatgggtagaggtggaatctggagtaattttttacaccacaataaacagaaccttaccatttgtcagacctttgtggagctgaagaaacaaatactgtgtggcaaatataagatacagttgttcctttcttcagaaggagaagaggccaggcgcggtgtctcacgcctataatcccagcactttgggaggccgaggtgggcagatcatgaggtcaggagatcgacactagccgagaccaccctaggtaacatggtgaaaccccgtctctactaaaaata

SEQ ID NO: 390456 - DNA, 323 bp, Homo sapiens
ttgaatctgtgtgctggtttctttgatcagttctgaaaaattcttaggcattacctcttcagtattgcttttctgtgttctctgttccagagagtgtttttatttcgtctgcttgtgtatattagtttgggttgttcagagaaacagaaccaaaatcatatgtagatatagatatagatagatttctttatacatgtgattgtagaggcttggcaagtttacaatctgcaaggtaggcttacagtttggagacctaggaaagagttgcagttcatttcaaaggcagtcttttggcagaatttcttcttgctttgggaggttgg

SEQ ID NO: 390457 - DNA, 316 bp, Homo sapiens
cagcagtcatggtgcctcagagcactgtcttggaaggaagaaggtgcataaaatggaaatcacatttatcaagttctatgctgctgctagtgctgaacaggataccttaaataaatatgccttttaacactgacaatccccagtgcttgttatatctactttatagaagaaaaaaactgaggttcgaggtgggttccttcattcatatatttaagtgcctcctagggacctcagtactggggacactaaaatgtacaataaagaccctgtccctgcctcacaaagcttgcatccttgtaggggagtgtcaattcaa

SEQ ID NO: 390458 - DNA, 241 bp, Homo sapiens
atggatgtggccccaccatctccctttctgagtggcacccacacagcagtgaggctgatccatgggccaccacccagcagcctggctcgctgtcggggccatccctgctgcctcccctatgacgcttcttctgtggtttctgatgcgcttttctccattggccgttgcgcttgtctgctgggagcctttgccttcttttgtgttgaaatcctattttctctgagctttgccctccacttgc

SEQ ID NO: 390459 - DNA, 247 bp, Homo sapiens
tcagagagttcacactggagagaagccatataagtgcagggagtgtgggaaagccttcagatggagttccaatctctaccgacatcagaggattcactctcttcaaaaacagtatgattgccatgaaagtgaaaagactccaaatgtggagccaaaaatcctcactggtgagaaacgtttttggtgtcaagaatgtgggaaaacctttacacgtaaaagaacccttttagatcataagggaatacac

SEQ ID NO: 390460 - DNA, 468 bp, Homo sapiens
agctttatgcatagcagccaaaaaatgaaacagcccaagagttcaacaacaggttaactgacaaacaaattgtggtacctatatttacataatagaaccctgctttggtataaaataaaccatggatacatgcaaaatgtagataaatctcaaatacattattctgagtgaaagacgtcagaccccaaaattacaaatggtatgattcaacatatatgaaattctaaaaacacaaaactgtagttacagaaagcaaaacaatggtggcttggggtatcagatgaggaggatggacttgaaaagagcacaggatggacttttggagtgataaaaatctgtatcatggttatagtgatgattagatgagtgaatgaatttgtcaaaattcatttgtctgtacacttaaaatgggtatggttgtatacaggttaaacatcaataaaaaaaaattgctgtactaatattgtt

SEQ ID NO: 390461 - DNA, 395 bp, Homo sapiens
gagggaaggtgaaggtgagtaggagagtcctggggccagggagccaagaggaagggctgccctttggggtggacaggcagagggactggaagcctaaatctggaaggctagggggtgatccgcacaaggatggatgagtgggcgcacagctccattcacctgcggggagacccagcgccgcggccgtgtcctcagccccgtcctcctcttcacagggtctcccgtctcccacccgccggagatggaggcgaacccagcgggcagcggcgccgggggtggcgggagcagcggcatcgggggcgaggacggggtgcacttccagagctaccccttcgacttcctggaattcctcaaccaccagcgcttcgagcccatggaactgtatggggaacacg

SEQ ID NO: 390462 - DNA, 435 bp, Homo sapiens
gacccttccaggaacaaccagtctggtggtgatggggtcatcttttggcctcaaatgccaaacaagcttgagcctctctttccccgtcttctgacacttagactcacaaaggagcctgcaagcctaagggggatgaaactgcatgcctttggagatgaaactggacttgtgtgtgggcgctgagcattaaaggttgggaggtgagggtgtgtgcagttggatattataataacctcagtaatgattcacacatgtaaggcaaaaataagaagctcaattcttcctgttaaaaataaaggatgccgggcatggtgtcacgcctgtaatcccagcactttgggaagccgagggggatggatcacaaagtcaaggagttcgagaccggcctggccaggatggtgaagccctgtctctactaaagatacaaaaaaaaaa

SEQ ID NO: 390463 - DNA, 289 bp, Homo sapiens
gaaaccataaatggcagtgtatgaaaaataatttaaaaaacaatgaacctaacgtttattgagcacttatgatttcatgcacccttctaaggactttatatggattaatttatataaatctcacaacaatcccataacagatactctatcattgttctcattttattgatgaggagaaaggcacaaggagcttagataatttgtccagcatcagacaatatgtgtcagatttaggattcccacacaatttgactgaagacaatgggaaaagggttgtatggtgaaggaa

SEQ ID NO: 390464 - DNA, 545 bp, Homo sapiens
tattgtttagcactttaaatcctcacctgctgcttctgttgaactgtaccacttatctacttgtttaacttttcagatgtgtatattgtctcctcaaccagatgacagttccccgatggcagagaccatatttatgccttacacttagtctccctcaacaaacacactactctgcatagatcagatattctacacatgtttaaagtacggatgagagaaccctccaggcaaacagaaaccttgagtttttccactaaacataactaacagctaaaacgagatagttattttcttaaatgtttaacatttttataatgggcaggcccagtgtctcgcagacctgagagtgcatcagcattacctggaggttttctaaaacagattgctgtacccacccccagaatttctaatttaataggtcctgggtggggccctaaactttgcattgataagttccaggtgatgttgatgctgctggtctggggactgactgcccctttcagagttatctggcatggacttaggtgaaaatagactattgggag

SEQ ID NO: 390465 - DNA, 224 bp, Homo sapiens
cctagaggatccctatagcacttatatatctcagagatatacaggtgatggatggatagatagtctggtggatggatgggtgatgaatggatgagtcgatagtgttcatctaacagaccagtagataagtgagtggatggatggatgggtgggtgtatgggtcaaagggtagatgggtggatgggtagatgttagtgcagatggtttaatgaatagatgataag

SEQ ID NO: 390466 - DNA, 723 bp, Homo sapiens
gtaatcagcaaacaccctggccagaagcttggtcacaaaagaggggaggggaggcaggaaactgggatgggttgtagaattgaggctgcactatcttctgaggttatatatttcaaattgatcatgatgatgatggtagtaacgataacaatgaccaacatcaaatgtgtaccagtaccaggcattgttctaagtactttgcatgcattcatttaatcctcttagtaactcaatgaactagcaactcttattgtcctcgattccacagacgaatcccagcacagctgtcacttgctgaacgtcacatagctagcgagtgggggagccaggattagaaccagggaaggaaggctaaagaggctgatgagggctttgagattgtgtgctgagagccaaagcggggagagaggagggagagtggattatttcatttaattctcacaaagcactctggaggtagctattgcaaacttgactccacctttagtttaaaaagttaacttctccaaagttcataaaatatagtaacaattatgtctaaagtatcttgagcacttactatgtgcctggcaccttacgtctattttcacatttaaccctgcaagcttgtaagaataggtgctattatcatcattttagagaggaggaaatggaggcacagggagactaagaaacatgcctgagattccaaagcatggaaaagacagagctgggattatttcc

SEQ ID NO: 390467 - DNA, 370 bp, Homo sapiens
cccatgtagtcctgtgtattccctccagtgtaccatcctccgccataatgatgtgctgttgggcactcatttgaaaggagaggagactttataccattatttcagacaacaacagagctatgaacaagtagaagttatagggaggctaattttgaacccatataaagaagaattgatctgtccaacaatgaaatgtgttgtcttatgaaggagtgaggcctcttgtcattgaactgttcaaactagggctgactgaccatctggaaggatcttgcagaaggcatttctgcattgggggaggtggggagtgtgtttgtggtgctgagagatgttagatggcacctaagagccctttcaactatgaaattgt

SEQ ID NO: 390468 - DNA, 289 bp, Homo sapiens
atagttggcttattcagaaatagaatgggatgcctaggaaagagtagtacattctctaccaatagctacgttaatgtggcaattgtaaaagccaaatgtcaagcgttggttaagggttaagtttctgttttaggtggctaaccaggaagaaaaaagcctttaagattcctctcttttctaagattcaacgaattatacatatgctcacatatttgtcataaaccatgccaacctcctaagcagatatgtatacaacaaattcagctgaaaaagaaaatgtacatactgt

SEQ ID NO: 390469 - DNA, 298 bp, Homo sapiens
cactttcctcccattgatgcctcctttatttttaagccctttcctcaggtgaattcctttctctcctctttcttttttaaaaaaaattttttaattttttgtaaaaataaagatggggtctcactatgttacccaagctgaccttgaacacctgggctcaagagatcctcccacctcaacctcccaaagtactgagactatagctgtgagccaccgcacccaggcccctcctctttctgtcgctccattcttttgctgggactttctcttttcttccaacctgattactgtcctttga

SEQ ID NO: 390470 - DNA, 114 bp, Homo sapiens
ctacatttcccagcaacccttgcagccaggtgtgatcaggtgaccgtgttctggccaatgaggtgagtggaatgctggttgtgacaagggacacatctttttgttttgttttta

SEQ ID NO: 390471 - DNA, 388 bp, Homo sapiens
agggtctacactcaaatcaaatgtcactcactttataacaccttgtacatatctcccaagaaattgttccttctgaatttcctcataattttgcttattcacttgtagcacttccactgttttacagttagtcaatctaccccagctacattgagttcctcaaaagataagggcttactcactgccagagatactcaattatgtttttgtaaatgttacttcctttgtttttctcttccagagcctcagcaagagattaagactatgagatctaatttttactattaacaataaaagtcacttaaaaaaataacagttcctcaagcacatataaagcatcacttgtaacagcaaaaactgtaagcaatttaaaagcccatcatgtaca

SEQ ID NO: 390472 - DNA, 365 bp, Homo sapiens
tatcttcctcggcaagaattttctggagcagagaggaagtcactgacacaggtggtctcgatgctcactccaagagttgagttgtgtggctccaggtagactcatttcccagggtcacctgctgggccataatcaacaaggtacaagcttaagagagccatgccgggatttcaagttgcaaggaagagagattcaatggtgctttcttgagtcacgggtgttggttgtaagaaactggtggggtaaggaagctagaactctcccaggaaccaggaacggctctcactggcaggcctcacggaggagacccaagctgggggactggaaggtggttcagattgttcacaagctgcagtggctccagc

SEQ ID NO: 390473 - DNA, 750 bp, Homo sapiens
gatagaggaattagctgagaaaactaacatagtttcctgaaatctagctctgttctctgaggcattttatctctagtaccatcctcaggtccacatggcttgcctcagttctcttcagagaatcgtttttttaaccaccctttgtagaggcctatctttttgaatttccttgaggtttcatgcttgtattttgtgtgtaggaatcctcagagctgccttgatcctgcccagatccacaggctagtgctggttgcttggaacaaggaacgacccaggtatccagtgggtacaacttctagctgggtggacagacagcatggaaccatagctctacacacactagcatggctccagtgtcttccagttggggatgctagccttctgaaggcaggaggactgcagcctcccaggctggcagtatccctgttccgttgttccatgccctcagcataggataacatgggttgatttgggtctggattccagtgctgactgtcactgactggctctgtaatgagggtaaagggtaaaagttctctgagcctaggtttcctcatctgaaaaaatgtggattaaaaataatactccctcataagttgttatgaagattaaataagatgatgtatgaagaatactggacacttggtaggtacttgaataaagaagtgccaaccactcttcacgatctcattttttattcccatattgtatccccacatgtgttgttgctgagcctcataccagcctcaa

SEQ ID NO: 390474 - DNA, 118 bp, Homo sapiens
agctattctgaactacaccatacactgctgttaaccctcgtcatcttactgtgcaccagaatgtactccttctgtctaactgtctgtccccttggccctgttgaccgatctctctcca

SEQ ID NO: 390475 - DNA, 553 bp, Homo sapiens
acatacttaactatgacatgcctgcacattactattttctgtgtcttggcagtgccagtatataatctgtatatattgtatgtagaaagagatatacatatgtataatctaaaatacctaagatatgttagaattttaggttctgctcatatttaaaatatccttgacattaaaaaaagaattctaaagttgttgttttggccaaaatatctgcaaaacgaaaataagttaaatgtattcctactcagtatttggcaacaatcatgactgagtttcctcaaaacaaaaacaccagaaaacaaaactgacaaaaatgaattagtgtttacaaacacacaaatacaatagcaaaattcttggctacagtgaaaatggtttaaatatcaaatatcaatagcatagtattttaaaatcttttcacaaatatcccaaaaagactattgttaaataaaactttaattaaagtatcacacgtggccaggcacggtgggtcacaactgtaatcccagcactttgggaggccagagtacacctgccgtgggtccgctatctt

SEQ ID NO: 390476 - DNA, 393 bp, Homo sapiens
ggtagatatggggtaaatagaagttgttttagaaaatgtttcaggagtgatggttccatccaggttgggaagagtatgggagagcatccagaaaggactacagaagctggctgaggacagatttgtcaaggaacatttgcaaagaggctgcagctggatactaccaacaggcacttctcccatgaaggacaaagggaagcggaccatgctgagggagttcaagggaaaaccagagagttgaagttgagctaaaactaatatgaagtttcgctaaaactaagggatatctgtggcattaatgagagacactttccccttaaaagtaagctccatggcaacacacaccttgcctactctactattgaccctttgccagtactaccttagatgcac

SEQ ID NO: 390477 - DNA, 500 bp, Homo sapiens
ctgagatccctttcgacggtgttctggtgtgtatagcacacttacagcgcttctcaattcagactagctacatttcaaggactcaagggctggtggctactgtaccggacggtacagctctaagaggatctcaaacctacacacccatctgcaacacagggagccacataatccaactagcaggctcaatacatcctgaggtaaatgaagcacatttcatgtacacacactcaccccagaggcctggcaataaagttcttttacctatccattttcagatatctgaccccccaaatttttgtggtagaaatatcagagggtgggtacatgaggagctacatgtttttcctgggagataacatagggaacaggcatgataggaaagaagatacagtagtatattctctttcatctgtaacttttatcccttttagctgggctcaactctgacttaattttgagatagagtctcactctattgcccaggctggagtgcagtg

SEQ ID NO: 390478 - DNA, 263 bp, Homo sapiens
atactacgttaaaatttccctagtcttgcaaaagatttacacattcaaatataagaggcccagcaaataccagaaaagtgcattgcaagacatagttcaccaagaaatatagtcatcaaactgtataaagtcaacatgtaggaaaaaatctgatgtctagttgcctataagagaaaccttatcagagtagcagtggacttctcaatgtgagacttaacaagccagaatggattgagagccttttttctgagttcttaaagaga

SEQ ID NO: 390479 - DNA, 214 bp, Homo sapiens
agcttcctctctccttctctcctactttagttttatcttctcttacctacatcccatactctctctccacttcactttcaccctctgcacagtggggttactttgggccctggcctacattttttgactgtcttctcttcttccctctcctcacttactagtccttccctttaaaagggagacaccaccttaacagaggggacccagccccatg

SEQ ID NO: 390480 - DNA, 263 bp, Homo sapiens
gtgtgaatctgggcccttccccatctcttgccccgcccagggctgggcctcgaaggtagcctgggtctcttctctaggttgctagggtcgcagtgtctaggtctgggctgggaggaagaaggactcatccagcttggagcctgagctgtggttccagcccgtcctttgagccagggtgcggggcacttgcccgctcagcgctcactcaggggttactgtcctgtgtatggccaccaggcagccgccgtaccactgtgcataag

SEQ ID NO: 390481 - DNA, 337 bp, Homo sapiens
ttattcagttttacatcataatcagaggtgtgtccatctctgttgaaggcagaattaaaaaccccttcaacatttttaaaataatagatgaaaaacatctcaaagtctcctttaaaatttgaattgacgattccacataaaaggaagggaccaaaaatatcttaaagaaatacttcacgatggaagtgatgttttaagtgaaatttcatcaaggagaagtttttccaaaaagtatttttacctcaggaagaatctcattagtttattctgtaaatagttcctagtaaaatgataaagacttgatttttcaaaaacaataaaaaacttacacggttta

SEQ ID NO: 390482 - DNA, 692 bp, Homo sapiens
agactcctgcctcagccttcaaagtagctaggattaacaggcgcccaccaccacacccagctaaatttttgtatatttagtagagatggggtatcaccatgttggccaggctggtctcgaactcctgacctcaggggatccaccctcagcctcccaaagtgctgggattacaggtgtgagccacggccaagaattttatataaatagaatcacatagcgtgtagtcttttgcgtatgtcttttacataatatttttgagattcatccatgatgttgcatatacttctccctttttttttttttgagatggagtctcactctgttcccttactggagtacagtggcatgatcttggctcactgcaacctctacctcctgagttcaggtgattctcctgcctcagcctcttgagtaactgggattacaggcacttgccaccatgcccagctaatttttgtatttacagttgagacggagtttcatcatgttggccaggctggtctcgaactccggacctcaagtgatccacccaccttggcttcccaaaagtgctgggattacaggcatgagtcaccacacctggcctacctttttcctttttattgctgaacagtattctgtagtatggatatatcaaaacttagactgatctgttatggaagtttaggttgtttctaatttttagctattat

SEQ ID NO: 390483 - DNA, 401 bp, Homo sapiens
agactcctgcctcagccttcaaagtagctaggattaacaggcgcccaccaccacacccagctaaatttttgtatatttagtagagatggggtatcaccatgttggccaggctggtctcgaactcctgacctcaggggatccaccctcagcctcccaaagtgctgggattacaggtgtgagccacggccaagaattttatataaatagaatcacatagcgtgtagtcttttgcgtatgtcttttacataatatttttgagattcatccatgatgttgcatatacttctccctttttttttttttgagatggagtctcactctgttcccttactggagtacatgagccaagatcacatcactgcactccaacctgggtgacagagtgtctgaaaaaaaaaaaa

SEQ ID NO: 390484 - DNA, 571 bp, Homo sapiens
ccaacacttagtgctgtcagacttctttcattctagtgggtgtgtagtactatatcgttttaattttcatttctccgatgactagtaatggatcttttcatgtgtcacttacatattttcttttgtgatgtgtctattgaaatcttttacccattttcaaattgggttattttgtttataattgagctataagagtgctttatatgttctggttacaacattgttaaatacgttttgcaaacttttgtcccagtctgtgctttgtttttttgtcttaactgtggctttagaaaagcagaagttttacgcctgtaatcccaccactttgggaggtcaaggcgggcggctcacaaggtcaggagattgaggccatcctggctaacacagtggctaacatctctactaaaaatacaaaaacttagccgggcatggtggcacacgtcagtaatcccagctactcgggaggctgaggcaggagaattgcttgaacccaggaggcatgggttgcagtgagccaagatcacatcactgcactccaacctgggtgacagagtgtctgaaaaaaaaaaaa

SEQ ID NO: 390485 - DNA, 687 bp, Homo sapiens
atccatattagtatttacattattatgattatgtaaatgcttttcacagcaggagccacatggtaaactgtgatcacttttcctgttcctatttttgtttttctctactttttaagaatattttcagagttagctgtcttgtttcttttgtttactttttcaccaatcgtctaattctgtcaagaccttcagacactttaggtgttctatccattttatcttcttaagcgtccggtctgaactggttgtttttgacatccggttttatggcttccttcctaggttctcccttcacctctcaccatgttggatttcctgtctcctgtattccatttcttgctctttcttggtccattccctcatttttgtggtgttaactccctgatagtttcctgagaaagcttgcatgagtggtaaatgttttagactttgcatatctgaaaatgtctttatgtttccctcatacttgattagtaatttgagtaaagaattctggttggaaataatttttctatagaattgtactttgcctccattttacttcactttcccatttccagtgttgctgttggtaaaactgattccattcagttcctatccttgcagacctgctttaccctgaaaactttcaggttcttccctttatcctgggattctgaaatttcctaataatctgccttggcatgg

SEQ ID NO: 390486 - DNA, 708 bp, Homo sapiens
gtggcgttctagaggatccctcacgccatgtcacaatagccagtcggcgctgaggcaggcaatgatatgggaaatgatgatgccattggagggaatgtgagcaaatatatagtgcttccaactggctatggtggacagcccaagaaaggacatcttatctttgatgcttgctttgaaagtggtaacctgggccgggtggaccaggtctctgagtttgagtatgatctgttcattaggccggacacctgtaatccacgcttccgagtctggttcaactttactgttgaaaatgtgaaagaatcacaggaaatcttattgataactgaagtgaaaactaagagcttgggcatatcctggatgtaaagaagtaggcccctgtgatagcaatggaagaaagtctgcaggtaaatggtacattgaggcttatgacccagcatctaataaaagcttatttaatgtttttgattaaatgaatgagtaagttgggcctgctcccaagcactaagccctgaggtcagggtgttataagccttattctaaataccaatttctgatacggatagggcttttcatgtacatgcttgatgttcatgggcttgatgactggatgggactaagatataaggtgcaggtctccggtacctgccacttggtaaggtcagggaccttgtgtacatggcgtgagggatcctctagacgacctcgcat

SEQ ID NO: 390487 - DNA, 465 bp, Homo sapiens
aaatgtgggcagactctgaaagcctgaggtttcaaaccctgaaccaatgtcagaaaatacgtcatttgtatggatggagaagaatgggcaaggaagtgaaaagagactactatttccagaatgtcacactgcttttgcacactctcaaataggcatctgcttgtgtgggagctgtgattccctctcccctccccactgtcctctagtattgtttaaaaatgacggaagaaacaatagctagctccacagaagtcatcctcacaagccagatgtcaagtgagggctggcaacgttggggcaaaattaaaagtgatggagggggaaacagtggtgtgccccttgggtggatagaaggtttcattaatgtctgtgatggaatcatgaaccacaacagtgaggcatttccgcctctggcctttttttggtttttgttttttttagaatcaggatctcactctgtcgccc

SEQ ID NO: 390488 - DNA, 519 bp, Homo sapiens
taagaaatctaactttgtggaatttcaggtgtgtccctggttgtcttagcctgatggggacactcctgtgacctttctgttttccagcccagtgtttctcaaatcagcagcgtattagaatttgtaggagattcctggagcctttctgagaaattctgattgaattagtcagaggcgtgttctgggaatcagaattacaaagttccccagttgattctaatttgtaggcaaggtgatatatgccaaactgacccaggatacaggataccctggagtggatattcaaattcagtttcacaggaccaaaacaaccttctaactcaaaatctttggctatgtacctgagtattctgtaaggttaatgaagacctcaagtcacactctcaccatggaagattaaagacattgcctatcatattccacttcttgtccaaaacactttctcaatttttatttttacttttcatgattactactgaaccaagggtaacataggagggaaaaaaaggaaacagtgca

SEQ ID NO: 390489 - DNA, 678 bp, Homo sapiens
ctccgtctccaaaaaaaaagctttctgctgcttttaagggacaaatctaatatacaagtatataaaaaggtagaaagtaaaaggatagaaaaaatataccacgcaaaactacctttaaaaaaagttgttgtcactatatgaatatcaaagtagactttaaaagcagtaagaaaggatggttgataatgacaaaaggtttattttacacacagcaattcattaagatcaagtggagtttattgtaggaatagagtactggtttcacatctgaaaatcagtcagtgtaatttaccacattaacagaattaaaaagaagtttattatataaagataagcattttgcaaatgcaaagtaccacttatgagttttatttatgtaaatttatttatgtaaattctgtattttttgtcacatttgtgatctttagaaaaaagctctcagcaaaagagagtaagaatgagctcccatgagtagcgccctgaaggcctcagagaagtctacagtggaacagtgggtagctccttaatcttctgtcttaaaaatcctacacaggaaattacttatcttagaaataaataaaatattaaaagctttttctctgaaatcctgacaaggatgcccattatcaccatttctattcagtgttgtactagaggtcttaggcagtgcaaagagac

SEQ ID NO: 390490 - DNA, 220 bp, Homo sapiens
tgatatctctgcccctcatagccaaacttgtagccacagtggtatattccttctgatctgtctgtggcttgttgcttggtatctcccctatgcagcctggttaaagttcagttctggggcagctgggctctgctggggctttcttagggacttcagtggaggctgctgaagggactggttctgacctcctagtgctggccctggctatccctcagcctct

SEQ ID NO: 390491 - DNA, 891 bp, Homo sapiens
agtcactcagtcaccctgaacttcagctggagaaggggaacaggaataatgcctatcttccaggagtgttctgcacaaaactgaaggcacagatgaaaaagcactctgcaaattaaaagagaaggatggatagagaaaagcatcattacaaaagtgaaatgtgtgaattttattctggctttgaacattgagtagacgaagaagacaattccagacggaggaaactccacaagaaatatcatggaaatttgaaagaacacagtgggcttgggaagaggtgcttccaagaccaagataaccaggcaatcatagtagatgcatcaatgcacccttgcccaagggcctagacaagaggaggaaggaaaggaggagcacgtgcacaaagctaaggaggtgattaacaacatgatacagtaaggaccagccaatattaactgaatttctaagctgtgccaggacctccatcatctcatggaatcccaatggcattcaatgaagcagccttgggattcttctatttcataatggaatgagagaaatgaggctcacaaaggttggataacttgcctgaggtcacacagttgacatatggcagagccgggatgtgaacacatctccctgcttgaaaatctggcttctcacccgtaaaggtattgtttagcttcgcatgaattttatcaccttgcctagaaccagccaccatctgccagggctcctgactttttctgaaatgaatagacactaaagcctgctggggaatttcatggaaatcaagatgactcaacccagagtccatttcaaggctaggatgctagaggacgccaacaaaggagtagggaagtgaaacggatcagctcacatccaagcccttgcatgatcaatcctgcagta

SEQ ID NO: 390492 - DNA, 435 bp, Homo sapiens
atgctgttctagagggtcaccgtccagtaaggtgtgcccattgtgcatcattatagttttatctaattcattagatatttgcaagcctctactatgccaatgtaccatgccaggtacttgaggcatacaaagataaatgggacaagttctcggctgggcgcggtggctaacacctgtaatcccagcactttgggaggccaaggcaggcggatcacttgaggtcaggagtttgagaccagcctggccaacataacatggtgaaaccccgtctctactaaaaatacaaaaattagccaggtgtggtgggtgcctgtaatcccagctactcaggaggcagaggcaggagaatcacttgaacctgggaggcagaggttgcagtgagccgagatcgtgccactgcactccagcctgggcgacagtgcgagactccgtctc

SEQ ID NO: 390493 - DNA, 285 bp, Homo sapiens
aagaggcgcccgacgggtagtggagttttcttttgtttgggaaagagatggagtctggctacgacccgggacattcccctgcccgggctccccgaactctcactgctgattacatacgcccctggctgcctttcctttcctccctaccccactattcaaaactatctgcaaagtttctgtcccagtcccacctcccgccgtacatgagggaaggtttctggagaagcaacagcagacaaggcacaacttttcgtgctaggccctaaaacgacccccagcgccaat

SEQ ID NO: 390494 - DNA, 110 bp, Homo sapiens
ctatgcatgtctctggaaccaggttcagggcacctagagttttgtgatggagtgccaggtgtaggagggacatggtagatccagaggtgctgcatcctgagagcctcctg

SEQ ID NO: 390495 - DNA, 408 bp, Homo sapiens
caccccctcgtctcttacccgtgaatgttaagtttcttctggggtgcaccctcgtttcgtttcttgggttgtggtgcgcccaaagggttagtgccaatgcgaattctgacatttttcatgactttgaggatgcgactggggcgcggggagggaggtgtccgactcgtgtctaagtagttaaagtgattcttcacagacttctacacttattttcaccacattttacataagagaatattgagcaaaatttctcctctcgttttgtctgtccttaaaagatagtctctttatggtgttggaatttggcgcttttaagctttttttaatggattgggtacgtttcttttttattgtaaatactgagtcaattcaagttgggttatttttaagttttcgttttctcttttt

SEQ ID NO: 390496 - DNA, 364 bp, Homo sapiens
ctacccactgtgtgctaggtaacagcatgactgagacagtgtctttgttctcaatggcccaagttctagggaggggcccagacatgggaacaggcaatgaccttgtggtgttgcatgagttatgaagttacgacacggaagcactgggtgccgtggaagctcagggtgggggtaactaagccagttgggaggcaccccagagctttcccagaagaagcaacattcccaccaaacatcacagggcttaggtggaactagggcctgctgaacagggggaaagaaggtggggagggggctttcctaaccaaaggtaatagtagggtgagggtggagaggtttaaaaaaaagaccagggagccttttg

SEQ ID NO: 390497 - DNA, 156 bp, Homo sapiens
caaatcaagagagtgctcagcatcctcgggagacccctctgaagctttcaaactgagaagacgaagttcagcaattcctaagcgagtcgagtcggagcagccgcgcctgcaatttaaaagctgcaggatcctgggtccctctagcagcctgggccc

SEQ ID NO: 390498 - DNA, 315 bp, Homo sapiens
gtctcattcttttttagaataattgtcagttaatatcctttgcccatttttctatctggtctttagaatattattcataggaattatttttatatttagtctaagacacactttttttcacattttaacatctttgaaatctagatgcatcttattaagatagcatgatatgctttaattatttaaaaaaaatgtttttggccaagtgtagtggctcacgcctataatcctagcactttgggaaatcaaggtgggagaattgctttaggccaggagtttgagactacctggacaacatagtgagactccatctct

SEQ ID NO: 390499 - DNA, 365 bp, Homo sapiens
ggcctgcctccctggaacttcttagtgtcaaaattttatactccatgcttgtagtcataaggcctacattttatggtcatgtaggtttttaagggtgtataggtcttttgccattttaaatagtccaatgaatagctagctctatagataagtcatttagtatttttttttctagtgtatttggggctagatttctagacgcaggattgctgtgttaattcaatgcatgtgtacttttcccttcgtgtcttgtgagacttggatttttgccagttgatacctgagagtagtttcttcatatagttttattttacatttctcatagttggaatggggcctatttccatatgcctaaaggccatcac

SEQ ID NO: 390500 - DNA, 900 bp, Homo sapiens
taagaaaatcactccaatttgcattttgcctaacatcatttccatagtctaaaataaatataaaataaacagcaagtaataagtcattagcaaaaaaataaagtaagaaatgcacattaaaatgatgtataacataaccacatttatttaagactatattccaatatcaaatggcaaatttcagcaatgcaaaaactgcaattacttttgcaccaacctcaaaacttgggacagttgtcaggtcaagattttgtttcaagcaatgctggaagctgagggatcataagcatttgtgtgaagactggtaggctggtttatagccagaggaccttctctcaacaagattctccacttgtgaactccagcccttcttcctatctatgcttcttgccacttctcttcctttaccagcccatgatttcagacataaggataccctgttggagcccacattacttgcccttttttgggtcctacatgttactcacctgtttccctccacttccatctctacctattatattcccttcatttttcagcatccaggtaaaatgatatttcctctaagaagcactttgtagtccaccaattaaggtagatttctcccactcctgtgacccatgaaaattttattgtactagctataataatctgacttatattgaacttagctatttatgaggttttctcaagctcactgtaatctccacaaaggtagccaccatgatgtagtcatgtttgaatcctcccttcctaaatactccctatacgccacctagcccaagtattaattactgatggtttgtgacatagacaggctccgcaaaagtttgttgaatgcaattaagactaaggacctttggcttctttgatgcctatgttctttcaggtaaggtaaaa

SEQ ID NO: 390501 - DNA, 804 bp, Homo sapiens
cattaccaaatccattatagccatccccactgccaccatatccaccaccaccactgaagtttcctccactaccagtgttgtcattcctgccaaaaccacctccacgaccaccgccaaagtttctagaaccacttcagcctctttggctggataaagccctagccatctcttgctttgacagggctttcctaacttcacagttgtggccattcacagtatggtatttctgaatgacagtcttatccacggagtcatggtcgtcaaaggttacaaaggcaaagccccttttcttggcactgcctcagtgagtcatgatttgagtcacttcaatttttccatactgttcaaaataatctcttaggtgttgttcttcattgtttaatgccaccaacaaatatctttttcatagttaagtgggcacctggtctttgagaatcttctcttgagacagctctctttggttccacaactcttccatccaccttatgtggccttgcattcatggctgcatccacctcctccacagtggcatgtgtgatgaacccaaagcccctggagtgctctgtgtttggatctctcattaccacacagtccgtgagcgttccccattgctcaaaatggctcctcaggctctcatcggttgttttaaagctcaaccctccaatgaagagcttcctcagctgttcgggctctttaggagactctgacttagacatgacggaagggagaagagagactttaacgatgcttcttcagtggcgtccgcgggcagaaaagaacaagctgatgaacgtgtctcactgt

SEQ ID NO: 390502 - DNA, 775 bp, Homo sapiens
atgtgggagaaaggaaatacccattccaacccactgtagtatcctgtcccaccaaaggagaggaaaaaaactgaaaagcacttgtgaagttaacagttcagaagcacaggctcactaaaagactaagaacctaatcataggactgcaaaacactttccctctcccacatcttaataccaaattactaaagacctatttaccataattccttttttacccaggtacatcatgtccagctatcaagaaaaaaaattacaaggcatcctaaaaggcaaaagcagtttgaagagaccaagtaaaactaagagagtaagcaccaaaaccagactcagatatggtggggatactggacttaccatatgaagagattaaagcaactatgactaatacactaagggctctaatggataaagtagatagcatgcaagaatagatgggcaatataagcagagagatggaaattcgaagagagaatcaaaaagaaatgctagcgataaaacaaatttaaaaacccactgtaacagaactgaagaatagtagactggacacagctgaggaaagaatccctgagcttgaagacattatcaacagacacttcccaaaccgaaagacaaagagaaaaaagatgggaacctcctccaccaaaaacaaacaaacaaacaaacacagaataaaatatccaagaactgtgaaacaattacaaaaggtataagtgtactagaacaccagaaggagaagagaaagctaaagaaatctttgaaacaatcactgagaa

SEQ ID NO: 390503 - DNA, 287 bp, Homo sapiens
aagtgaacaatgtgcctctagcatgtattcaaatgaagaatttttgcctgaatattggtactaaaacatattaaaacccaaagtcaaaacatcatattagttatagcaggaaatttttctgatatatgcagcagaaggaaattgaaagcattatttccaaattgatcacaacaaacaaattcaggcaaatgaaagtccaacacatcatgatgggcgatgtctactacacccactccacaagccacatggccttctgggaacacagcctcgatgccacttgattctgt

SEQ ID NO: 390504 - DNA, 353 bp, Homo sapiens
cctaagaggggtttttaaaaaattaatcaatttcaaagattgacagataaaattatgtatatttaccatgtacaagtatgttgttttgaaatatggacacattgtggaatggctaaatcaagctcatcaacacacgcagaacatgcttaccatgtttttgtggtgagaacacttaaaagctacttttagtgcactgctgatgggcatgtaaattagtacaaccattatggaaaatggcatgaaggttcctaaaaagttataactaaaattaccacatggtctagcaatcccactacagggtagatactccaaggaaatgaaatcagcatgtcgagatatctgtactcccacgt

SEQ ID NO: 390505 - DNA, 414 bp, Homo sapiens
tgactctatgaggatcccctgccatttactccatggctaagaatggaaagaaaatgaatagttaaaaatatgttttggcattgtacagacttcaatcaatcactctgttttctggacccaacagaatcatcaatgactacccttactcaattctctcattactcaagaattttggagatgaaacccaactgtgaaatgaaaattcttaaatggtaatactgttcatctgagtatgtttacagtacttctgaatccacataccttatcacccctcaccttccaacctcagaatatctggccaaaaggaggtagcaggcaatgctgaaggctgctccttggacaggggcagtgtggtcagccttgtcatcgggaggcatggtgtggccatggagtaaggacatcttagaaaaagac

SEQ ID NO: 390506 - DNA, 951 bp, Homo sapiens
taggcaatagagtgagactctatctcaaacaaacaaacaaaaatttaatctgctataatagatactaatttattttaagaaatacttagtgaatgttgttctacatacttgccaattgggaggaaaaaagaaatattcactaaatgaatgaatgttatacaccaagtatctccttcattttatgtcatggagttctagcttctgatatcacagaaatatgtgatttctaaaatgtttcagactattgtgataagtattggaaaatgcatcaagtgactctaaatatttaaacatacatcacctatatttcatataatcctgattcaataatatttctatagattttttatgcaatttggtaattttgtttgtttgaaacacagtgctatttcatatatttctattgataatccaatttgacctaattaggcatatttctcacacatggtattattgaacatattgcacatttattaaatgatatgtattttacttaagagtactttatataatctataatttttgtaatttgtacttataataaatcaaatattaagtgggattttagccaaaccatctagacatttttgtcataatgtttttattaaaacagcaaaataggagtttcaaaatattttaaaatttgaatacttctaaaatgtaaaatgtttgcaactggtgtaatgcagttgattgtctatccctctaaactgtctaaataacttaggttcaagaacagtttattgaagaacataggaactgcgcaattctgtgttttatcatttcagttttaatcaccccggcttgattatggcaacaacattttagacaagcaattattactatttttgaggcccatatactgggccattatggttttgcttctaacgtacatataaatgcacatgcaatatatataaattatgtttgctgttttaaaattagaaatgc

SEQ ID NO: 390507 - DNA, 226 bp, Homo sapiens
ctgaatagaccaattgcactcagttttgtggcagtggatataaaagaaatatgaagaacctctcgtcagtggggcacaatgactcacacctgtaatagcaatgttttgggagaccaaagtggaaggatcgcttgagacccggctgggcaacatagtgacactccatctgtacaaaaactttaaaaattagcctggcatggtggcacacgcctgtagttccagcgac

SEQ ID NO: 390508 - DNA, 771 bp, Homo sapiens
tgtggtggtgcacacctgtagttccagctagtggggaagctgaggcaggataattgcttgaacccaggacacagaggttgcagtgagctcacgccactgcactccagcctgggtgacagagtgagactctgtttctcaaaaacaaacaaacaaacttctaaagtcacattgttaactagtggcagggccagtggttgaagaaaggcagcaaggctccagagtcccatcacatgctgtctttcggtatttctccctccaaaatgaaggaggacccccgcccccaatcccacttcatactggaaacatgcattgctccacccatctccctgccaacaaatcccaagtctcttggcttgacccaagaccagaacaagtcaccaacatttgttgacctctaacaagcattgtacttaggtgccttatgtggcttgtttcattcaaacttcacaacaaatgtgttattattattcccattttactgacaggaggactataaccaaagcatgtctatcctcggtcccaaaccaaacagtaaccccatctcattcaaaagccacagtcctgactgggcacggtggctcacgcctgtaatcccagcatttttggaggccaaggcaggcggatcacctgaggtcgggagtttgagaccagcctgaccaacatggagaaaccccatctctactaaaaatacaaaattagctgggcgtggtggcacatgcctgtaatcccagctactcgggaggctgaggcaggagaatcacttgaacccgg

SEQ ID NO: 390509 - DNA, 419 bp, Homo sapiens
tttatatttagttgtttgcttaatatttctgcccttcaccagagtgttagcttcttgaaggcaggaacttcgtgtgtctgggtcactgccaaacccctcaggcccagaacaggccctggcacataataagtgcttaggtaggccgggcgcagtggctcacacctgtaatcccagcactttgggaggcaggaggatcacctgagatcaggagttcgagaccagcctgaccaacatggtgaaaccccttctctactaaatgaaaaaaattagccgggcgtggtggcggccacctgtaatctcagctactcaggaggctgaggcaggagaaacacttgaaactgggaggccgaggttgcagtgagccgagattgcaccattgcactccacccttgggcaacaagagtgaaaactccatctca

SEQ ID NO: 390510 - DNA, 259 bp, Homo sapiens
atagcgttgatgagtccatttctgtggctcctttctgggtataaacctgagacgggcccattacccaggacacacaccatcagtgtctctggcctgaacagggccatttccaaagcaagccaagcccagaatccagggggagaggccatgagccccagaagcatcctggaatgtcaggccacttggccacacagagcactgggcccaccctagctcatccagctcgagcagtggacagtgtctgccacagaactcctaa

SEQ ID NO: 390511 - DNA, 387 bp, Homo sapiens
agagcttccaacccagccaatttgggagaaatgatgagcaaggcctgagggagtgagactgcgagagaggaagcctggcacgcgcagttgcacatcacttattcctgccagactctttcttccctatctgtaagatgggaggttgggctcgctctgtatgttattgagctggttgtctctttgacatctataagaaaagtttcttcaagatccaagtatatacaattcggtgaagcagagtgtgctgacccagtaagaagttgtgtgagagaagggatgtcttaacagccatctcgctgaaacggccatgcaggcacccaccagcttagggtattgcggctgctgggagttggcctctgtgattcaagcatccctttgacccaaggc

SEQ ID NO: 390512 - DNA, 293 bp, Homo sapiens
ggcctttactgtctgtatttctgtcagcactttggccacaaccgctcacacagtctaataaatcccaaactttcccttatcttcctgttttcttctgagccttctaaactcttccaacttttgcccattacccagttccaaagccacttccacattttcaagtatctttatagcaaccaccctctccttggtaccagttgtcttccttagttcatttgtgttgctataaatgcctgaggctttgtaacttgaaaagaaattttatttggctcacagttctgcagcctgtacaa

SEQ ID NO: 390513 - DNA, 345 bp, Homo sapiens
gctgcagtgagcatgattgtgccattgccctctacctctagcttgggtgacagagcaagtctctgtctccaaaaagaaaaaaaaaaaactatcttaactcataagctgttctccaaccttattttatcatcctcatgaaattctttatctttgcaaaatttgtaatttgactttgcacttgatttgcatggtgttattggtagattccaagtctctccttgagagactaatcagtaaatgacaaattggtgataactgttaagctgggagaggtgtctgaagaggaactacattaatgatttagttactttagtagtagcattagtactgttgcttcttttaaag

SEQ ID NO: 390514 - DNA, 469 bp, Homo sapiens
ccccttaccagtcgagcattcctagaggaaggtcatagaccagttaaactccaccattttgccttgcactgcacatccttgagcccaatcacccaactcctgagatcttatcaggaaactgctaatcaccagattctacctattaggagactgacctttccctggatttggctgtgaccaattactattttagagagacagtttaacaacctcctgaacatcacctgatagtcctctgacattccttgggaggtgagagggccgtctcccatcctgctcatctctgccctactatctactgtaacagttaggtgcctacatttcctaagtactggttactcagtttctcccagattcccatgaaattgagagctagattgatgtggcttccattccttgaaaccaaaagaattctcaccattcattttcacatgtctacagcaaggcagaaatattccattctaggaca

SEQ ID NO: 390515 - DNA, 363 bp, Homo sapiens
gaaagtaccaaatgaacagaataaacagaacgtgttgagagcagattcatttcaaggtacagtgggccagaaaggcactaccacctgttctcaacttttacttacagattgcaatcacgtggacagctcttgaaaattcagatctccaggtcttgtcccagctcaatttattgaaatcttccagggaggtgctgagcatgggtaatttttaaaagctgcccaggtgattccagtgtacaaccagggtcaagactggctggagtacagtggaagaggtagccttactgctggcacactaaacatagggtttttcttccccaaaagaaaaagtaagacaattatgttctactgatcagtactcac

SEQ ID NO: 390516 - DNA, 879 bp, Homo sapiens
  misc_feature (774)..(774): n is a, c, g, or t
  misc_feature (777)..(777): n is a, c, g, or t
  misc_feature (803)..(803): n is a, c, g, or t
  misc_feature (805)..(805): n is a, c, g, or t
ggggcacgaagcggggctttgatgacccgcaaagggcgaggcatgcaggaggtggaggaattaagtgaaacagggaaggttgttaaacagcaccgtgtgggcgaggccttaagggtcgtggtccttgtctgggcggggtctttgggcgtcgacgaggcctggttctgggtaggcggggctactacggggcggtgcctgctgtggaaatgcctgcccgcgcgcttctgcccaggcgcatggggcatcgtactctagcctccactcctgccctgtgggcctccatcccgtgccctcgctctgagctgcgcctggacctggttctgccttctggacaatctttccggtggagggagcaaagtcctgcacactggagtggtgtactagcggatcaagtatggacactgactcagactgaggagcagctccactgcactgtgtaccgaggagacaagagccaggctagcaggcccacaccagacgagctggaggccgtgcgcaagtacttccagctagatgttaccctggctcaactgtatcaccactggggttccgtggactcccacttccaagaggtggctcagaaattccaaggtgtgcgactgctgcgacaagaccccatcgaatgccttttctcttttatctgttcctccaacaacaacatcgcccgcatcactggcatggtggagcggctgtgccaggcttttggacctcggctcatccagcttgatgatgtcacctaccatggcttccccagcctgcaggccctggctgggncanaggtggaggtcatctcaggaagctgngnctgggctatcgtgcccgttacgtgagtgccagtgcccgagccatcctggaagaacagggcgggctagcctggct

SEQ ID NO: 390517 - DNA, 311 bp, Homo sapiens
ttctcagcctacaagttcctgttcaaacctaatgtctttcacgaagtcttcccttccctgatcctcagccactcatcataacaaaacatttattgcatgctcactctataccaggtacagtagatgtaatggaggtgggaacagagacagtgtcagttatatagggcttgcagtctgggtgtgtgcatgtcagccagagacaagtataattttacacctgtcatgaggagctataagatagggccgagggccgggcaccgtggcttactcctgtaatcccagcactttgggaggccgaggtgggcaggtca

SEQ ID NO: 390518 - DNA, 763 bp, Homo sapiens
agcccacttcctcaggctgggaacggcctctgggcccagccccttccccttcccccgggacttcctcctggttaatgagtagtcaaagcacctgggaaatgaggctcctgctgccgtgaggctggaatgtgagttctgcttccagatagagtcttgtgcaaggggccctgcctgggatgggctgttacaggcagtaaacagaggttgccaatgttcctctttttgaggcttgctgatgtatttgcgcttgggagcccattttatagaaaaggctgagaggcagatttgccctcagacttatctgatgctcctccaagcagccctcttggcttaacactttctgaaagggctcctcggccccctgacatggcaggggtgtctagaggaacagggtggaagaacagaccttgtcagctctgaagtctgagcactgctaggtgtgcgccctcctcactgggcacgtcacttgagggctctgaccttcaggttctcatctgagaaggggcatgatgcggacatgggaatgtgtgttagttgttcagcagagcctgaactattaatggaccagcccaaaaaagtattgctgacagggggcaacccatgtagtggagtccatggagctggggagtcaggcagtccctagttcaaatctctgttccagccctgccggcttcgtgacctggaggagtcacagaactaccctgagcctcaggtaacccacccctgaaatggagcaatagtggcacccaggagggttagaaag

SEQ ID NO: 390519 - DNA, 239 bp, Homo sapiens
tccacaaagaggcctcttctgaccattccactctcacacccaggcctcctgtctccttttcctgctcatttttctccatagcacttaccatcctctgatactatatattttaaccatttcgtttgctctctttctctcctgctaatacgtaagctccatgagggcagagacctttattgattttgttcactatcccatcccagcatttagaacaatgcctggctccaagtaggcactca

SEQ ID NO: 390520 - DNA, 377 bp, Homo sapiens
tctatacttattaatggtaatactgttttccctgcacccattttggaatttttcatctcttcatttacctatctatgtattggcaccaaatactttaaataacttcctcataaagtttttcatgttgtcttattttcaaattcccattgctttggttttggtcattagtagattatgcctaaattattacaacaaccttcttagattctgtctatagtcctttattttcaagcaccatcttgtaccccaccaccagattaatcttatcaaacatcacattccccaggcaatcttccagtccacagtccagtgactatctgctacttaagatagaggctttagcaataaattctgttttttcacaatctagtcagtat

SEQ ID NO: 390521 - DNA, 228 bp, Homo sapiens
gcattctgtccttgatccttggctcttttttgtggcactcatttcccagataccccatctatgctcatcaactcattttttccatactgatgattctggatcatttctccttggccctgactttgccaccaggcacatatttctgagtgacgtacaggcacctccaacttagtgagcagaagcctccatgagccctcagcctttctgacccctcttactcctgctgag

SEQ ID NO: 390522 - DNA, 421 bp, Homo sapiens
atctgtggttcttagcattgctgtcagctagaggcacttgggctaacctccttagctttggtttcctcctctgcgatgtaaggaggcttgaactgcagtacctctaggtggtccttccagctctaagcttgagaacttaagtttattttagctgaagaagagagatagaaagccccttgaggacaggaaccagcttgtatttcccacagcacctactggtactttgctcctatgggctcctgaatatttaattaatgaaacctcttgttactgtttgaaagctcactacttgtattaacctttcctgagtattcttggactctgatccagttttttctatatcacctcttattgtacgaattgtatgtcactttcacgttttgttttattctttatgtgcttcatttacttatttattgct

SEQ ID NO: 390523 - DNA, 356 bp, Homo sapiens
atttttgctttgagaagctacgtatagtttttaaaaactgggttgaggaagacagtcctttgtatttacccacataattaccatttctgctgctcttcactacttgagtatttacatttctatctgataccattcccctcagcctgaggaatttccttcagcatttctctaatgccaattttctggtgaagaattcttttagctctcatttatctgaaaatgtcttaatttcatcttcattttatggatatttttcactgggtataaaattcttttctttaagaatgttgaatattggcccccactctcttctggcttgtagggtttctgccgagagatccactgttagtctgatg

SEQ ID NO: 390524 - DNA, 481 bp, Homo sapiens
gaagaggtaggtcaaagagaaaataaaaagtgagatatcagcaataccaataaatataaatggattaaatatgctacataaaacactaagattattggccttaaaaaaagcaatttgttgtcttaaaaattacagttgtattcagaaatattgaaattgagtgaaaaataacataacaaaaaatttatctatatacattaatatcatgaaaattcaattttaaggtaaaacaaatagcattaagaaagaaagagatgtatattttataatggcaaaggtgtataattgaatgattgtattggtaacctcaactgtgcatttccaccagtatccatgtcctttgctgtgactgtgaaattcatttaactaatttgttcgagtatattttcccagccctaaatttgggcttactgctattaattgtcttagccaaaaataatgttagcagctttaacataaataaaaccttgatgaagtgttt

SEQ ID NO: 390525 - DNA, 761 bp, Homo sapiens
gtcccttgacctgtgacgagtagaaggtgatggcgcacctgcctcttccccacaggaggctgggcgtggcggagagcaggttgtgtttagggaagggactcagagcaggctgcccgcgcctgattcccctgagtgcagggacacggctctgcctgaaacatgtgaaaactcttctccatgtgacctgttgagcaggcgtggtctacacagaaggtccttccaaccgtgtggttttttgaaaggggaaattcagtgttacctttgggaccactgtggggttggtggtctttggccaggaggattctgcactgtccatcctcaggaaatgctgattgaaagccttctgatgcccagaggtgctggctgtgtgggagctgcacggggccaggccatccctctgctgctgcaggccccgcctaccctcttgagcagcagcccagctcagccgtgttccccactgtttcatcctcagagcccttcctgttgccccaggaagggtttatcgtaaaatcttactgtggccagaaaacctctgtgcctggcaccggtcaccttcccagcttcgcccactccctgcgctaaagtggacccgctcattgttccttgacaagctccatgctgctgcacagatgtctttttctcctgcttccttcctggcagctccaggcactcctccagccatgtttgtggaccagctagtgatgagggccacggtcactggggtcttcttctttcttccttgtctgattctccagtagacc

SEQ ID NO: 390526 - DNA, 261 bp, Homo sapiens
taaaaccacatatcccctgattttctgtacaatcctgatttatctgcccccacattaaccttatctgactgttctaaccactgcacatacaggtaatattaatcagctttttttttttttttctgagatggagtctcactctgccgccccggctggaatacagtgatgtgatcgcggctcactgcaacctccacctcccaggttcaagccattttcctgcctcagcctcctaagtagctgagattacaagtgcccgccacc

SEQ ID NO: 390527 - DNA, 394 bp, Homo sapiens
gcgcagagtcgacagctctacagtatatctaggctggatatagagtgcacgacagacccttcttttctagtgggaagcattgggtgggaagttagtcctttctagccttaaaatgctgtgattctgtcatctgaagaatgggcaccaacttctgcttgggattgttttgaggatcaaatgagaaagcactttaaagattataaaacacacttaccttgtttattatgaatacttctctccccccttggttttgccccccttggttttgacttaggttttttaaaagtttaaaattgaattgtaccaataggagtatgaactaatgatcccagggtttaggtagatttggggacttaaatctttcaataagtgatcctttagctagattgggatg

SEQ ID NO: 390528 - DNA, 198 bp, Homo sapiens
gaaatgtatatgaattactttttaagatatgaaaaaatgtgttggtgaaatgtttagttctgtatttttataagtggattcttactctatttaacttaggagtaaaaacatactgtgaaatgtacatatgataatataaagttcacctgcctagtatcctgttctagaaattcaagtaggaacaagcttggaatattc

SEQ ID NO: 390529 - DNA, 184 bp, Homo sapiens
aagagaagcatctaagatagaaggcagggcctcaggaaggggcagagactagactggggacctggatagaaaggaggagcctgagaaagaaggctcaggaagggggtagtgctctgtgggaaggagcctggggtcaggagggctggctatgggaggggtgggaccatgggggaggggctatggg

SEQ ID NO: 390530 - DNA, 308 bp, Homo sapiens
cacatatgtgtgccctgcagagcacagcaagtgttaccatagccctgagaaaagaaaggatgatttgaactggagagacagacaaagacctcatgataatagttgtttatgtagtccctttcataaatctcttcacagatcatacagtccctccacagatcactggcccacacactcttgcatcccattctcacagtagccctatgggagataataccatgatgtctctacttcatatggaagaagttaaagttcagaggagtgaggtaacttgcccaagagtataactaacaggggacagatctggg

SEQ ID NO: 390531 - DNA, 761 bp, Homo sapiens
aacagggagatagcccatatgcagctactgcaataatcaaggtgaaaatgggggtgataagaaggggccatattctgaatctgttttgaggctagagccaacagaatcacagccagaccagatataggatgtaagggaagtaacagggacaacatcagattttttggtctgaacaatgaaagatgaagcttccatctgcaatgaagagaaggactggagaaggagccggttagggaaggatcatcaggatctcagttttggacaggcttgaacatccgagtgagatttgtgtgtacaaaatatgggaagtgtgacactgtgttaactcacggcgaggatggggaaactctgtgtcaccacggtcacgggggggacaggcaacgggctgggagatcatgtcggggacatttcagcaggatgagatacctgtgccactctggggagagacagaggagaacgacatttgaagcacggagtgaaagttcagatccacagtcagtctgaggcacctttcatccaagagctggggttggggtggctcccgagagttccacgaactttgttggcacacaggaggcacgagggtcacatatctgtgcccaccgtggggtgagtggcgatcctcagagatggggctcgacttttttcctgtgttaccgcattaccggctgtacgattgactgtgagaaccggtaccttgttgtggaaactgcgaactggcgcatggttcacatgcccagggatgtccctttttgtacccc

SEQ ID NO: 390532 - DNA, 420 bp, Homo sapiens
atgtgactaatctgagtttcttccaccaagcatgttagttaggggtggaggactagaacctagaaccctgaattcgagcctggaagatatgtaagccacatgctattgagatcgtggtcatgggacacccgctaacacaaaccttctggtaggaagtttttgagaagactgggtccaatatccccaagctaaaatcccactggcccatcgctgtgtttgctcagaaaaggaatctgggttctttggtttctgctttccagttgaccctggttgctcctctgttttacggcattttgggagtcggtctcccagagcagcgctgattgtaatgagaagcgcgttccctctctgggggacaggagcagtgggagaaaaatgggcctgggaaagagctcctccaaataaaacttattagacaga

SEQ ID NO: 390533 - DNA, 157 bp, Homo sapiens
ctagaatactccatcttttggagggctggcagatgagagggtgcctgcaaatgaggctcagaagttattactggggagtattctgaaggtgtgggtttctgaggtctcagcaagtaatttgataggataatttataatggaagaacagaatatggaa

SEQ ID NO: 390534 - DNA, 362 bp, Homo sapiens
caagaaaacacatcctaatcaccaacaaacataagcttctgcagtcacactctgatgtgataaattagaattctgctctacagaagccaacacagtatggatgagttgagagttatttttaatgttaacctagaatggtaaagcatcagaatgtttgagcctaagctgtacagaggcaatacaaaattctattactgtagaattctaattttcctttagacacaattcttttacattttaactatatcttcctgtactttatcccaagagcaatgcagagttattaaaatgctttgagtggaagactgaagtgatagagatggtctttatgtaaaaggtatctggaagcaatgctcagacta

SEQ ID NO: 390535 - DNA, 378 bp, Homo sapiens
gcaggccagaaatccaaatagttcccttcctgcttggatggtctaaccaaccgggcatggactgtacagtagctctcttccagcaccccacagcctggggtaataagtcatgcaccagtctctcactgcttttcccaaaagtcaaagacttccctgtgggtcagcccccaagggccatctggctcctggcctctgatgccaattttacctcttgtctctcatgacggggaaaacttacatctttcaggaatctaacgggatgcagtgaatccgagccttttcgagagctcaccaatcagactgcccttgtctatccacaagcagatgtttggtggtattgtggaggacctctactgggtatgctgccaaataattgga

SEQ ID NO: 390536 - DNA, 274 bp, Homo sapiens
catccagactccctggtgagccccgtgggcgctaacatctgagaagcatggctctgcaaaggtgtcttgtccactgaatttgttgaagtcatttcactgatttcagcccacaactggggcatctttatcaaagcccagggtgctccacaagccatcaggcctggggcaggtgggggccctcccctctcccaggagaggcctagccactggcattcctgcaggagcgcgtgcagacctcagggagactcatgaaatgctggtcactgtgcactgg

SEQ ID NO: 390537 - DNA, 611 bp, Homo sapiens
gtgaaatctataaaatacttaaggaagatataataccaatcttacaaaaatctttacaaaaaagaagtaagatggtatccttccaataaattttatgagaccagcatagccttgacattaaaaccatgcaatgacattacaaataacattgcaaactttcatgtacataggcaaaaacacttaagaaaatattagcaaatcaaatctagtgatataaaatgtatgatacattatgatcaaagtcatttcttctcctaggaatgtaaagtgtaaatactaaaaatcaaatggtgtaattcactgtattagtagattactgtattaatagattgaaagggtaacaccatatgattatctcaatagatgcataaacaagcatttgacaaagttcaatactcattcatgatttaaaaactcaataaattggatggaaattccccaaactgataaagtatatgtataggaatcctataattaacctcacatttaatagcaaaaggtaatttcctctaccaatatcaggaataaggcaaggatgtctgccctgttttattcaatatcatcttggaggtttaagccagtgtgataaggcaagaaaaataagtgaaagg

SEQ ID NO: 390538 - DNA, 151 bp, Homo sapiens
aagaaataagacaagcaaaaatccaaaaagtgacaaaagctctacccaatgagggggtcagtcccatctaagtaatgcaaaaatgggattggcttgaggaagtaggaatgggaacccagtactgaagttataggccaaatcaaaagatggg

SEQ ID NO: 390539 - DNA, 378 bp, Homo sapiens
cccaggctagagtgcaatggcgctatctcggctcactgcaagctccgcctcccaggttcatgccattctcctgcctcagcctcctgagtagctgggattacaggtgcccgccaccacgcccggctaattttttggtatttttagtagagacggggtttcaccatcttggccaggatggtctcaaactcctgaccttgtgatccaccctcctcggcctcccaaagtgctgggattataggcgtgagccactgcgcccagccacggatttttctctctcatttcccgtctgtgcccagccttccagccagcccactatcgccaaatcgccccaagtaccttctagcccagcggaggagagagcctgctctttcttttttc

SEQ ID NO: 390540 - DNA, 447 bp, Homo sapiens
aataaaaggtagtattttattacaggtaatttgcattcttcattaagaatatatattaattttatcccttagatttttatattcttgtcatcaaaatcctctttctgctgtttctaagagtgagaaaatgctctcaactgaagttaggcaggtcacatgtgaatactgagctttaaaccaaatgaatcatggtacaatctaatttcttcctgatgtgagttgactcttgaattcattgttaccataaatagggtattcttgtgacatattaatatgaccagagcgaggcacctatctttgaggaagttagttttaagatggtcattgtcctcttacacctgccccaagtaaatgacttacgaagcagattttttttaaagacaaaatcatttggtttgtggacattaccaattattatgtttgtaagacttaactccatacatccct

SEQ ID NO: 390541 - DNA, 449 bp, Homo sapiens
agatgatgttttctgggaattcttagacttcaatgtttcaatcctgctcctataactcaaaccaaaaagttgggggtgtatttggtcttagaagggattattgagtttttgatgggagaaaatatttaagatgaaacagtaacatacatctgcaggattaagtgttaaatttttaaatcagtgaaattgtatataatttttttaatggtataaagtactgaagttggcatattaaagaacattgaattttgagatggaagaattagattctagtcccatttctttttatatcttaataaactgacttttgtcaaacaattaaaaatgagaccgaggttttcctctagacataaacaagttgcacccagcttgtgggttttttgagcaaattgcaggggaggggatgcacagaaaatgagtgacagatggctgggtgtgatggctcacac

SEQ ID NO: 390542 - DNA, 454 bp, Homo sapiens
gcaggagccagggactggagtaagaaagcttacatgccaaccttgcattctcctctactgtagctgaactggccctcaaaccatagcacattctttctcactcttccctgtgctttccataggcagaggttcttcattccatggctaacatcatcacagctcttggatctccagtaagcttgtgatgaatgctgccaggtctgcaacttactcttcagggaagagggctcccttgtggcccagggcaggtccagaaatgctaagagccatgacccagaattggaaacaccaacagcccagcttggtgctctacaccactgtgccaagctattacctaagctgcaagaaaaagtcccctttacttttccctcccctcccctccactcacttccctccttccttccttccttccttccttccttccttccttccttccttccttccttccttcctt

SEQ ID NO: 390543 - DNA, 870 bp, Homo sapiens
cctatcctatctgcagcctctagtccaaggctcccaagggccccacgatatctgatgcatcttagcacagagcaagctaatgccgactcatgccacatccccgttacacacaagaggtcagagaggaagcagggcagagcagttttcctctgagccagacctcagaggtggccgtggtatttttgttttcccttccaccaaacaaaaggatctgtgtaaagcaaggcatcatcttactgcaaggggagacatcgctggggtctggttagaagatctggctctattttctccaatgaaggtctttataggaaatctgcattagtgccttgtccatgttcatagaccctctgcttcatggcagaagggcgctgacttgaaggcccctaagcagcgaaggaaggggagcctctgtcccctccctagctggcttccctggcacatgctggtttccctccaattctgtggtgcacatcatgaccagcagaggaaagaattcagctggaccacctcaagctctgtgtgacggagttgaaagctttgctgatgtatatgttggtggtcaaggaaggctttctgaacacttacctggtgcccacagaggctctgagagctggaagctggaaagagtcagtctggggtcctaaaaggtatcttctcttcagtgccaacatcaggggcatattggtgatagaaacagggtctctgcatggctacaggcaccattaattggttcagttttcttccatttctcctgagctcaccctgaccctatgcactgctgaccaggaattctaacccgcagcatcgtgggtgggcccaccttgcagcctcatcacggttgagtttgttactcttattgatgaagaaact

SEQ ID NO: 390544 - DNA, 113 bp, Homo sapiens
tcaacaacaggcctgtccagatgtgatttaattcaaagcctgattacctttttctctttttactcttataattggaatgttgttgatcagattctgcttctaataaaaatggc

SEQ ID NO: 390545 - DNA, 286 bp, Homo sapiens
gcttggaatctaatgaatgctctgcagtcaccatatgaaattcttaatcatttttccttcaaattcgtgtattgtaagtgaagtgcaataacacagtggatgcttgagagcttggactcttgtctcaccccggtcgcgtctcctgcgtcttcctgggacaggttctgggcccccacccggcgaacaccgctgccctccgccctgggcagtggccggccacggacgtgggggcggcgcagacctcggcgtacagccaagggacctcgccgccacgctgggtcgcctg

SEQ ID NO: 390546 - DNA, 277 bp, Homo sapiens
tgtgtggctaagccatagccctgactaaatccagcgctccatattactacattcctgaacttatggtggtgaacatactaaagtaaaacaaaaccaaacattgaaaaatcaaaaattcaaagtgtgactaaatcatgaagaatagatgtagttcaaatgtatagtcactgaccttcgatacttccagaaaatgataggagtctattccctctcctcctctgctagctaaccattttagagattccctagtcaagcttccaacaatgctccattgccc

SEQ ID NO: 390547 - DNA, 196 bp, Homo sapiens
tgcaaccatgcacccttgtctagattgacaaccctgaaaggcaacctttctgggtacttgcatgaagcattcacagttgaaaaacagctgtcagtgagcctgctctgtttctcaagatggtgggagcctgctttatcactcagaagcaccacgtgcattctgtgcacctttcccgtcattgactggaattagtttc

SEQ ID NO: 390548 - DNA, 366 bp, Homo sapiens
ctgtagcctcagctacaggggaggctgaggcaagaggatcccttgagcccaggaggttgaggctgcagtgagccatgattgcaccattgcactccagcttgggccagagagttgagaccctatctctaaaaaaaattaaagtaataaaatatcattacattcttgtaccgctttatagtttagaatgtatttcacatattccctgtgtgcctctcataatcctccaagacaaggcagctattaactcatttttatggatgaataagctgaaacatgcagaaataacttgctaaaggtggaaacaatccaaatgtctatcagctgatgaatggataaataaaatatggtgtatccataaatgggata

SEQ ID NO: 390549 - DNA, 152 bp, Homo sapiens
agttcccatttcacctgctctttaatattgtcaactcccctgctagctccaaatttccagtaatttcatattttttttgtttgtttgaatcaggatccaaataaacaaaaaaaatatgaaattactggaaatttggagctagcaggtgaatg

SEQ ID NO: 390550 - DNA, 327 bp, Homo sapiens
ccctttgccttatgaccctccatcgaattctttcttctgaggagtcgagaattgaggttgctgcagacccgtacagatttgccactagcaggaagaccagaagttgcaacagctgcaggcagagagtaggggtgaggtgctcagtgcaaagagaattctggtggcaaggggatccttgatctgtggtggtgtgtgaccactctgggcagtgatccaaaaaattgaattcacacacactcacttcttcctggagcaagcagaacaaatgtttcttgcatcctgctcagctccagccctcctcaagctccaaccaccccccaccacacc

SEQ ID NO: 390551 - DNA, 107 bp, Homo sapiens
accgaacattaaacacagaaccaattctagtcaaagtctttaaacaaattgaagatgacggaatacttctaaacttattttataaggccaggattactgagatacca

SEQ ID NO: 390552 - DNA, 759 bp, Homo sapiens
aaacttccaacgaccagagatattcagacagccattactaagaaggaacaaagtaaagatggttttaaaagacaaatcttatgtagtcttcaagtaatacttagttcttgtatattgtgctacggtttgaatgtgtcctctccaaaattcaggtgttaatacttactggccaatgtaaagatattaagaggtggggtctttaagaggtgattaggtcatgagggttcctcctttcctgaatgggattaggcccccttataagaagcttaatggagggattttgttctgcttgcccttctgtcttctgccatgtgaagacacaatgttcctcccctctggaggggatacagcaacaagctgccatcttggaaacagagagcagccctcaccagacaactgaacctgttggtgccttgatcttggacttcccagcctccaaaactgtgaaaaaatacatttctgctctttataaatttcccagtctgtgatattctgtgataggagcacaaaacagactaagacaatatgtaactatataatatagtttaatattattcttggttctgaggtctagaatagtacttaacaaatttaacaagaaatgtgtaagacctatatgaggaagatgacaaaactataaaggcaaaataagatctgaataaatggagacaccacttatctgcttggaaaagcatgtaaacatgtccattctcttgagataatatataaattgtaatgcaaaaccgtgttatttcttaa

SEQ ID NO: 390553 - DNA, 446 bp, Homo sapiens
ttcagaaggaagggaaggctgtgcagtgcactcagcattttaatgctactgcaattgctgcaatcatttcttagggttacttctgtcctaattttccccaaatctgctgcacagatgcggcaactgtcccaagcatctctggcctaacagatttatgcacctagcaatttgcatctagcaggttcgagatagtgtgtctctagtgggccatgccagctggtcagctatgttgacctgcacgggttgtggagacctcacttctagttggtgtggtccaaggagcctggtcttcctggatgtgtggcattcaccagcacatgcagaagaagggagagtgcacctcatttaatagtggccagggctatagcaacacctttctagggagtggagagggccaaaggatcccagacttgtcaagaatgatccttttgataaattgcaagtca

SEQ ID NO: 390554 - DNA, 291 bp, Homo sapiens
aatttgtggtacacgattaaagcttaggtcagaaaagaagaaagttttcaaatcagcgatataataatttccaacttaagaaactagaagagcaaattgaaccaaagcaggcagaatggaagaaagaataagataagaaaatcaatgaaattaaaagcaacagaaactaaggccaggtgcagtggctcatgcctgtaatcccaacacttcgggaggccgaggtgggcaggtcacgtgaggtcaggagtttgagaccagcctaaccatcatggcaaaaccatctctactaaa

SEQ ID NO: 390555 - DNA, 462 bp, Homo sapiens
gccgtctaggattttttatattggagaccagtctgatgagtagcccttgagcagggactggattctaagtcttggagaaaatgagtaagttctacctcttatgtgaggtatgattgaagaaattgtgttttctttgttttttgagaggcagggtcttgccctgttgcctacctggagtgtggtggcataatcatagctcacttcagtcttgacctcctagggtcaagcaatcctcccacctcagcctcctgagtagctgggactactagcacgtgccactatgcccagctaatttttaaatttttttgtagcgatgtggtcttggctatgttgcccaggctggtcttgaactcctgacctcaggtgatccgcccccctcaactcccaaagtgctggaatcacaggtgtgagccaccgcgcccggcccaactttcatttcttttgcgtatgtacccagaagta

SEQ ID NO: 390556 - DNA, 392 bp, Homo sapiens
catagcagcaaataaatatgacagaatccattcattcaacacacactgacttagcatcttcaatgtgccagactccttcccaagaactgaaagaacatcagtgaatagacagacaagcatccttgtccttagagagacaacaaacaagatgaatcagtgaaatatataacataggacacagtgacaagcactcaagagaaaaattaaacacagaaaagacatattaaaagtttagctaaagggccagggaaggtttcatagcaatgtgttaataacacagaggcatgaagaaaaggctgcagggacacaaagaaggaatgattccttcaagagaagctggggaagactccagagagggtgtggctcttgaggtaggttctgaaggatgacta

SEQ ID NO: 390557 - DNA, 1057 bp, Homo sapiens
cgcggtggctcacacctgtaatcccagcactttgggaggccgaggtgggcggatcacgaggtcaggagatcgagactgtcctagttaacacggtgaaaccctgtctctactacaaatacaaaaaattagcctggcgtggtggcgggtacctgcagtcccagctactcgggaggctgaggcaggagaatggcatgaacctgggaggcacaggttgcagtgagccgagatcgcagccactgcattccagcctggacaacagagcgagactctgtctcaaaaacaaaactaaaaaaccctattttcacatacagtcacattgggatttggagcttcaacatatgaattttcagggttatcattcagtccaaagtacttaatatgattcttttccgtttccacatagacaatcacataatctgtaaataatgactcttacttttccactttagtcgttaggttatacctatatatatattttcttgctttactggactaatttcaacctccagcacaccaccaatgaatagcagtaataccagcataattgtctgcagttctgctgagatacgtgctctattttattggcttggctgtaggtttttattttattttttgaagaggctaatctcttacaggaaaggtttctttttatatccagtttttacatgatgaatgatttcccagtatttcataattcatgaggctgaattcctcttgaatttattaaatgcttcctgtgcatcctctgtgatgatcatgtttatttactgctagaactcaagtacctagaactgttcctggccaatgatggtatgtaataaatacttcaatgaaatgatgtggtgatgcatgtctatagttctagctacttgggaggatggcctgaacccaggggttctagaccagcttagacaacatagcaagaccacatctcaaaaaacaaaaaacaaaacgaatgaatgaatgcatggaaggactcatctctaaaataaatgtggtcaggttgggtgtggtggctcatgcctgtaataccagcactttgggaggcagggatggg

SEQ ID NO: 390558 - DNA, 377 bp, Homo sapiens
ccctgggcccccctgcatctttatacagtggggggtgttgcccccccaaagggggtttaccccaccaaaaggaggggaaaccaacttggtgcttttttatacaagagaacgagccagagttcactccttcctcctggctctctatatacctgtgaatatgtgaaatagtgtaaatatgaaagaacttgtacctatcacttcaacccctgccttgtacataatactattccatccacacagtttccaccctcacctgccccctcatacggagttggatgggggccgagtgaggtaaccaggtggcatctaccccatgttttataaggaattttgtacagtctttgtgaaataaaataacgtgcttcatttgaccccca

SEQ ID NO: 390559 - DNA, 98 bp, Homo sapiens
gaaccttgagggggcactagttaactcttttccttttctctccacagaattggtctatttcacatcattttcttttttctttgatacctcctctcccc

SEQ ID NO: 390560 - DNA, 2158 bp, Homo sapiens
gtccgtgcgtacgtgctcgctcacggcggcggcggcggagcggagaggccagagccggagaccgagctgggatcgggccccgggcgggggcggtgcgagcggcgccaagcagatcttaggggcggggacggagccggggcgggcgggactgaagcggagcccgggaacggggcgggaggtcccagggtcccgggttgggggggtggagcagcatttcgtcgccgcgggggtgccgggactccggccgcagtgtcgccgccatcacggacttcctgtgggacaagcgcacgggcctcgccgccagaacgatgccgcatcctcgaaggtaccactcctcagagcgaggcagccgggggagttaccgtgaacactatcggagccgaaagcataagcgacgaagaagtcgctcctggtcaagtagtagtgaccggacacgacggcgtcggcgagaggacagctaccatgtccgttctcgaagcagttatgatgatcgttcgtccgaccggagggtgtatgaccggcgatactgtggcagctacagacgcaacgattatagccgggatcggggagatgcctactatgacacagactatcggcattcctatgaatatcagcgggagaacagcagttaccgcagccagcgcagcagccggaggaagcacagacggcggaggaggcgcagccggacatttagccgctcatcttcgcagcacagcagccggagagccaagagtgtagaggacgacgctgagggccacctcatctaccacgtcggggactggctacaagagcgatatgaaatcgttagcaccttaggagaggggaccttcggccgagttgtacaatgtgttgaccatcgcaggggtggggctcgagttgccctgaagatcattaagaatgtggagaagtacaaggaagcagctcgacttgagatcaacgtgctagagaaaatcaatgagaaagaccctgacaacaagaacctctgtgtccagatgtttgactggtttgactaccatggccacatgtgtatctcctttgagcttctgggccttagcaccttcgatttcctcaaagacaacaactacctgccctaccccatccaccaagtgcgccacatggccttccagctgtgccaggctgtcaagttcctccatgataacaagctgacacatacagacctcaagcctgaaaatattctgtttgtgaattcagactatgagctcacctacaacctagagaagaagcgagatgagcgcagtgtgaagagcacagctgtgcgggtggtagactttggcagtgccacctttgaccatgagcaccatagcaccattgtctccactcgccattaccgagcaccagaagtcatccttgagttgggctggtcacagccttgtgatgtgtggagtataggctgcatcatctttgaatactatgtgggattcaccctcttccagacccatgacaacagagagcatctagccatgatggaaaggatcttgggtcctatcccttcccggatgatccgaaagacaagaaagcagaaatatttttaccggggtcgcctggattgggatgagaacacatcagctgggcgctatgttcgtgagaactgcaaaccgctgcggcggtatctgacctcagaggcagaggaacaccaccagctcttcgatctgattgaaagcatgctagagtatgaaccagctaagcggctgaccttgggtgaagcccttcagcatcctttcttcgcccgccttcgggctgagccgcccaacaagttgtgggactccagtcgggatatcagtcggtgacgatcaggccctgggcccccctgcatcttttatagcagtgggtgtccagtccaggacactggtgcttttttatacaagagaacgagccagagttcactccttcctcctggctctctatatacctgtgaatatgtgaaatagtgtaaatatgaaagaacttgtacctatcacttcaacccctgccttgtacataatactattccatccacacagtttccaccctcacctgccccctcatacggagttggatgggggccgagtgaggtaaccaggtggcatctaccccatgttttataaggaattttgtacagtctttgtgaaataaaataacgtgcttcatttgaccccca

SEQ ID NO: 390561 - DNA, 2244 bp, Homo sapiens
gtccgtgcgtacgtgctcgctcacggcggcggcggcggagcggagaggccagagccggagaccgagctgggatcgggccccgggcgggggcggtgcgagcggcgccaagcagatcttaggggcggggacggagccggggcgggcgggactgaagcggagcccgggaacggggcgggaggtcccagggtcccgggttgggggggtggagcagcatttcgtcgccgcgggggtgccgggactccggccgcagtgtcgccgccatcacggacttcctgtgggacaagcgcacgggcctcgccgccagaacgatgccgcatcctcgaaggtaccactcctcagagcgaggcagccgggggagttaccgtgaacactatcggagccgaaagcataagcgacgaagaagtcgctcctggtcaagtagtagtgaccggacacgacggcgtcggcgagaggacagctaccatgtccgttctcgaagcagttatgatgatcgttcgtccgaccggagggtgtatgaccggcgatactgtggcagctacagacgcaacgattatagccgggatcggggagatgcctactatgacacagactatcggcattcctatgaatatcagcgggagaacagcagttaccgcagccagcgcagcagccggaggaagcacagacggcggaggaggcgcagccggacatttagccgctcatcttcgcagcacagcagccggagagccaagagtgtagaggacgacgctgagggccacctcatctaccacgtcggggactggctacaagagcgatgttgctgtccccttttttcttccaactcagctcattccccaccttctctccctccctctccccgaccctgctctctttcatttcagatgaaatcgttagcaccttaggagaggggaccttcggccgagttgtacaatgtgttgaccatcgcaggggtggggctcgagttgccctgaagatcattaagaatgtggagaagtacaaggaagcagctcgacttgagatcaacgtgctagagaaaatcaatgagaaagaccctgacaacaagaacctctgtgtccagatgtttgactggtttgactaccatggccacatgtgtatctcctttgagcttctgggccttagcaccttcgatttcctcaaagacaacaactacctgccctaccccatccaccaagtgcgccacatggccttccagctgtgccaggctgtcaagttcctccatgataacaagctgacacatacagacctcaagcctgaaaatattctgtttgtgaattcagactatgagctcacctacaacctagagaagaagcgagatgagcgcagtgtgaagagcacagctgtgcgggtggtagactttggcagtgccacctttgaccatgagcaccatagcaccattgtctccactcgccattaccgagcaccagaagtcatccttgagttgggctggtcacagccttgtgatgtgtggagtataggctgcatcatctttgaatactatgtgggattcaccctcttccagacccatgacaacagagagcatctagccatgatggaaaggatcttgggtcctatcccttcccggatgatccgaaagacaagaaagcagaaatatttttaccggggtcgcctggattgggatgagaacacatcagctgggcgctatgttcgtgagaactgcaaaccgctgcggcggtatctgacctcagaggcagaggaacaccaccagctcttcgatctgattgaaagcatgctagagtatgaaccagctaagcggctgaccttgggtgaagcccttcagcatcctttcttcgcccgccttcgggctgagccgcccaacaagttgtgggactccagtcgggatatcagtcggtgacgatcaggccctgggcccccctgcatcttttatagcagtgggtgtccagtccaggacactggtgcttttttatacaagagaacgagccagagttcactccttcctcctggctctctatatacctgtgaatatgtgaaatagtgtaaatatgaaagaacttgtacctatcacttcaacccctgccttgtacataatactattccatccacacagtttccaccctcacctgccccctcatacggagttggatgggggccgagtgaggtaaccaggtggcatctaccccatgttttataaggaattttgtacagtctttgtgaaataaaataacgtgcttcatttgaccccca

SEQ ID NO: 390562 - DNA, 2098 bp, Homo sapiens
gtccgtgcgtacgtgctcgctcacggcggcggcggcggagcggagaggccagagccggagaccgagctgggatcgggccccgggcgggggcggtgcgagcggcgccaagcagatcttaggggcggggacggagccggggcgggcgggactgaagcggagcccgggaacggggcgggaggtcccagggtcccgggttgggggggtggagcagcatttcgtcgccgcgggggtgccgggactccggccgcagtgtcgccgccatcacggacttcctgtgggacaagcgcacgggcctcgccgccagaacgatgccgcatcctcgaaggtaccactcctcagagcgaggcagccgggggagttaccgtgaacactatcggagccgaaagcataagcgacgaagaagtcgctcctggtcaagtagtagtgaccggacacgacggcgtcggcgagaggacagctaccatgtccgttctcgaagcagttatgatgatcgttcgtccgaccggagggtgtatgaccggcgatactgtggcagctacagacgcaacgattatagccgggatcggggagatgcctactatgacacagactatcggcattcctatgaatatcagcgggagaacagcagttaccgcagccagcgcagcagccggaggaagcacagacggcggaggaggcgcagccggacatttagccgctcatcttcgcagcacagcagccggagagccaagagtgtagaggacgacgctgagggccacctcatctaccacgtcggggactggctacaagagcgatatgaaatcgttagcaccttaggagaggggaccttcggccgagttgtacaatgtgttgaccatcgcaggggtggggctcgagttgccctgaagatcattaagaatgtggagaagtacaaggaagcagctcgacttgagatcaacgtgctagagaaaatcaatgagaaagaccctgacaacaagaacctctgtgtccagatgtttgactggtttgactaccatggccacatgtgtatctcctttgagcttctgggccttagcaccttcgatttcctcaaagacaacaactacctgccctaccccatccaccaagtgcgccacatggccttccagctgtgccaggctgtcaagttcctccatgataacaagctgacacatacagacctcaagcgagatgagcgcagtgtgaagagcacagctgtgcgggtggtagactttggcagtgccacctttgaccatgagcaccatagcaccattgtctccactcgccattaccgagcaccagaagtcatccttgagttgggctggtcacagccttgtgatgtgtggagtataggctgcatcatctttgaatactatgtgggattcaccctcttccagacccatgacaacagagagcatctagccatgatggaaaggatcttgggtcctatcccttcccggatgatccgaaagacaagaaagcagaaatatttttaccggggtcgcctggattgggatgagaacacatcagctgggcgctatgttcgtgagaactgcaaaccgctgcggcggtatctgacctcagaggcagaggaacaccaccagctcttcgatctgattgaaagcatgctagagtatgaaccagctaagcggctgaccttgggtgaagcccttcagcatcctttcttcgcccgccttcgggctgagccgcccaacaagttgtgggactccagtcgggatatcagtcggtgacgatcaggccctgggcccccctgcatcttttatagcagtgggtgtccagtccaggacactggtgcttttttatacaagagaacgagccagagttcactccttcctcctggctctctatatacctgtgaatatgtgaaatagtgtaaatatgaaagaacttgtacctatcacttcaacccctgccttgtacataatactattccatccacacagtttccaccctcacctgccccctcatacggagttggatgggggccgagtgaggtaaccaggtggcatctaccccatgttttataaggaattttgtacagtctttgtgaaataaaataacgtgcttcatttgaccccca

SEQ ID NO: 390563 - DNA, 1607 bp, Homo sapiens
ttgtttatctgggtggtttgagttgctgttgagaattgacctctgttgtccactcccagctctcacggcccctgggttaaaggtggtgggaatcacgcaggggttttcttcccctgtgaccatctgtatctgttccccttccttcatctccaccccaggttgctgtccccttttttcttccaactcagctcattccccaccttctctccctccctctccccgaccctgctctctttcatttcagatgaaatcgttagcaccttaggagaggggaccttcggccgagttgtacaatgtgttgaccatcgcaggggtggggctcgagttgccctgaagatcattaagaatgtggagaagtacaaggaagcagctcgacttgagatcaacgtgctagagaaaatcaatgagaaagaccctgacaacaagaacctctgtgtccagatgtttgactggtttgactaccatggccacatgtgtatctcctttgagcttctgggccttagcaccttcgatttcctcaaagacaacaactacctgccctaccccatccaccaagtgcgccacatggccttccagctgtgccaggctgtcaagttcctccatgataacaagctgacacatacagacctcaagcctgaaaatattctgtttgtgaattcagactatgagctcacctacaacctagagaagaagcgagatgagcgcagtgtgaagagcacagctgtgcgggtggtagactttggcagtgccacctttgaccatgagcaccatagcaccattgtctccactcgccattaccgagcaccagaagtcatccttgagttgggctggtcacagccttgtgatgtgtggagtataggctgcatcatctttgaatactatgtgggattcaccctcttccagacccatgacaacagagagcatctagccatgatggaaaggatcttgggtcctatcccttcccggatgatccgaaagacaagaaagcagaaatatttttaccggggtcgcctggattgggatgagaacacatcagctgggcgctatgttcgtgagaactgcaaaccgctgcggcggtatctgacctcagaggcagaggaacaccaccagctcttcgatctgattgaaagcatgctagagtatgaaccagctaagcggctgaccttgggtgaagcccttcagcatcctttcttcgcccgccttcgggctgagccgcccaacaagttgtgggactccagtcgggatatcagtcggtgacgatcaggccctgggcccccctgcatcttttatagcagtgggtgtccagtccaggacactggtgcttttttatacaagagaacgagccagagttcactccttcctcctggctctctatatacctgtgaatatgtgaaatagtgtaaatatgaaagaacttgtacctatcacttcaacccctgccttgtacataatactattccatccacacagtttccaccctcacctgccccctcatacggagttggatgggggccgagtgaggtaaccaggtggcatctaccccatgttttataaggaattttgtacagtctttgtgaaataaaataacgtgcttcatttgaccccca

SEQ ID NO: 390564 - DNA, 1401 bp, Homo sapiens
ttccaagacaggtccccgcaggcgttttgaaattcatcccaactgtaggctgagtgacctgaaggttggacagactgccgaagtccaaaagcttcagcatttccttagtgtcaggatctacttcaataatctcctgatccaaggctgagacctcaggaacataattgtctctcctttctctctcctcctcctgcagcttgatggagatacctcttactgggcctctctgaattcgcttcatcagatgcgtgacataacctgctatcttgttgcggagctttttgctggggataatggcgatctcctcgcacacgcgcttgttcgtgtggaagtcgttgcccaggcgcgtgtagtacttttctatgatgacccgggccgccttcttcacggttttggtgcgaacgcggcccatgttgcgcgggtcaagcctgaaaatattctgtttgtgaattcagactatgagctcacctacaacctagagaagaagcgagatgagcgcagtgtgaagagcacagctgtgcgggtggtagactttggcagtgccacctttgaccatgagcaccatagcaccattgtctccactcgccattaccgagcaccagaagtcatccttgagttgggctggtcacagccttgtgatgtgtggagtataggctgcatcatctttgaatactatgtgggattcaccctcttccagacccatgacaacagagagcatctagccatgatggaaaggatcttgggtcctatcccttcccggatgatccgaaagacaagaaagcagaaatatttttaccggggtcgcctggattgggatgagaacacatcagctgggcgctatgttcgtgagaactgcaaaccgctgcggcggtatctgacctcagaggcagaggaacaccaccagctcttcgatctgattgaaagcatgctagagtatgaaccagctaagcggctgaccttgggtgaagcccttcagcatcctttcttcgcccgccttcgggctgagccgcccaacaagttgtgggactccagtcgggatatcagtcggtgacgatcaggccctgggcccccctgcatcttttatagcagtgggtgtccagtccaggacactggtgcttttttatacaagagaacgagccagagttcactccttcctcctggctctctatatacctgtgaatatgtgaaatagtgtaaatatgaaagaacttgtacctatcacttcaacccctgccttgtacataatactattccatccacacagtttccaccctcacctgccccctcatacggagttggatgggggccgagtgaggtaaccaggtggcatctaccccatgttttataaggaattttgtacagtctttgtgaaataaaataacgtgcttcatttgaccccca

SEQ ID NO: 390565 - DNA, 381 bp, Homo sapiens
ccagacccatgacaacagagagcatctagccatgatggaaaggatcttgggtcctatcccttcccggatgatccgaaagacaaggtgaaccttgagggggcactagttaactcttttccttttctctccacagaattggtctatttcacatcattttcttttttctttgatacctcctctccccccagttactttcagatggggaaataagggaattgtaacaagggtgaccttctgattcctcaacctccccttcccctctagaaagcagaaatatttttaccggggtcgcctggattgggatgagaacacatcagctgggcgctatgttcgtgagaactgcaaaccgctgcgggtgagctgggctcgggataaatagtg

SEQ ID NO: 390566 - DNA, 469 bp, Homo sapiens
tgctagagtatgaaccagctaagcggctgaccttgggtgaagcccttcagcatcctttcttcgcccgccttcgggctgagccgcccaacaagttgtgggactccagtcgggatatcagtcggtgacgatcaggccctgggcccccctgcatcttttatagcagtgggtgtccagtccaggacactggtgcttttttatacaagagaacgagccagagttcactccttcctcctggctctctatatacctgtgaatatgtgaaatagtgtaaatatgaaagaacttgtacctatcacttcaacccctgccttgtacataatactattccatccacacagtttccaccctcacctgccccctcatacggagttggatgggggccgagtgaggtaaccaggtggcatctaccccatgttttataaggaattttgtacagtctttgtgaaataaaataacgtgcttcatttga

SEQ ID NO: 390567 - DNA, 2035 bp, Homo sapiens
gcctggtggcgaattcggcacgaggctgaagcggagcccgggaacggggcgggaggtcccagggtcccgggttgggggggtggagcagcatttcgtcgccgcgggggtgccgggactccggccgcagtgtcgccgccatcacggacttcctgtgggacaagcgcacgggcctcgccgccagaacgatgccgcatcctcgaaggtaccactcctcagagcgaggcagccgggggagttaccgtgaacactatcggagccgaaagcataagcgacgaagaagtcgctcctggtcaagtagtagtgaccggacacgacggcgtcggcgagaggacagctaccatgtccgttctcgaagcagttatgatgatcgttcgtccgaccggagggtgtatgaccggcgatactgtggcagctacagacgcaacgattatagccgggatcggggagatgcctactatgacacagactatcggcattcctatgaatatcagcgggagaacagcagttaccgcagccagcgcagcagccggaggaagcacagacggcggaggaggcgcagccggacatttagccgctcatcttcgcagcacagcagccggagagccaagagtgtagaggacgacgctgagggccacctcatctaccacgtcggggactggctacaagagcgatatgaaatcgttagcaccttaggagaggggaccttcggccgagttgtacaatgtgttgaccatcgcaggggtggggctcgagttgccctgaagatcattaagaatgtggagaagtacaaggaagcagctcgacttgagatcaacgtgctagagaaaatcaatgagaaagaccctgacaacaagaacctctgtgtccagatgtttgactggtttgactaccatggccacatgtgtatctcctttgagcttctgggccttagcaccttcgatttcctcaaagacaacaactacctgccctaccccatccaccaagtgcgccacatggccttccagctgtgccaggctgtcaagttcctccatgataacaagctgacacatacagacctcaagcctgaaaatattctgtttgtgaattcagactatgagctcacctacaacctagagaagaagcgagatgagcgcagtgtgaagagcacagctgtgcgggtggtagactttggcagtgccacctttgaccatgagcaccatagcaccattgtctccactcgccattaccgagcaccagaagtcatccttgagttgggctggtcacagccttgtgatgtgtggagtataggctgcatcatctttgaatactatgtgggattcaccctcttccagacccatgacaacagagagcatctagccatgatggaaaggatcttgggtcctatcccttcccggatgatccgaaagacaagaaagcagaaatatttttaccggggtcgcctggattgggatgagaacacatcagctgggcgctatgttcgtgagaactgcaaaccgctgcggcggtatctgacctcagaggcagaggaacaccaccagctcttcgatctgattgaaagcatgctagagtatgaaccagctaagcggctgaccttgggtgaagcccttcagcatcctttcttcgcccgccttcgggctgagccgcccaacaagttgtgggactccagtcgggatatcagtcggtgacgatcaggccctgggcccccctgcatcttttatagcagtgggtgtccagtccaggacactggtgcttttttatacaagagaacgagccagagttcactccttcctcctggctctctatatacctgtgaatatgtgaaatagtgtaaatatgaaagaacttgtacctatcacttcaacccctgccttgtacataatactattccatccacacagtttccaccctcacctgccccctcatacggagttggatgggggccgagtgaggtaaccaggtggcatctaccccatgttttataaggaattttgtacagtctttgtgaaataaaataacgtgcttcatttgaccccca

SEQ ID NO: 390568 - DNA, 2070 bp, Homo sapiens
gtccgtgcgtacgtgctcgctcacggcggcggcggcggagcggagaggccagagccggagaccgagctgggatcgggccccgggcgggggcggtgcgagcggcgccaagcagatcttaggggcggggacggagccggggcgggcgggactgaagcggagcccgggaacggggcgggaggtcccagggtcccgggttgggggggtggagcagcatttcgtcgccgcgggggtgccgggactccggccgcagtgtcgccgccatcacggacttcctgtgggacaagcgcacgggcctcgccgccagaacgatgccgcatcctcgaaggtaccactcctcagagcgaggcagccgggggagttaccgtgaacactatcggagccgaaagcataagcgacgaagaagtcgctcctggtcaagtagtagtgaccggacacgacggcgtcggcgagaggacagctaccatgtccgttctcgaagcagttatgatgatcgttcgtccgaccggagggtgtatgaccggcgatactgtggcagctacagacgcaacgattatagccgggatcggggagatgcctactatgacacagactatcggcattcctatgaatatcagcgggagaacagcagttaccgcagccagcgcagcagccggaggaagcacagacggcggaggaggcgcagccggacatttagccgctcatcttcgatgaaatcgttagcaccttaggagaggggaccttcggccgagttgtacaatgtgttgaccatcgcaggggtggggctcgagttgccctgaagatcattaagaatgtggagaagtacaaggaagcagctcgacttgagatcaacgtgctagagaaaatcaatgagaaagaccctgacaacaagaacctctgtgtccagatgtttgactggtttgactaccatggccacatgtgtatctcctttgagcttctgggccttagcaccttcgatttcctcaaagacaacaactacctgccctaccccatccaccaagtgcgccacatggccttccagctgtgccaggctgtcaagttcctccatgataacaagctgacacatacagacctcaagcctgaaaatattctgtttgtgaattcagactatgagctcacctacaacctagagaagaagcgagatgagcgcagtgtgaagagcacagctgtgcgggtggtagactttggcagtgccacctttgaccatgagcaccatagcaccattgtctccactcgccattaccgagcaccagaagtcatccttgagttgggctggtcacagccttgtgatgtgtggagtataggctgcatcatctttgaatactatgtgggattcaccctcttccagacccatgacaacagagagcatctagccatgatggaaaggatcttgggtcctatcccttcccggatgatccgaaagacaagaaagcagaaatatttttaccggggtcgcctggattgggatgagaacacatcagctgggcgctatgttcgtgagaactgcaaaccgctgcggcggtatctgacctcagaggcagaggaacaccaccagctcttcgatctgattgaaagcatgctagagtatgaaccagctaagcggctgaccttgggtgaagcccttcagcatcctttcttcgcccgccttcgggctgagccgcccaacaagttgtgggactccagtcgggatatcagtcggtgacgatcaggccctgggcccccctgcatcttttatagcagtgggtgtccagtccaggacactggtgcttttttatacaagagaacgagccagagttcactccttcctcctggctctctatatacctgtgaatatgtgaaatagtgtaaatatgaaagaacttgtacctatcacttcaacccctgccttgtacataatactattccatccacacagtttccaccctcacctgccccctcatacggagttggatgggggccgagtgaggtaaccaggtggcatctaccccatgttttataaggaattttgtacagtctttgtgaaataaaataacgtgcttcatttgaccccca

SEQ ID NO: 390569 - DNA, 2616 bp, Homo sapiens
gtccgtgcgtacgtgctcgctcacggcggcggcggcggagcggagaggccagagccggagaccgagctgggatcgggccccgggcgggggcggtgcgagcggcgccaagcagatcttaggggcggggacggagccggggcgggcgggactgaagcggagcccgggaacggggcgggaggtcccagggtcccgggttgggggggtggagcagcatttcgtcgccgcgggggtgccgggactccggccgcagtgtcgccgccatcacggacttcctgtgggacaagcgcacgggcctcgccgccagaacgatgccgcatcctcgaaggtaccactcctcagagcgaggcagccgggggagttaccgtgaacactatcggagccgaaagcataagcgacgaagaagtcgctcctggtcaagtagtagtgaccggacacgacggcgtcggcgagaggacagctaccatgtccgttctcgaagcagttatgatgatcgttcgtccgaccggagggtgtatgaccggcgatactgtggcagctacagacgcaacgattatagccgggatcggggagatgcctactatgacacagactatcggcattcctatgaatatcagcgggagaacagcagttaccgcagccagcgcagcagccggaggaagcacagacggcggaggaggcgcagccggacatttagccgctcatcttcgcagcacagcagccggagagccaagagtgtagaggacgacgctgagggccacctcatctaccacgtcggggactggctacaagagcgatatgaaatcgttagcaccttaggagaggggaccttcggccgagttgtacaatgtgttgaccatcgcaggggtggggctcgagttgccctgaagatcattaagaatgtggagaagtacaaggaagcagctcgacttgagatcaacgtgctagagaaaatcaatgagaaagaccctgacaacaagaacctctgtgtccagatgtttgactggtttgactaccatggccacatgtgtatctcctttgagcttctgggccttagcaccttcgatttcctcaaagacaacaactacctgccctaccccatccaccaagtgcgccacatggccttccagctgtgccaggctgtcaagttcctccatgataacaagctgacacatacagacctcaagcctgaaaatattctgtttgtgaattcagactatgagctcacctacaacctagagaagaagcgagatgagcgcagtgtgaagagcacagctgtgcgggtggtagactttggcagtgccacctttgaccatgagcaccatagcaccattgtctccactcgccattaccgagcaccagaagtcatccttgagttgggctggtcacagccttgtgatgtgtggagtataggctgcatcatctttgaatactatgtgggattcaccctcttccagacccatgacaacagagagcatctagccatgatggaaaggatcttgggtcctatcccttcccggatgatccgaaagacaagaaagcagaaatatttttaccggggtcgcctggattgggatgagaacacatcagctgggcgctatgttcgtgagaactgcaaaccgctgcggcggtatctgacctcagaggcagaggaacaccaccagctcttcgatctgattgaaagcatgctagagtatgaaccagctaagcggctgaccttgggtgaagcccttcagcatcctttcttcgcccgccttcgggctgagccgcccaacaagttgtgggactccagtcgggatatcagtcggtgacgatcaggccctgggcccccctgcatcttttatagcagtgggtgtccagtccaggacactggtgcttttttatacaagagaacgagccagagttcactccttcctcctggctctctatatacctgtgaatatgtgaaatagtgtaaatatgaaagaacttgtacctatcacttcaacccctgccttgtacataatactattccatccacacagtttccaccctcacctgccccctcatacggagttggatgggggccgagtgaggtaaccaggtggcatctaccccatgttttataaggaattttgtacagtctttgtgaaataaaataacgtgcttcatttgacccccaaaaaatagaagactagatactaacacacggtacgaacgaacaaaaaaaaaaaagagagggggggggggcataacagagttaccccagggaggggccccaaggttgtagggaacacagttttttggcagacaggggggcccccaagaaagtggagggaccatagataacacgcaacagaagacacgcaggcgcagaaattacagacgactagagtagcaggcgaaacacagcgcaacacccaggaggagacactgaggaaaaagagagaaccaatataaagcagtagggagggaaaacaaaaagggggcaaaaaacatcctaatgaaagaaatatgaagagcaccaaccggaaaatatatagatattaaagaggtgttaatgtgggttaaaaacagcaggcatgattagcaatcgtagaaaaaatgggaaaagcggaatagttttaagaaactttttcg

SEQ ID NO: 390570 - DNA, 2098 bp, Homo sapiens
gtccgtgcgtacgtgctcgctcacggcggcggcggcggagcggagaggccagagccggagaccgagctgggatcgggccccgggcgggggcggtgcgagcggcgccaagcagatcttaggggcggggacggagccggggcgggcgggactgaagcggagcccgggaacggggcgggaggtcccagggtcccgggttgggggggtggagcagcatttcgtcgccgcgggggtgccgggactccggccgcagtgtcgccgccatcacggacttcctgtgggacaagcgcacgggcctcgccgccagaacgatgccgcatcctcgaaggtaccactcctcagagcgaggcagccgggggagttaccgtgaacactatcggagccgaaagcataagcgacgaagaagtcgctcctggtcaagtagtagtgaccggacacgacggcgtcggcgagaggacagctaccatgtccgttctcgaagcagttatgatgatcgttcgtccgaccggagggtgtatgaccggcgatactgtggcagctacagacgcaacgattatagccgggatcggggagatgcctactatgacacagactatcggcattcctatgaatatcagcgggagaacagcagttaccgcagccagcgcagcagccggaggaagcacagacggcggaggaggcgcagccggacatttagccgctcatcttcgcagcacagcagccggagagccaagagtgtagaggacgacgctgagggccacctcatctaccacgtcggggactggctacaagagcgatatgaaatcgttagcaccttaggagaggggaccttcggccgagttgtacaatgtgttgaccatcgcaggggtggggctcgagttgccctgaagatcattaagaatgtggagaagtacaaggaagcagctcgacttgagatcaacgtgctagagaaaatcaatgagaaagaccctgacaacaagaacctctgtgtccagatgtttgactggtttgactaccatggccacatgtgtatctcctttgagcttctgggccttagcaccttcgatttcctcaaagacaacaactacctgccctaccccatccaccaagtgcgccacatggccttccagctgtgccaggctgtcaagttcctccatgataacaagctgacacatacagacctcaagcctgaaaatattctgtttgtgaattcagactatgagctcacctacaacctagagaagaagcgagatgagcgcagtgtgaagagcacagctgtgcgggtggtagactttggcagtgccacctttgaccatgagcaccatagcaccattgtctccactcgccattaccgagcaccagaagtcatccttgagttgggctggtcacagccttgtgatgtgtggagtataggctgcatcatctttgaatactatgtgggattcaccctcttccaggtaagtgatgggatgtcttacttgactgcctggcattcttctacctggttcctttgttttctgctgaggacctgcctactcagttctccacattgcctgccttcctggcagctgatccttagcatgcccttttcagtcccatgctcactcttcgatctgattgaaagcatgctagagtatgaaccagctaagcggctgaccttgggtgaagcccttcagcatcctttcttcgcccgccttcgggctgagccgcccaacaagttgtgggactccagtcgggatatcagtcggtgacgatcaggccctgggcccccctgcatcttttatagcagtgggtgtccagtccaggacactggtgcttttttatacaagagaacgagccagagttcactccttcctcctggctctctatatacctgtgaatatgtgaaatagtgtaaatatgaaagaacttgtacctatcacttcaacccctgccttgtacataatactattccatccacacagtttccaccctcacctgccccctcatacggagttggatgggggccgagtgaggtaaccaggtggcatctaccccatgttttataaggaattttgtacagtctttgtgaaataaaataacgtgcttcatttgaccccca

SEQ ID NO: 390571 - DNA, 1718 bp, Homo sapiens
gtccgtgcgtacgtgctcgctcacggcggcggcggcggagcggagaggccagagccggagaccgagctgggatcgggccccgggcgggggcggtgcgagcggcgccaagcagatcttaggggcggggacggagccggggcgggcgggactgaagcggagcccgggaacggggcgggaggtcccagggtcccgggttgggggggtggagcagcatttcgtcgccgcgggggtgccgggactccggccgcagtgtcgccgccatcacggacttcctgtgggacaagcgcacgggcctcgccgccagaacgatgccgcatcctcgaaggtaccactcctcagagcgaggcagccgggggagttaccgtgaacactatcggagccgaaagcataagcgacgaagaagtcgctcctggtcaagtagtagtgaccggacacgacggcgtcggcgagaggacagctaccatgtccgttctcgaagcagttatgatgatcgttcgtccgaccggagggtgtatgaccggcgatactgtggcagctacagacgcaacgattatagccgggatcggggagatgcctactatgacacagactatcggcattcctatgaatatcagcgggagaacagcagttaccgcagccagcgcagcagccggaggaagcacagacggcggaggaggcgcagccggacatttagccgctcatcttcgcagcacagcagccggagagccaagagtgtagaggacgacgctgagggccacctcatctaccacgtcggggactggctacaagagcgatatgaaatcgttagcaccttaggagaggggaccttcggccgagttgtacaatgtgttgaccatcgcaggggtggggctcgagttgccctgaagatcattaagaatgtggagaagtacaaggaagcagctcgacttgagatcaacgtgctagagaaaatcaatgagaaagaccctgacaacaagaacctctgtgtccagatgtttgactggtttgactaccatggccacatgtgtatctcctttgagcttctgggccttagcaccttcgatttcctcaaagacaacaactacctgccctaccccatccaccaagtgcgccacatggccttccagctgtgccaggctgtcaagttcctccatgataacaagctgacacatacagacctcaagcctgaaaatattctgtttgtgaattcagactatgagctcacctacaacctagagaagaagcgagatgagcgcagtgtgaagagcacagctgtgcgggtggtagactttggcagtgccacctttgaccatgagcaccatagcaccattgtctccactcgccattaccgagcaccagaagtcatccttgagttgggctggtcacagccttgtgatgtgtggagtataggctgcatcatctttgaatactatgtgggattcaccctcttgtggctatttggagattaggcctttgggagataattagggttggatgaggtcatgaaggtggaaccctcgtgatgggataatggcttgataagaagaggaagagggagaggtcgctgtccctttccgccatgtaagcacacagcaggaaagcgactgtctacaagccaggaagagggcccttatcaggaaccaagtcggccaccactgtgatctgggactttgcagccttcagaactatggaaataaatgcctgttgctaaaaccaaa

SEQ ID NO: 390572 - DNA, 181 bp, Homo sapiens
ttgtggttcaaataagctgggttggaggagctgcacaggctggagccccaactccctcagcccactcaatccacctgaggtgcccacagacatcatctcgtatcagcccacagctgcctttaggggggccttgagaactcctcccaatagtaacccagactgggtggggatagtggggatg

SEQ ID NO: 390573 - DNA, 679 bp, Homo sapiens
ggcgattttgttgctgtacgaacaccacagaatgtactttgacgacctagatggtggagcctggacacacctcggctctgtggtgtggcctgctgcttccaggctgcaaacctgacagcatggggctgtactgaataccgcagaccattgtaattcatggggaaagcgcgaatgcagtcccccactacaacaaattatgcagtcgagttttccacatttgggaatatcacaggggtcagcacatccggagtgcaatcgatgagccccacgctgggaaaaaccaccttcgtgatcatggtatcttccctgccagagagaaaccaatcagcttcattttcaacttcttctatgactccagaggattcactttgcatcttgtgacaaatgaatatattacctgaaaaaaaaatgacaggatagattattcattctgaatgatcatgtggtcatcttctgcccatgaggaatagtaacgtaccacatgggggtgatgcccaagcactgcgtgagcataaacttcatgcaaagccgaattcctatgagacagaaaagcattgaggaataaaaacatcaatcaagataatgcacacaaaaatgtttcttaaaaatatgaggctttactagcaatggcagaatatttattgagagctcactgcttgcttactattttatctcattg

SEQ ID NO: 390574 - DNA, 572 bp, Homo sapiens
gcgaagagaacagagtcccaggtaggccaatagcccctcctctgcttaggaaaagccctgcccctctcctggccttgggcccctgggagctgctctttctaaaccttctgcagggacttggggtccagacccccatgttctagggtcagctcatctcctcccttgacatgtgaccgctgcagacccctcttctcagggcctcaggacagggaggccgacctgatggggagactgcttggctctggccacctccacagatgtggtcctaagactgggcatgggaccccaagatggcaacttgaggtcagcacaccccactcagctgtgggaaggggacagctcctccctggggtatgaagtggctgtcccctccaacccagcagtccctcctgtgggaacacggctcaggacctagctatcctggacatgcgcctgggttctaatagaggatgggttcaatcctgacccaccgttcaggccccgcagcggttcagaatcaagctggagttcattaatgataaggtatagtatgtgtaatgttgtccagtaataaaagctgactagaaaaccaa

SEQ ID NO: 390575 - DNA, 168 bp, Homo sapiens
atggggagctagttttcatctgaatgaagtcctgtttgggggaactgaaaggattaaactgatcctctagagtagtaagccttgaagatggaattccctgtcctttcttccagtagctgtctcggggggatgctttgcttgactgtttcctctgagcacccctgtctt

SEQ ID NO: 390576 - DNA, 167 bp, Homo sapiens
caggatacagagccccagaaccccatggggtcccagaggaggagcccagaggaggaagcgggaccatacctggaggggctgcctctgatctcctcagagactaggggtgcagtgggaggagaagataggagatgcctagagaccctggccccacagagatgcctgtg

SEQ ID NO: 390577 - DNA, 260 bp, Homo sapiens
ttgagattattcagctagtggggctggatatggtaaacaaggggaagagatgagtatcttttacatggaaaggaaaatatgagaaagctcaactcaaattattgctaggaattgtggtattacacatgggctcttaggctaatattttgattatctgctggcattttttacctattccatcctgttttactttaataagagtctgggccaggtgcaattcctcacaattcctagctgatatctacaggacgagctgatac

SEQ ID NO: 390578 - DNA, 468 bp, Homo sapiens
tcaacaaccaattgtgacaggaactaagagtgagaactcactcctggcagaatggcaccaagccattcatgagaaacccactcccatgatccaaacacctcccactatgctccacctccagcgctgggatgaaatttcaacatgaaacttggtagaaccaaacaaaccatatctaacctatagcaagttgttaggagagtttattggccaagtaccccattttatttactttggcattcctagtcacattggaaagcggcagcctatccgctattcctccccagtctcatccccaccttgccccattttatgactcacaagtaccaatatgttgctcactgcctttaaatgctcagtgacttcttatcatgggtgttgctgacccaatttatctttgcaaccagcattaaaaagcacagagcataatggtcagatggattttctataggtaactgcctgccatgactt

SEQ ID NO: 390579 - DNA, 695 bp, Homo sapiens
cgccgttgccaggcaacggggcggcgcaggcaggagggaacggctggttgcaggtttctctcgccctggtcccgcgcggccccgccgaggcggcgaccaaggtgggtgcggggactctcgggagccgtgggccaggcgcttagccggccacctcgggccctgtccaggcccaggcgttccagggctgctctgcgggccgcgtgcgagagggactctcgggaggccccggggcgccgcacccactccttcccacttgggactcccgcgggcgcccggctctcgctcctctggccagcgtgggcctcccaggccccctcgcggctctctccagagcaggagccccaccttgggccgcccctctcacacctgccgtgggtctggtacgcgcctctgtgtcggactccgcgcccgcctgcgtgggaggaagccaggactcccgggcgaccgggccattcctgtggtttgtgtcagttccacagcagcacgtgggcactttccaccgtcagccactgggcagcccggggcactcctgcagcgtcccctggccctctccagggcaggggaaggttgggcagtcctgggcggccagcaccccggcgtgcatgtctcctgagcagctgcccatcgggcctctgctggcctgggggctccaagatgcaaggccggcgggagctggggggagagcctttgagtga

SEQ ID NO: 390580 - DNA, 222 bp, Homo sapiens
agctaatctttgtatttttagtagagatggggtttcaccatgttagccaggctggtctcgaacccctgacctcgtgatccacccaccttggcctcccaaagttctgggattacaggcatgagctgccgtgcccagccatgtttctgaatttttaagtcaacttctgaataggcaaagaattctttttgtttttttgttcaactttagtgctataaatcgcca

SEQ ID NO: 390581 - DNA, 260 bp, Homo sapiens
caccagtgtcttcctctgggctttgggtgtcttctccctgatcttctccagacctttacactggccaggatcctgtcttgtatttgtattcctccttttaggtggatccccgcattgatattcagatgtgcttgtctccttccccttcataaacttccctttttttgagatggagtctcacatattgcccaggccagttgcagtgagccaagatcacgccactgcactctagcctgggcgacagatcaagactctgtctc

SEQ ID NO: 390582 - DNA, 133 bp, Homo sapiens
tggaaaagtacaagcttttaaattcccgtacaccttgtcaatttgaggtgaactggttcaaaagaaaaaggaacctacagaaatgtctacttttaaagttatcacttgaatagaatttaatgaatactagtgc

SEQ ID NO: 390583 - DNA, 525 bp, Homo sapiens
gaagtaggtgcgcctggagggagcaaggagctgacacaggagttcaggcagggacaaggatcaagtggaaatggtggagatggggcgagaggggcagactaggagatactgtggaggccgaggcatcgggacctggagagggactggacactgcactgggccaggtgccacacggcagggcagaggggaggggcagctctgggcagctagaggaagctggtgatgttcaccaggatcagagacagaacagctttacgagaaagggtcacagttcccccaagaagacaggaaaactactctggccatttgtccaaccaaaggctcacacacccacatcaaaactggccagcaatttgcacagcactttgcaaagcactctctgccagaaacacctttggccactccatctgctaaggtgaggaatactgagtccccattttaaagacgagcaaatcaaggttaagtggctttcccaaggccacaggaccaagtggtaacacaagaaactgggtcttctgcctccca

SEQ ID NO: 390584 - DNA, 433 bp, Homo sapiens
aaattagccaggcatggtggcaggcgcctgtaatctcagcttctcgggaggctgaggcagagaattgcttgaacacgggaggcagaagttgcagtgagccgagatcgcgccactgcagtccagcctgggcgacagagcaagactccgtctcaaacaaaacaaaacaaaaaaacagtatgtatttatttatacccaacctttccctaaaaagccttggttgcaacttcagatcaaagctaccactgtctttcagctagaaatccaaaagtttcctagacaacctctccatctcctttctcattctttccgacctgttttctgcatagcagccagaatgatcgcaaaatataaagcagacttccccccatcagggtgagctgtcagtcagcaagtctggcagggaaaggaggcagatagttgtaaatggcggtgt

SEQ ID NO: 390585 - DNA, 276 bp, Homo sapiens
aaattagccaggcatggtggcaggcgcctgtaatctcagcttctcgggaggctgaggcagagaattgcttgaacacgggaggcagaagttgcagtgagccgagatcgcgccactgcagtccagcctgggcgacagagcaagactccgtctcaaacaaaacaaaacaaaaaaacagtatgtatttatttatacccaacctttccctaaaaagccttggttgcaacttcagatcaaagccacgttaagacagctaaggcagggcatgtgaaaggtaga

SEQ ID NO: 390586 - DNA, 252 bp, Homo sapiens
aagaaaggagagctgcagtggctgcatgtgataactgctggcccctccctctgttctttacaaagcactttcactctcagcagcccagtagggggccagggtggcggatgaagaagtgcactctgggaagtggcttgcccagagtcatggggtagttggattctcccccagagctggagacacctcatctccctcctaggtgcctcctctgtagggggccttgtccccaggcagaagagcctgttgagttct

SEQ ID NO: 390587 - DNA, 459 bp, Homo sapiens
tagataaaatacagacacctcagcctccagttcagccactgtccagtcaagcaggaaagtacattgtgagtgagtcttaagtgaaaaggactagttatgatgcatttgagacaagaaagtagatcgagctttaggcttttccttttcttgccggaaaggaaaaaaacaacattgcattaatcatcatctggtcctcggccaagattcgtatttacctgttatgtgccatattcatactcaccctgtaatgtggcagcctcgtgccatttatcattccaacagcccataacagatgaggagacacagatgacttgtccagggtcatcaagcttgtcaatggcagagtgaatgttggagctcagaccttctgactctcaacccaatgagatacaaataaaatagtggaaaccaccagccagccctcccaagtgtttaggggcattaaagacactggccatc

SEQ ID NO: 390588 - DNA, 173 bp, Homo sapiens
gatgagaaaggcagttagagagcgggagcaagcgggatgaggaggggaccagcaagataggaaagaactcccccttggagggcactgttcattctcacccatccaaacaccgcaaagaaacctgtgctgactcactggatagtctggacccagcatgctcccctgaagactgt

SEQ ID NO: 390589 - DNA, 341 bp, Homo sapiens
cctcaggacgcttgcagaacccagccactttctccacttctgctgccacctccgtctctaaatgccactggcatttcctcatttctgccctgggctcccacagccacttctccactggatggccgagggatccttttacaatgcaaatcagatcatgtgactcctgcccagaaccctccagcggctgctcatccacagagtaaagcccagttcctcccagggctggtgagacctgcctcccactcccgctgacctcctgcctctcccctcatctgcccgtgaccctgtgtcacttggggtccttcagaacgcagggtacctcccatgcttgcctccccctt

SEQ ID NO: 390590 - DNA, 633 bp, Homo sapiens
atttggtgagctgcaatcccctcttccctaagcatggcctatgctgaggcttagatctccaggagtcccacagcttcccagggacctgctggtccactgtgcttaccaaagtcagagtgggttgtagggaacattttggggtgatctgggggtgtggtgactcaaaggcacattctcaagcagagcagtggccaccacagctgcacaagcagtatggtacctgtcatcttagttcaggtgtacagggagtgcagacatgcctgtgcaatctggcttcccagttctttgtcctctggaactccccaaatcattattgatagtgttgctgtgggtcacaagagcagaagtgtttctcaacagtttggcagtcagccaactgttgcaggggtgaagacagcagagatgtttttctgtctaccccttccgtgaggctctgagttcctcaggggttcatccctgccagactcttgctgctttccttttctgcaacccaacttctttctgtgggcactctaatgggtcctggcccacttccctcagttttccatgcataacttgtccattcaccagtaactgtgatcttctttctgaggagaactgacatccaatgtccctagttagacatcctgaaaa

SEQ ID NO: 390591 - DNA, 698 bp, Homo sapiens
cgtggtggctcatgcctgtaatcccagaactttgggttggccaaggcaggaggatcactaggtcaggaattcaagaccagcttggccaatatggtgaaaccctgtctctactaaaaatacaaaaattagccgggcatggtgacgcacgcctgtagtcccagctacttgggaggctgaggcagaatggcttgaacccgggaggtggaggttgcagagcggcactccatctcaaaaaacaaagagaaaagtcgttcaagtagaaattcagtcttttccagaattcagcagttgcttcacccagttaaatagcaccatctcctggttaaactgaaaaacatactgaggtttttacaaataacacatttgtcaatatgctgacaaggtgtttgaagaaaatgtctcacattataaataaagcttaaataatatgggaaggtaacagtattaagtgctttacaaatactgtttaacagcacacgtcaatcaaaaaatacctttccccttagaaaatataagggaaaattggattgccctgcccattcatcccagtgatttttgtgaatttgtgaatatagcataataaatgtactgatttgtgagacatagaaataaaacaactgattcttaaaaataatgaatgatgtgttaattgacagttgcctctaatttattgttgtttttattccttctcagatata

SEQ ID NO: 390592 - DNA, 169 bp, Homo sapiens
aaggaggagaactgcaaattttgagagagtccaacaggaatcgctaactgcaggattcgctaactgaaggaatcgctaactgaaggggagactaagtacctggaagaaagcaagctcaaggactgtacatcatctctgcagctgcatttctttctttcttttttttttt

SEQ ID NO: 390593 - DNA, 307 bp, Homo sapiens
atcaaacaaaaataaaacaaaaataagtttaaaaaaatgaacaaagtctccaagaaatatgggattacataatcccatgaccaaacttaaaaatcactggtgtttctgaagaagaagaaaaaccaaaaagtctagaaaacctatctaagggaataattaaggaaaacttcactggccttgctagagatttaaacattcaagtacaagaagttcaaagaactcctgggagatccattgcaaaaaggacatcaccaaggcatttgtcatcaagctatttaaagtcaaagtgaagtaaagaatgataaga

SEQ ID NO: 390594 - DNA, 319 bp, Homo sapiens
attggttctgtggttattgaactgtgaatatgtaccttcctatcgtgagtcacataaagtgctttagcatttgtgccacgagatcctaaaacttgctatgttcggtctatgcttgtgcaccagaagctgttgatctataaggaaaagcagggagggatcgttgggaagggatgaggaggttggcactgggctgtggggagcggtgtgcagttttgttcatcagaggatgtggacttcatagcgatgttgtgttgtggggtttgtgttaggtgctcatagttggaggtaacgacgggatctcagaagccttgctctgctt

SEQ ID NO: 390595 - DNA, 327 bp, Homo sapiens
cacttattcaacgtggagcagaaaccagtgcatttttgtcagtataggctagcatcacagaagtgcaaaaaaaaaaaaaaatgacagtagactatagctcattttgattagtggacatttttacgatagacccttaattattcagtcactatttcactgctacttggaactgaccctgtttgtcttactcatccaggttgcatgccttccccttacttataaactctccatctagtggttttcccagatgctaaattcgccacctccccgccggccccggccccaagtaataaacaactaattaaaaatagaggaaattttggcaag

SEQ ID NO: 390596 - DNA, 311 bp, Homo sapiens
tctagagcaggatttatcaatcttagcgttattgacaatttggatgggacaagtcttcatgtgttaccctgtgtattgcaggatatttaccagaatccccagtccctgccccctacaggccaagagcatcatcacactctcccttcctacagtgggaataaaaaatgtctccaaacattgtttaatgtgttaaatgtgtccagaggactaaaactacctctggttgaggctcactattttagagggggaaaatacatgtaaattgtagtgagaaagaagttcatagaaaaggtttaaatacattgcatatt

SEQ ID NO: 390597 - DNA, 764 bp, Homo sapiens
gctttgggaggccagggcgggaagattgcttgaggcaggagaccagcctgggcaacatagagaaacccatctctacaaaaaaagtgataaataaaaatgcccacttatatatatagagggtgaacttgcagattctcataagtaacttacagttgtgtacataatgaagaattgacttgctttattagtgatcccaaaaaaggagcccgtttgttttatcttacaaatttttcataatttttttctttatttaaattttttttctataacacacaactttgtccagaaccctgtttgttaatattttagaatcgcttaaagatgtagtgacaggttggagtttacagagtaggtatcattgaagcatcactcagttttttaacacttatttttcagtaatgaaattggcagttactgagttatcagacagctcttgtttgagatgagctaaaagatctacagttgatattactggtcatatattgcaattttgtgtttcagagaatattctaaaaaacctaatcactgtagacaggatgcactgggatatagatagttactaactggaccaacttttctcacacacaaattagcactttttctaagaatactgtttattaccccaaaattttactgtacatactccaatcattgccttgcagaagagcatctaagacctgtcattgcttcgtactgagcacaaattatttttcaacttaaaaataagagtcctggttaatagagataggttgacagaatgtcag

SEQ ID NO: 390598 - DNA, 422 bp, Homo sapiens
tttgttttaattttcagaagaatattttacaatagcttatatttgttgaatttttacatacctgaaaatgtcatttttctatctttttcaatgatagatttgtatgactgggcatagaacccttgtggaaaattattgtgagttctagtcccaatttgactctctttcctttgcatttggcttccccaacacatttggaagctttttagaatcttctctttatctctgtggttctaaaattgtataacagtgtatcttaccttattcattttctcggttattctatggcctctttcaccttggaggcttatgttttcagtatttagatactcactcgaattattttcctttctttaatataacttcttctcctttgtgttctctactcttatttttctgcagttcttactagttcagtgtta

SEQ ID NO: 390599 - DNA, 587 bp, Homo sapiens
cacactacagtcatgtagtaacttctcccttcaaataccttttaaaattctatttggtatcaaaaagaatcaaaaatcaggaaagacatacaggagaagaaacctctagtcatgagagctcccttctacagagagagatgacaaattctgtctccactctgagtgagaaaacatgccaaccacccaaagcaactgttcctagcctttggagaaactcctttgagaatctgatgaaagctctacctttgtccggaaaagtgtcagtctgcacagagacacaaaatactccctggaatttcaagagggtcaagggccctctaaaactcacccactgaccacaagataagagccatcaacaaagagccatctgtgatactctttaaactggtaaaatcctcaattcagattttgtttccttaaggtgcaataaacttaaaagcctatgcaaagacctcaagaaggtacactaagaaagaagtttctcattcagttcttcctgtcttttttttgagatggagttttgctctgtacccaggatggagtgcagtggtgcaatctcagctcactgcaacctccgccgcatgggt

SEQ ID NO: 390600 - DNA, 1017 bp, Homo sapiens
tggttaaaagaccaatgtttcctagtaaatattcatctactgatagttactaactgctgaaaacaacaaaactggctttgaatatttttactgattggcctctacactttttggttcacattccgctagcaagaaaatcttgtgcctacacccccatataatgtgctcttgcatcaatgttatgtacatcctgaaatagaaaatatagaacaaagtttcaaatatgcaataaacaggaaataaaaaatatttaatttttttttttagatggagtctcactgtgtcgccaggctggagtgcagggacacgatctcggttcactgcaacctctgactccttggttcaagtgattctcctgcctcagcctcctgtgtagctgggattacagacacgtgccaccacacccagctagtttttgtatttttagtagagacggggtttcaccatcttggccaggatggtctcaatctcttaaccttgtgatctgtccgcctcaacctcccaaagtgctggaattacagctgtgagtcaccgtgtctggcctaaaattgtttgtcttatgtactcaagtgccaacaaaccattttgctagcacagtagcagtaatggagtaagagcaatatgctggaatatacttgatcaattttgaaaatctttactttatgatattacagttcaaaagcaggttcaaagtttatacttgttttaacagctataatattaataattggcaatgatctaaatagaataaatgcgtctttggatgtgcctattaagtcaatactaattttttagtcccacctcctagctgttcaaagtgttttttctttgatatttatttaattaatcctcttggcaagtggcactggtttattttaaaataaaatacaaaaaataggctagtgtagtggctcactcctgtaatcccagaactttgagaggccaatgcaggcagatcacttgaggccagagttcgagaccagcctggccaacatggcgaaacctcatctctaccac

SEQ ID NO: 390601 - DNA, 607 bp, Homo sapiens
tggttaaaagaccaatgtttcctagtaaatattcatctactgatagttactaactgctgaaaacaacaaaactggctttgaatatttttactgattggcctctacactttttggttcacattccgctagcaagaaaatcttgtgcctacacccccatataatgtgctcttgcatcaatgttatgtacatcctgaaatagaaaatatagaacaaagtttcaaatatgcaataaacaggaaataaaaaatatttaatttttttttttagatggagtctcactgtgtcgccaggctggagtgcagggacacgatctcggttcactgcaacctctgactccttggttcaagtgattctcctgcctcagcctcctgtgtagctgggattacagacacgtgccaccacacccagctagtttttgtatttttagtagagacggggtttcaccatcttggccaggatggtctccaactcctgagctcaagctatccgcccacctccgcctcccagagtgttgggattacgggcagtgagccaccagcctggcccctcttttcactttgaaaggtaatgtttaggtttaaagacattacttttgtgtgtctatgta

SEQ ID NO: 390602 - DNA, 379 bp, Homo sapiens
cctggagcacgcttctcctggctgactgtttcttcctctccagtcgtttcctctggtgggcctctccagggctccgccggggtgtggccaagaccctcgaggtggggtgtgctcagagcagggggcctgaagaatggctcctctgtttacaacacacccaacaggaagctggggtcatcgtgatgaggggcacaaacttgtggcctccctacagacaaatgccctacatgtggaccccctgcacctccgcatggcttccggggaggaccaatggcaaaaggctttgaaggcctcacttttgcaggcagaagtcctgggagtgggtttgggaatgagtgaagggctggaggggcaggacagtcctcttccaggagctgag

SEQ ID NO: 390603 - DNA, 644 bp, Homo sapiens
atgagagactagcattgcatgaaaagggcatgccaggtactgcagcatgaatgacagggctcgatgtgggtggggaatggtgagtagtttggagtggtgaaattttaggtgatgagatgaaaagtggtaggagatgagactaaaagagaggttgaggccatgtggtgaaaggcctcacatgctaaggacttgactcgataagcaagtcaagtggagaatgacatgattagatttgtagtctttggcattaactgggcagccagctggaggatagattggcgagggactaactagaaacttgaagactgccttagtagggcctttgataaacatgttttgactttgtgtgttaaaacagcctgttaggagctgacgaaggaatgatatgctgcccttggctcagggagttcagcctagtggcagggaaggaaagcatgcagtgctgcttggaatgtgctgcttgtgaggtttgtacaaggtatttgtcattccaaaaagggaggtaatcacctctgctgcagttgtgatagggtcggtgggagatgcttttgaggattaggaagagtagaccaggagctggagtggatgggataggacatttttggcaggggacctagaagttagatgaaggtctacacgaggtc

SEQ ID NO: 390604 - DNA, 759 bp, Homo sapiens
gtggcaaccagcttgcgtccgtttccatgtgtgggagatttgttctttcgctctttgtggtaaatcttgctactgctcactctttgagtccacactgcttttatgagctgtaacactcaccgggaaggtctgcagcttcaatcctgaagccagcgaggccaccagcccactgggaggaacgaacaactccagacgcaccgccttaagagctgtaacactcaccgcgaaggtctgcagcttcactcctgagccagcgagaccacgaacccaccagaagaaagaaactccgaacacatccgaacaccagaaggaacaaactccagacgcgccaactgtaacactcaccgcgaggatccgtggcttcattcttgaagtcagtgagaccaagaacccaccaattccggacacactgttatggtcttcagaaggagagtaaaaagaatgctgggtagaagaaatacctgaagaaataatggcccaacctcaaatttggtgaaagacataaacttacagattcaagaaactgagtgttccccaaacagaataaactttaaagaatccacactcaaacacatcataatcaaacttctgaaaactaacaacaaagaaaaacttaaaatcagcaagagagaaaccacacattattcaactgatgaaagtgactcagtgacagcagatttataatcagaaacttgaaggacagaaggaagaggcaaaacattttgaaagccctaaaaggaaagaactgtcaacccagaa

SEQ ID NO: 390605 - DNA, 376 bp, Homo sapiens
atcagtaagtttccacggttccacacccatacaaataaacaagggagaaaggaaagctcttccttacagaagaatgccaacgaatgaatatagaaggaaagatgagattacaaaagttaccatttagtaaccaccaataaccaattcagtcaagaattatcagcggatgctgagactagtgggaaaagtttgagaacaagatagtctaaaagtgtctctcagccacatgtttactagttacaaagagtaaaatagtgtatttacagtagaaaaacctggcacacagcacttaagcaaacgatcaaagataatgttgacagaaatcagactaagcagcagcattgtgcaagataggttgcacggagaacttagccgc

SEQ ID NO: 390606 - DNA, 542 bp, Homo sapiens
  misc_feature (56)..(56): n is a, c, g, or t
  misc_feature (115)..(115): n is a, c, g, or t
tgtttgcagctgctgagtgcctcctagcactgaggaaagcagaaccacgctttgcnacaatgaactctccttgctggaagagaccgcccacctctaacagaattttgtagctggnggaaacttcagacacaagtcctgttacagaagaggaaactggcacagagaggaaatggtgcttgcataaggtctctggacagagtcttgccctgttgcccaggctggagtatagtagtgcagtggtgtgatcatagctcactgtaacttcgaccacctgggctcaaacaatccttcttcctctgcctcccaagtagctgggactacagagcaggacccaggatgcaagaccctaggcatccccaaggccttccactgtccccaggccttccaaagagacagcggcaggaccgcacaatctacaactggaaacagcaggaagtgctagaaaatcactttacggaggaacagtacccagactatgacacacgacaagagctggcggagatgctcaatctcagggagtaccaagtgcaggtgtggttcaa

SEQ ID NO: 390607 - DNA, 428 bp, Homo sapiens
caggcgtgagccactgtgctcacagttagattttattaacctaaaatgacaggatttgccttggatcagccatttctcaaagcatatgcagttctcacttacctgtgaagacagtagtagagctgtagtggaacacctccaggaaagactaagcaagttccttagtccatgctattttcttgacccctccacacaccttccccacaccaattcagtcagagacatccattgccataggaaaagaaatacacagcagagcatggagaacacgattcgatattacagtatcccagtttcaaatgtaggcttctgaaacccacagaggagaaaaattctttttttttaaatttaagttctgggatacatgttcagaatgtgcaggtttgttacataggtgcacatgtgccatggtggtttgctgcacttac

SEQ ID NO: 390608 - DNA, 251 bp, Homo sapiens
gcgtgcctgagaagaccactcctgatggagtgctgggggaagttcaaggcttggaggccaatgagggggctgatggcacccatccagtggagaggctgtatttggaggccctcctgagtgggagcaaggctatgtggatgatgagatgaggtaagtgagatggaagtggctgtacgaacagccattgaggctgaggcaggaggattgcctaagtccatatcccaggtgtcaagaccttgtctctatcaaaa

SEQ ID NO: 390609 - DNA, 723 bp, Homo sapiens
tgaatcaatatatgataaatcattgcaaaatgccccattcaataaatgttaagtaatattgttttcatcatgattttatataatttgatcctaattacaaccttatgaggtagatctttttatccttattttataaataaagagacttagaacttgttcaaagtagcttgtcccagattaccaagctagcaagaggtggacttgggattcaaatccagaaccctctgtctctctctctctctctctctctctctctctcagacaggttctcattctgtcgccactcttcttcctggatcctacatcaccctgcttcttgatttatgcctttgttttgacagagcatatccttactagctttctgggtaaagggtgcacaactctatcacttcttagctctctcttatgctgtttgtcttcaggtatctaaaataacatgttcgtcctgcccctccttcatccctccctttttcagctgagattctgtgagaaaatgtagtcctaatgccctaaggcatctcttgtatataatgaattagctatgctcctgtgcgtctagaataggattctaggtatgtacttaccttgggagaatggaaaaaatactcacttaaatccttttctgtattttgtagatcaaatacggaaccctggttgaaaaaggctgtgatgctagctgttggctttctgtagtagatgaggatataatgcctaaaccaccat

SEQ ID NO: 390610 - DNA, 257 bp, Homo sapiens
agaacacagattccacctgtgttcctggctggcccgggtgtggttggaatggaggggggtcatgggcaggaaaggggaaatgccccatgccccgaagccctccagtccccaggagccctctccctgatgggggcactatggacatcctgatgagagcaggtggctgtcgggctagtcggggactgtcgggctagtcggggactgtcgggctagtcggggactgtcgggctagtcggggactgtcgggctagtcgggg

SEQ ID NO: 390611 - DNA, 387 bp, Homo sapiens
gacttattcttcgttctgccatgtagtttagtctatatcatgcaattgttttgaggtacagtgtcattttagatgggttggtcttgcttggttaaataggctctaattgacttaaggccagataagtttctttgtgtatcctctcctttgatctataacgccatgcagtataaatagcaagattatgtattttacattggtactattaataaattgtaccaataagcataacaagaaattgatgccttccttaagtacctcacaaggttgtggtaaggatcagaaatgttctgtgctaaataaattgtaattcgtaacctattataaatgttgacagatagtaattacggttgtgttaacaccaagatcttcacatgatgaccctag

SEQ ID NO: 390612 - DNA, 676 bp, Homo sapiens
caggcagatcacctgaggtcaggagtttgagacaagcctggccaacatggtgaaaccccgtcgctactgaaaatacaaaattagccaggcatagtggctcatgcctgtgatcccagcttcttgggaggctgaggcaggagaattgcttgaacctggaaggtagaggctgcagtgagctgagatcgtgccattgcactccagcctgggagataagagcaaaactctgtctcaaaataaaaataaaatgtgatttctcaaattgatctttatatgctatctagatttttagtttctgcaagcttagtgttgttttacaaagtcttctttattcttttttggtgataaaaggcagatgtagtcaattgtggctcttttttcctaaaatactgtgcatataaaatgactataaaaattatgcttattatagaaattttgaaaagtccaataaagctttaagaaaataaaatccttcattcgtaccacctggggaataaatactgtaaaccttgagatgttttgtctttcctctgtgcttatataaacacataaatattgtatgcacagtaagaaagtatgccataaataatttttcccctcttttctccttaatattgtggcatgcttttttatgtcgttacaagttcctcataaattccatctaagatagctatattgt

SEQ ID NO: 390613 - DNA, 434 bp, Homo sapiens
ggagagtagtgacggtgggactggaagccagctcacagctcagtgccactgcatgcaatcatctcctaaacatgtgtctgcacacagatttattcctcctggacttttcccttgaactctgaactggtttagccaatggcccacttgacatcttcacttacatgtctcatagtgtctcatccataacacacccaaagtggactgccgattccacctctgctcccatccccaaccagcatgttcttctgtagtcttcaccatctcagtaaacaactcagcaactaaacaactcatccttctgtactcaggctcaaaaccaaaagtcattcctgacactgctctctcataccctaccagcattctatcagaaaatccagctggctgtattttccaaatgtatcccaaatccaaaccctgctcccctacctcttctg

SEQ ID NO: 390614 - DNA, 289 bp, Homo sapiens
ttttgttgaattatctatccgtgttctcttgtaccttgttgaattttcttataatcattattttgaacttttgttctggcatttcatatatttccttatgattggggtctattattaaagaattattgtgtttctttggaggtgttacgttttcttgcattttcatgtttgatgtttccctatgttgatttctagtcatctagtgaaactcacatcttccaatattttggagtaggttttatagggaaagacttatctgcttggactcaagcacattacatttattgtg

SEQ ID NO: 390615 - DNA, 812 bp, Homo sapiens
gaaagcttcttggtttaagaaactcaaattcattactccagagtaaaaatgtgttttttcattttccccctcaatttgctgaagctgggagccactatcatgtagaggaaaaagtcaagatacctagaggctgcttctggctaggccactaaatagccaggtgatctgggcttagtggtcactttgcactttagaatcatctggagacttaaaaaatatgctgggaattttaaatatgctgatgacaggccccacctaagcccattaagtctgaatctttgggagttcgagcctatgtgttggtgtactttgaaatgctcctgagatggttttaatatgtaaccaatttgagaactactgttcaagatatttacagaggatggacagtctgtgattaaagggtccggctgcagggccagaactcctgctttcaaatccccactcctcaacttcccctagctatgtaaccttgggtaagttacctagagtctctgggcttcagtttcctcatgtgtaaaattagaataatcataatatattagttaatacagatagaacctttaaagcatcttctgacactcaagtattttttgacagtagtacaactaaatataaatatgctctcttcatagttctgtgttgtctctatgctttgtaacatacagccatttacatacttgaagctgtaccttgatattctttttactatactttttaagctttccttttgttttctagccttttaattatatcaatatttccccttttaactgcccaaaattctttattttccttttagttggaaaacccca

SEQ ID NO: 390616 - DNA, 250 bp, Homo sapiens
ctgtagtgctcagtagcactcaccctgggttcatactttggaggatgatactgcatttttggccccgtagcttgctttcccacttgtctgtgagtgcagagcaggagtctgacacttcccactgtgctgcttgctttgcagacactaaattgaagcttcttgctaaagcaaaagccagtaggcgtgccctctaggctattttgctttgcagggactctgagacactcagtttctcccaaatcttttccca

SEQ ID NO: 390617 - DNA, 708 bp, Homo sapiens
gccgggcgcggtggttcacgcctgtaatcccaacactttgggaggccgaggcgggtggatcacctgagctcgggagtttgagaccagcccgaccaacatggaagaaaccccatctctactaaaaatacaaaattagccgggcgtggtgacacacacctgtaatcccagctacctgtaatcccagctgaggcaggagaatcgctggaacctgggaggcggaggttgctgtgagccaagatcgcgccattgcactccagcctgggcaataagagcaaaactctgtctcaaaaagaacaaataaataaataataaatacatacataaaacaaaaaagaaagtgagcactttcatccatatttagatgagggttggtaaactttttctgtaaagagccgaagagtagtgtaaatctgctcaccctccagggtcccatatggttttgcaactcttcagctccgcccctgtagtgcaaaagtagccacagataatctgtaaatgatgtatagacacggctgtgttcctacaaagcataattcatgggcactgacaggtgaatttcatatgatcttcacaatcccaaaaacattcttttggctaggcgtggtggctcatgcttgtaatcccagacctttgggaggacaaggcaggaggattgcttgaggtcaggagtttgagaccagcctgggaaacaaagggagaccatccccc

SEQ ID NO: 390618 - DNA, 248 bp, Homo sapiens
ccactgcaggacagccagggcgggagtctccacctcttccagactcctgtggagcccatccaaaccgggcgggagggaccgaccccagagggtgcaggcgcgggttccctgaggtcccgggtctcttcacgctccccggactcccaggcaattgtattcattcacctgtgttgagctgcgtattgagcctttccctgccatatctcattcaaaccttatcataattgtacaaagggggttctcacatg

SEQ ID NO: 390619 - DNA, 708 bp, Homo sapiens
cagaggaacaaaagaaatcatttcagatagtgacaagagctataaagacaataaaggaggtgaggtaaaagagcagaatgggaaagggttattttgcatttgagaatcagggaaggttcctctgaggagataaggtttgtactgagacctgcatgacaagaaagagccagctttgaaaaaagtaggatattgcaggtagaaggaacagcaagtacaaagaccctgaggtagggctgtgcttgatgtgttccaggagcagtaagaaggataccatggccagagcatggtgagcaaaggacaatttgatggaagaagagatcagaaaggaaggcaggggctagatcatggaggaccttcttggccacagtgtggcagcccgggagtatgtgctgagattgctcttcaagacagaacctgcctcaaggtgtacagtcaatggagagcccacagcagagctcttgtaggattggccagtgttccaactgaggccacgctcttcctgggcagctccaacaaatgattgaacctggtgggaagaatagggttcaccattttggctcaatgcataactcctctaataagaagcctttgctctggacttctggttgacctggactagactttctcagtgcagtaccagactcagaggcttttcctcctccatgttccttcctgcctccctccttccacaggtaggacttgtattca

SEQ ID NO: 390620 - DNA, 327 bp, Homo sapiens
gcgactgcaagatagcgggtctccatagagtgtcctggcaaacgaacgggcatgtatgtaaagaacgtttatctcacaggatgatgcgttcacaaagacatcctccttcctgctttacttttcatcatccacacagccaggtcttttgagggctatttctatgaatctgctaaggtcacctgctcttaacaacacagtttagactaattcttgggcttttgactctttctgacaacactacagaaagctgtaacagaaacaagactctcaccaccaccctcaaacacatgattgcaaagtatgggcacattgctgctagaaaactgc

SEQ ID NO: 390621 - DNA, 484 bp, Homo sapiens
tttttgtttaaaaatagttttgttttcttgttttactgcactgtgaacacagaatgtggcctataacacatctgcttccaaaactttttaaaaagcttttagtgtggcctagaacatgtccattttttgtaattgtttcacgaacatttaagatgaagatatcttctctgtctgtagaactgaaaactttatgtgcctgttagttaactcagtatcgtcaattatattgttcagattcatgtgttatctaattttggcctattatattcattaaaaaccaataaggttatgtgaaactttgttagtacaattgtttttgctaataaatttttataatctttgctttatgtactcaacagctgtgtaattcgaggcatataagtgcagcattgttatgtccttgttaattaaataatatatgtaaaacaccatatgacaatggctggcagatagtaggcactcaataaatgttaattaaaacctg

SEQ ID NO: 390622 - DNA, 700 bp, Homo sapiens
gaactgacttctagttcataaatcttgtgataatatgattaaaatttggacttgtaatggaaggtttcatttgtaacttcagtaggtactgatgcttttaccccctcttttctctatgttcttgaggggttaagaaaacaaaggataattatccaggagcacggccaccttgacttcttcacctaggttatctgtctagactctggtggactctccttaacttaaatttaaaaatttgttgaatagatataacattcacatgctttagaattcttaaaaataaaaggatacattgttaaaagtttccctttcacccatctctacctatctagttcccctcctgggcagcagcaagtgttattttgtgtgtgtgtgtgtgtgtgtgtgtgtgttctttctttaccatttggagcatggtacttctttttctccctgaaagatagagaagtgaagaaagggaactattgctacctcttccactattgctacctcttccactattgatacaaaaagggatattcaggaatttatacatttgattgtaaacgtctcttcttttttttattcccccctccaccgagttggagtctcgctctgtcacccaggctggagtgcaatgggcgatctcagctcactgcaacttctgcctcccgggttcaagcgattctcctgcctcagcctcctgagtagctgggattat

SEQ ID NO: 390623 - DNA, 797 bp, Homo sapiens
attttaagaagtacttttgaatccttcctccaggccaccatgctagacatggaagatacaaagatctattgatgcctttgaatagcctagagtctcttgttcgtatgaacaagattaagatccaataaattaatcacaaagtgcagatgtgcaccctgagcctaaatctgccccccaggtattgggaaaggcctcacagcaaaggtggagactgagccgagcagctgatggtgagtgggagtttatcagatgacagacaggtgaattgcatttcagaaggagggaatagtatgttgcaaaggtaccaaagagggaaagagtatgacagtggcttgaggagagtaagtggcaccagggtcaagggagtgtgttgcatgctctagtcatgcaagtgttttcctggaaaaagaacaaatgcactgtggtaaaattcaagtgcattcctatacttaaaattcaacagatctaaagatagtaattcagagcaaaaggaaattaaaatatttgagcagtttctttgtgacacctgaaaacaagtgccaggggatttatgagttattatctctagaataggtcgcttcatgggcctgtagcctgccatcactcagggacccatgctgagaagcctctgctcttgggcaaatgctctgcccttgctgtcttaaaattctttagtacattttgaacaatgagccttggcttttcatattccatttgtccccagaaattatgcagctgagcctgagaacagaacattttcagataacttgaaatagctcagtattgtatttaaagtg

SEQ ID NO: 390624 - DNA, 404 bp, Homo sapiens
aaaaagaatccaatgagacatgcaactgatatttgaggttagatgcaggcccattttggtttgcagggccctcttccacagggacgctgtcacaaggctctagcttaaacatcttccagccatttccccaagtttcagcttctgtaacatctctgatggatgcattttgactggagcaggaggctcagcagcataatggcactaacatttctctgccgccttttgagttatagctcggtgggcttgccttttcctatttcatggatttgctttctccgtttgttcttacttgattaggaaattgctgtacacagaacttctccctgtccataaatatcacccaagttacacagcatggggagagagctgctattgtttggttcactgactttgggactttttgc

SEQ ID NO: 390625 - DNA, 599 bp, Homo sapiens
agtcacaaggcattttttaatgaaatataatagaaaatatcagtgtatcactcccactaaggataaaaattaaatcataacatttttatttcagttaataaatctacacacatatttactaggtcacaatgtaaattgtatttcttactggaagtcacagccaaaaaattcttaaagccactggattagaggcagagagactgaaagaagagaccagggaagaggctgctacagaaatgcagtctgggctgctaaggatgatgtgtggagatgccaaagagagcctcaagcagtagaagctggggctaggcatggtagcagctcacacctgtaatctgaacactttgggaggccaaagttggtggatcagttgagcccaggagttcgagaccagcctgggcaacatggtgaaaacctgtctctacaaaaaatatttaaaaattagccaggcatgatagcgtgtgcctgtagtcccatatattattacttggggggctaaggtgggaggattgctttagtacaggaagcggaggctgcagtgagccaagatcatgccactgcactccagcctgggcaactgagtaagaccttgcctcaaa

SEQ ID NO: 390626 - DNA, 321 bp, Homo sapiens
catctgtgttatccataaaaattcatgttatccttctttaacagtagagtagtaagagatacattttcatcaaggtatgatatgaatgcctgtgtctgagggatacccacctgctcacatacatgcgcacacagtgacatcaggcaacttggtggttcaggtgactcagcacctgaacgaagatgagagcccgtgcccagaagaggccaggtgcccagctgtaacgcctggcacatggaggccctggcaaatacttactgggtgaaggaatgtaccaaagtcactgcaggatagaggtcagggatgccagacttgaaaaca

SEQ ID NO: 390627 - DNA, 132 bp, Homo sapiens
gaaacactatgttgttgagccccaaacgctatttaatggaaatggactccaacaactcatgtgaggcctaagctcaggctttcttgggaagaacttgttaaaaaattttcttcactactaatagaatttttt

SEQ ID NO: 390628 - DNA, 373 bp, Homo sapiens
aaacccagccaaatgagtattgtctcctccaaagtagtcactctgcctcacagagtgacttatttcaaagatgacctgatttcaaagatgccaggacttaagcccaggttgctctctccagcgcccacgcttttcccactgcagtattctgcctttgccttcaagcagtcacctctcggggaaagaactaacacatgtccagcacttaacagtttgccccataccgctacctgcccagctcctttagtgtttacaccaacctagcaaggtaggtgctattatccccattttccagccgaggtatcaggaagtttaaggaagttgcccaaggttgcacagctcagaaggggcacagctgggatgcagacccagg

SEQ ID NO: 390629 - DNA, 499 bp, Homo sapiens
gcacctcttgaatgagttttaggacattcagaagaaaacagtattctatgccttactgtactttatagatctgatatctaagggacttattctgttgtaaagaaaactgccatttatttaaaataaatttaaaaatatttcagaagaaaaaagtgtttataaacattcttggcagagaagtcacaaactggccgggtctccaccactcctcgctacattcaaattactgttcagagcctaaagacactcaagtttgtcagctctggtagagtttcccactggcaataataattatttttcctgcatgagtttcaacactaaaagtgtcttatagccagaggtgttaagataccaaatctttgtgtgtgagcaaatcttgtatgacctggagttcttgtgcagttgtcaccatcagcacccagccagcttcttatattctcactgcttttatgacctactgttatgattaaaaaccaaccaacccaacaacaaccaagcc

SEQ ID NO: 390630 - DNA, 102 bp, Homo sapiens
ggagttcaagaccaacccatgcaacataacaagacaccatcattacaaactatttaaaaaattagccaaagatggtggcgcacacctatagtcccagctact

SEQ ID NO: 390631 - DNA, 311 bp, Homo sapiens
taaataagctcgggacctgagctcaggctgctcccagccctgctggctgctgccacacactttccccaggtcctcctgcagctcagcagcagattttccaggctccaggcaccatgtgtcggtcagatgaggccaggcacgtaatcagctcacttgaagagaccctgtgcagcaccctgtgcataccaccgtgtgcacacacatgcacggagacacagacacatgcacagagctgcacccacaggcacatgcatgcacacacagacacacacacgatgtgacacatgcacacacgatgcaacgtgaaccaa

SEQ ID NO: 390632 - DNA, 657 bp, Homo sapiens
ccactgaacatgctgtggcactgccagtcactcccaagccttgaccctctgcttgcctggcccaggcccagccaggtgccggtgaggtggggggcagggctctagttgctgggctgagtgcaggaggggaataggtagctgggaacaccctggggagatggaggagagtgcaactgtacatgaggcaagcctcaaccaccccctcctcacagccctcctctctccactcctgtgcatgccccattggcctctggacttcacttataaaacacaaattcaaagacacagttaagaattttaagacagccatgcctgcagaacactgaactccaagtgaccagcccttctgagagtaggcccctctgcaactacactggtcacacccataaagctggccctgcaggatggagatgggaggatggatttgagaggcattaaggacatagtcaaaccagagcatggcaatgttcagggaggaagatgttcagagttcattggagatctctggctgtgtgactgcatagagggtaacaccattaagatatatagggaaacggaggaaattattatggggatgggggcaggggcaagctttagggacctgagaacacttccttcgttccaacagagaatcatctgtcttttctctgatttaat

SEQ ID NO: 390633 - DNA, 452 bp, Homo sapiens
ttgaacactgtcctgatttgcctctgtaataagaagaaatataccacatgctactgatcacaatctctgcaccctctacctgtaagggggaggaaggtggagaaagaatagagtagaaaacagagaagaaagtcaacaaagaaggacaatgcacagaacataatgtatatggtcaaccataaactttccacattaacaaagaactatacaactgccaaagccagacataaatcccctattcccaactagtccaaagcattggttagttattattttaatacttccttttacaaatggactatatcacttctcagagtttaatacactttttggcatatgtatctacaagcatagacagagcttaacaaactttttgaaatgtgtacctataaaacagtaaaaaaaatttaattgtaaaaagacttctaagtgttaatttgaaacacaatttg

SEQ ID NO: 390634 - DNA, 868 bp, Homo sapiens
caattttagtatttccagctgacttgctcctctagtagatgataactaagctattcacattatcacccccatttctgtccccattgtgccccgatgttacatcacacactatgattaaattggacgtcagtgcttaaattgttatgaccacgcacacattctctgctgaaccagtagtgctctgcagtgtttatttcatcctcaaggtaatacagtaattgcttgtttgttaatttgactatttggttttttaaaaaacgtaatcaatctggaacattacagaaagtatgtggaatagtataatgaacccctgtcacccggcgttgtcaatggccagtgttgccccatgtatggttccatcactggaccctttcccatccttttgttatttaataatgtaatacttgtttttaaaatctgaatttaacaaaatagaaagccaagttcatttcttaaagtcgaacagtaagaaattttttctaatgattttgataatgtgtttaaattttacttgtggaaataaattattaaaaattcaaatacatgtggataatctgaagtgtgtaataattggtcaaaataatagaacaggccaggtgcagtggctcacgcctgtaatcccagcactttgggaggccaggcgagaggatctcttgaatccaggagtctgagaccagcctggacaacatagtgagaccttttctctacaaaaattaaaaatattagcagggcatggcagtgtgcaactgtagtcccagctactaaggaggctgagacttgagcctgagaggtctgctacagttaggctgtgattgtgccactggtctccagcctggacaatagagtaagactctgtttcaaaaaaaaa

SEQ ID NO: 390635 - DNA, 439 bp, Homo sapiens
catcctgagtgctctttgttgggttgggagtcagggtgccatgggagagcctgccagatggtctataagatgctgtctgaatcttctaaggtttaacaaagtggatttggacctcacccttgaggccagtgtctgggatttgatctttgccctgaggccatctcttttagaatcttttgccagctggaaaggctgggaagaagaaacatttttattctccacccagtacatcctggattggaaatagttcctttaaattctgcttgaaaatggaacagttccttcatctttctcttcccatgtgttaccctaggcagcaaaaagaagccagcttcctcctggaccccttagccagatgcaggagttcccgggggaggcactccatcctccctgtcactgagggtgaccttctttccacttcttcagctggtacacacac

SEQ ID NO: 390636 - DNA, 777 bp, Homo sapiens
gtttctgattaagtaattgcatatacattgacacacacacacaaatgcactcatcccacgctgaactctccattattatctctgttacttaggaatgctgtagcggatactggggtttctctgtaaccttctttccactatccaccgattgtgtaacacatagttgaattggcatgcctagtccctcagcttcaacacttaaaacattcgggattatcctatgctttctgccaccattgattttttcttataacccaggcagaaaacaagtggtgtgtggtgacattggcttaaccacagaaaatggttcagatttggttcaatgcatttgaatttcagaaaattgacttagaacattaaaacagagatttctttcttcctgatgtaatttgtaacttaaagcctgaatcttctaaaatcactcaattatttgagggaagccactgaaggatagagctgacacagaaaggaaagaatatgtagttgatgcaaacataaaataaaataacaaggatcctgattaaagaacaaacgcctgaaaacgctttaggtatcctttgctccttcatttggttttagtaggtttaccatttaatcaaattttgatggcaggagatacaataaattacatatgactattgttttcaatattaagaaatccatgcttaagaacatattatatattcattgtctacataaaaccttttccttgattaatacactttgtctaggtaagggcaggagttgaatattccatttatagttgaatttcacaag

SEQ ID NO: 390637 - DNA, 717 bp, Homo sapiens
cttagtggcagaagccttggactccaggtaacagggacaaggtgagctttctcaaaaacactgatgggttagctcccttcaaactcaaatgcaaaagaccccccggcatcctcccaccctctccctgaaaagatctcttccaaatgccttatgggggatcttacaggcgaacacattgtttagtttaagcctactgcctggatttcaaattcatcatgaaataaatacttggattcaaaagatgaaaacaactgaattacaacagatttctctaaatcttgataatcaccagattcatgtgaaatgtttgttgaaaagagagagcctaggccccaaaccagatgtcccagggaagaagggcttggaaaacatgtagtattaacaagcaccctggtgattcaatcagcagctgggtttcagaaacttggctttgagttctcaacttactttgaagatttgaaaacaatataatttcaaatattggcaacttcagcagcacccaggacttctgaggtgctcagaccaggccagtgggatgcagaggtttgcacctcacataaaaaggagccaatttcacagggcacagtggctcacacttataaccccagcacttcgggaggctgaggtgggtggattgcttgagcccaggagttcgaggccagtctgggaaacatggtgagatgcctgtctctacaaaaattaaaaaaaaaaaaaaaa

SEQ ID NO: 390638 - DNA, 499 bp, Homo sapiens
aaggagcaatgggacagcctttagtgggtgcatgagccttcagttccatgacattctctccctctctcctgactcacagggcaaccaactgcctgcccaggttagctgggactggggggaccacagaaacagactttcagtgtgaaagtcgttacaatcctgggcaaactggggtggttagacaacctccaactgagacttctttgtgctttatggctccaaaagaaagcaaatgtatttttagaatgcaaacataattgagggacattatcagtaactccgctgaggagagcagctttaggcctgtcccctaagtgcagccccaaagagccaggtcacacaatcaacaaaacctctgtgtcccagctctaagctaagactgagggtagccagtctgggttgaactgggaatttcgggaggtggacagagaaaggaagtcatctgtaactgaagccaaatgggccagattccttaaaaacactgagccatgaaatgctg

SEQ ID NO: 390639 - DNA, 185 bp, Homo sapiens
tccctaaacctgtaaccatgagaccttccgctgtaattcatttactgaacacccactaggtgctaaggaccaagccaggtggtggtatttcagaaaatgaggacacatttgaagagcatccacagtctaatgagagccaaaatgaagtatacaaatatggccaaaataaggcaggatgtggtata

SEQ ID NO: 390640 - DNA, 327 bp, Homo sapiens
agtgttcatggacgcttccagagtagagttgggtagttccaatagagaccatttagaccacaaaatctgaaatatttactatctggctctttgcagaaaaagtttgtcaaaccaaatgttttgccatagcgtgacaagagtaacagcttcccagcctgaataacagtatctccactgccctctgacctgacactgccattcagctaattccacgtgagagtgtctgttgcttgcagcactaacacaagctaccaaacttagtattagtcaaggttcttagttgcaagcaatagtgactctggctgatttaaacagaaaagaaattta

SEQ ID NO: 390641 - DNA, 121 bp, Homo sapiens
gaataaagctcgacccccacaaagtcatgaaaattaaaaattaaaatacaggtggggattgtgtctggcacccagcaagcactcagtgagttttagctaactgctgttgactactattttg

SEQ ID NO: 390642 - DNA, 271 bp, Homo sapiens
cacaacaatcctatgaggtagaggactgtgactccaccccaccgtcaggaaactacagcttctctcaaggttggcataaaataattagagatttcctactcttgttttagacttttggatctcgggttctgaatcttggtcttctaggaggcttcacttgttagcagtttttatgcgtagaatttctagctggaaacagtcttcgctaatctgagtttatcccaatatcagtctttgtaatgtaacatccctacaaggttctacaggaatc

SEQ ID NO: 390643 - DNA, 804 bp, Homo sapiens
cctccaggtaaggatttgaggtctctggtgagctgcaggatcggaaagagtttaattggacttacattccactacagctttagagtccagaatttttttaatttcccagacttaaaaatgacatccatggctgggcgtggtggctcacacctgtaatcccagcactttgggaggcggaggtgggtggatcactcgaggttagaagtttgagaccagcccggccaacatggtgaaaccccgtctctacgaaaaatacaaacattagccaggtgcggtgacgggtgcctgtaatcccagctactcggaaggctgaggcaggagaattgcttgaacccgggaggcagaggttgcagtgagccgagatcgtgccattgcactccagcctgggcaacaagagcaaaactccatctcaaaaaaaaaaaatgacatccattacttttgagacacaaataatgtgctttgttgctttatgctttgatatttcatatttcctccataagagaaagggtgcctgttaactgctccagaatggagggtaatctggaaatcatttccaaatggctttggcatgcagtgtttgaacttaagttttaaacaataatcgtgtttgctggtgagctgggtttgttgagtgtgtctagacttttggggccattcagctctgaagacagacctgcatctcctgcctcaccttggcctctctccacaggcctttgccctccccacacactcctgtgccttcccggctcactcatggctccagtaaccccttctgcccttcaggactctcatcccctaggaaac

SEQ ID NO: 390644 - DNA, 442 bp, Homo sapiens
catctgggctgataggaggagaaatttcagttttcagaaagctgctgagattagaatgcaccttagaaggctggatgatgccacagaggaacgaggagagagaaagcatcgtttggggccgagaagggactgagccccagtcacagcagaagcagacgatgttgggatttgcttgcttcccacaacccagagtcccccacctgcccacactctggcttctcctcaggctgaggtagatttgacacccggcaccccacagctctctactacatgggagtcccgggctccccgcactgtgccagttacgcagaggaggtggactctgcccagaggactccctgtccagctgggcagatgcacttttaaaagacaaatacagttttccatgacagccttctaaagacgagctctggagctgtgtgcccaaggccaggagcctgga

SEQ ID NO: 390645 - DNA, 585 bp, Homo sapiens
ctcctccgcccgcccctgccctgcgcgctggctggcctggctgccctccccagccccagggatgatcagctaaacatgatcaatgaggtgccaaacattttgagacatctggggtctgtagaactagtccttataggacagttctatgagataatgcaataccaacaatatttgctcttactggtcatttgaacaacccacctagtagacccagaaaacgaataaaagaattgttgatgaaacttctgaacaggaacaaaaacataaagaaaccaacaacagcaatgctccgaaccccagtaaagaagggagtgaagggccagatgaggacattttacctctaacccttgaaaagaaggaaaacaaaggatacctaaaatctctgtttgaaatcttgattctgatgggaaagcaaaacatacctcttgatggacaggaggctgatgaaatcccagaaggtctctttactccagataacgtgcaagccgtgctggagtgctggataaattctggtcaagaggtcctgagaaagcagtttgagacaacagcagttaacatgttgttttattaaaaacacagcagagg

SEQ ID NO: 390646 - DNA, 476 bp, Homo sapiens
agaactgtaatgtgtacaatgtgtatgtgtccttggctgtcagtcccattgcagtttcaatgtgtgtttctatatgcagtatatactaagctaatgtagttgttttgtcctttgtcttatctgtgctctatctctagtccggagtggtacagtcccattcctgcagtcctagtgaatcagtgattcttgggggttagtgggttttgtgtggtggccttcctctgtaatgtcaccctatgctgcttctactgtctgtgaatcttccgttttaccttttaaaattcctgctgttgctttgctggtgtatattctccctacctctcctctctttccctccctttcccatctccccctctccctcctcttcattccttccccatccccaaaatctctttcattctcagagataaaaagactcttaactagctcaaggttaatggagccatttttcccacaacggaattctgggtatgact

SEQ ID NO: 390647 - DNA, 133 bp, Homo sapiens
aagtcttagtttcctttcctaaccagctctgtgaacttagggtgacttattctctctgcaggctttcctaacctgaaactgagaggtaatagtacttgccctgtttacctcacagtatggttgaaggatcaaa

SEQ ID NO: 390648 - DNA, 314 bp, Homo sapiens
ccagcctgagctctccctgtcacatcatgtaccctgtggtataaacatctgctcatgggacttctcttactaagtcatctacccatagggaccaccttttcctaaatggcacacaggctctctaagggccagcagaaaccacacaggctagcgtgagcacctttcccctaccttcagtcactgctccaggtcatgtgtgtcattctgtctccttgattctcttgaaagttctgtgaaaggcaggggtcatgctttttggactgttcccttcttcccctttaatcctgtcaccgagtgttcactcatgggatagg

SEQ ID NO: 390649 - DNA, 413 bp, Homo sapiens
gaatggtaagtaaaagaaaaggcacaaaatttgctgaagaaccgtaaatatttaactgaacacctacactgggccaagtaataaaacaatgaaaaatttagacaaagttcccaccttaccaaaacttacagtgtagagggcacaatacacaaacaggcaatacagtgtgaaagtgtgacaagtattgttaaagcagatgaaggacacaatacctaaaggataaataggacaggttaaattagggagacagtgaagataaagggaataaccagagataaggcctgaaaaggcaagagtttgagcaaggtcttgtaaaaagattttatcttaactggagaaaaaggccagaagaagattaaacgtgaaatgttatgtgatcaggttagtactttagatggatcaccctgggaagt

SEQ ID NO: 390650 - DNA, 415 bp, Homo sapiens
tttaatgaaagtgatcgaaaggtatgtttttctgtttctttcaaagcgtatgtttttctattctgcaacactcctggaaaacccatgctgtagtcctcatttaggtgcttaccagttgtgtgaccttggactgaaattaatcactgagcgccttagtttcctcatcaggaaagtgcaaacaatgagacctattttgttagattgtctgaaggatgaaaaatagcatttgcacagccccccaatacccagcacatagtagatgttcaataaatgataactcttatgagcctccccctaggcggggatacttccccttgtactcagctaggaaacttttgactccataataacagagtagctccagccttccaggttccctcctgttctaccctacgtgagcagaactcttttcttc

SEQ ID NO: 390651 - DNA, 362 bp, Homo sapiens
ccacatccagtactctcttgcatgttcagatcgctagaatccaacctctggatatcaaaggatcactactggggcttgaagactccaaatctgcagattctgaagcttgcaggtcagtggccttggactttcaaacttccagttccgtgacatccgggctccttaacttccggcttccgggagcttagtcacatacttctggcttccggattgtaggttccccgcaaggagactaaggcctgtgtgggtctttgtttccccagccgtgcaatgactgttagatgcagaaagggggaaaacagccagggaaactgctcacagtggacccccacggtggagagctggagggagagggttcttca

SEQ ID NO: 390652 - DNA, 582 bp, Homo sapiens
tccttacaaagcccaatcctccccatctcatttcagttgggctgaccacacctctggcattaggtgagagcacataattcaggtcttgccataagaggcttgtagggcatagccaccttgactagacaaacacggggatgaagacaaaccaaccagagacaattagattcagttccaggactgcttgcagaatggctcttgaagaggagatctctttccactgaggttttttgagacagtgaggtataaacgccaagattctagtcaataattttccaccaaatagagaaagcatctctgaaatccgaaactaacacagaggaaagaaacttggaattgttcacacacctaactcaaggcatgcttgatgcccaccccccgaaaaacaaacaagcatcaacctttttgaacgtttcagttagccaatatattatttttttcttaagcccattttgagtcattttcctgctgtattcatccagaacagacctgacaaatagattctgaatgcctcagttcaaatgctagctaggttagtttctatctgtgtgattgaattacatgatatggtggattcctcct

SEQ ID NO: 390653 - DNA, 421 bp, Homo sapiens
ctaatgataccagggtgactgtgattggtttctacacacactaattggacagggaaactggagaagaatggtcctgcctaatgacttacggtagaccttttagtgggaaaggaagatccgagggaaggagcagaggggagtgcttcgcagacttgcctcattgcataggttgctgtagaagtggtagtcctggtgtaaaaagactcccccttggcttgatgagtacaggaagacagcaggcattgccttcaaatatcactcattgctgacactggagaaggtcaagaatagggcatgagctgagtgatatttggaagcatcacatgttctcttcctggacttagcagacaagcagaagcctgctttcaaccaggactacagctttctccaccatacgcacatctacctggcactgtttgga

SEQ ID NO: 390654 - DNA, 408 bp, Homo sapiens
tttgggaggtgattggatcatgagggctctgctctcacaaatggattaatccattcatggattaatgagttatctcgggaggaggtttgttatcacaagagggagtctgttttaaaagtcagtctggctgtctctcgtgagcctccttgcaatgtgatgccctgcaccgcctcaaaactctgcagagtccccaccagcaaaaaggccctcaccagctatgaccccttggccttggacttcctgcctccaaaactggaagaaacaatggtttccttaatagattacccagtctcaggtattcaatcacagcaacagaaaacagacaatttccttctgttttggtgaagcatgggggaataaaaggcaaagaggagaagaaaaaaatgaatgctatctcccaaggaacag

SEQ ID NO: 390655 - DNA, 505 bp, Homo sapiens
cgggtttctaacattgcttgttttcccctggtaggggatttctttgcatatgggaaatcaggccgaagttgccagtaacagccacatccatgatttgtattaaaaataactattcatcattctgggctagagctctgcttaccatggctcacctgggaagatattctgattatgtatctaatcattatgatgccacctttcgagaggtgagcagacaattaacaagtccttcaaattatgttcaaaacccagagtttgagaaaatgttccaacgccttcaagtgtgaagataataaaaacattacctaatgcttaccgttcactgacagtgtgctgggcagacattgttttcagctctggccttgtgttaactcgtgattctcagaggagtgggtattattcccagatggaagatgaagaaatggccacagagaagttaagtaatttgtccaaggtcacattactgttcttggcggggctgattccagagactgcatccctaact

SEQ ID NO: 390656 - DNA, 710 bp, Homo sapiens
agttcaagaccagccagggctaacatgttgaaacccagtctctactaaaaacagaaaaattagctgggcgtgtggtgtgtgcctgtaatccctgctacctggaaggctgaggcacaagaattgcttgaatccaggaggcagaggttactgtgagtgagattgcgccactgcactccagcctgggtgacaaagccacacagcactttgggaggctgagacaggcagattacaaggtcaggagattgggaccatcctggctaacatggtgaaaccccatctctactaaaaacacaaaaaattagccgggcatggtggtgggcgcctgtagtcccagctactcgggaggctaaagcaggagaatggcgtgaacccaggaggcggagcttacagttagccgagatagcaccactgcactccagcctgggtgacagagactacgtctcaaaaaaaaaagttaatttatatgaagttttgttttgccttttttctaggacatcctgacatctataaatggcaatatatattgataatatccgagcataaagagggaagcactgcccctatcacttttctcccccaccactcccccttttttttagtggaattagtatttcatggaacaattcagtcaaaacaccagtttggaaaagtttaaaaaaagtatctgttcagatttttttaattacctaggagaaataaactcttttctt

SEQ ID NO: 390657 - DNA, 420 bp, Homo sapiens
taaagcattgatcctctaagaatttgttttgtgtagctcaaatatttctcatctgcttttaaaaaaaagttgattttacaaaatttgctgggagtggtaggggcggctcatgcctgtaatcttagcacttttggaggccgaggcaggaggattgcttgagcccaggagttcaaaaccagcctgggcgatagtgagaccctgtctcttagaaactacatatatattttacaaatttatttttctttgaggcagagtctcgttctgtcacccaggctggagtccagtagcatgatctcgacttgttgcaacctctgcctctgtggttcgaggtatttcggggtgcctcagccacttaagtagctaggattacaggtgtgtttcacttcacttagcaaatttttgtatttttggtagtttcac

SEQ ID NO: 390658 - DNA, 227 bp, Homo sapiens
ttacctgatagtggtctctcaaggcagatggacctggggtgggcacatccctcttggctctgcatattcctcttcactccacggcaaaggttgtggccagaggaggaccacagtggggcccagggcagatgcctctctcaggtcaaagggcagtaccatgcccatgccacaccccggttatactgaattatttttaattcactaaatacaccatgctctttgccaat

SEQ ID NO: 390659 - DNA, 690 bp, Homo sapiens
tttgtaaatgggtgcttcttcccccctgcttccttgtattttctgatttgtttttgcaagtatgcagaaaagttttttattctaattgttttataatttcacctttttattcttaactacttaatactggaattcagggatatttgtattgtagggcagttttctaaatatgggactttatcttacttgaaatggatctttttcaaaatcaccatgtagcaataaaaatgggtaatataaatatggaaaaagtgaagcaacattatgaatggatataatctagagagaaaggggagtttttttaggaactgaagactgttcaaatctcattgttactcattgagatctgccttgactatgctgtttaaaattgcaaacattcacttctactacttgattgttttgccctgctctcctttttccccataaaccttgttattatctaacatataatttactcccccagccctattatctgttcccactagaattgaagctccttaggttgggattttcacaacagtttcctgggacataccaggtgctctataaatattagttaaatgaataaaatttctagtaaaatcaagtatttaagtgggagtttctggaaaaaaaagacctaattgtctgagagagggattctactagagaatttaaaaattagcccaaacgaggccctttcttccc

SEQ ID NO: 390660 - DNA, 1028 bp, Homo sapiens
aggcagatcgcttgagcccaggagttcgagaccagcctgggcaacatggtgaaattctgtctctacaaaaaaatacaaaaattagtcaggcgtggtggcatgcacctgtggtcccaactactccggaggctgaggtgggaggattgtttgagcccaggagcctgaggctgcagtgagccatgattgtgccacttgcactcaagcctgggtgacagagtgagactgtctcaagaaaacaaaaacaacaaaaacccaaacaattatgtttgccactttgcttttctgtaaaagttttggtatctgctttgcctttgctttcatggtgctcctttggataagaacttccatttctactaatagtgattgctaactacagactacaaatgatacagtgggaatagcttacagggcctggaagaagcagcaggtgatggggagcctacagcaatgagccttggtctgacccccacccccacctcatcccaaccacccaccacagtcattctctggtggccagaaagttgaatttgtaaacctgacatccagatgtagtttggagaagcagatttaaggagccctagtgtgctaggtgttatgggggatcacagagagagagaggtggaactggttatgcccttgaggaatttccattctagatgtgaagacaagattttcatgcatatacacataagtgccaagagtaggaggtagttacatttttcttatcaccagtgtaatacaagattattaaaaataaatgcaaggccaggcacagtggctcacacctgtaatccagcacttgggagcctgaggcaggcggatcacgaggtcaggagttcgagacaagcctggccaacatggtcaaaccctgtctctactaaaaataaaaaaatcagctgggcatggtggcaggtgcctgtaatctcagctacttggtaggctgtggcaggagaatcatttgaacccaggagacagaggttgcattgagctgagatcatgccattgtactccagcctgggtgacagggc

SEQ ID NO: 390661 - DNA, 314 bp, Homo sapiens
aagttgattcagttttaaatggcatgattttctcaagccttggaaaaataattgatggattttcttcttttttcatagctcaagtatacaaactgcaaagtcatgtctaactgtttaattttacaagactggaaaatattgaatttaaagcttaggctttagtttaggtttattcctggtgttcaacactgtctaaactttcacaggcaaatcggaaatgaaacacaattgaaagtaaaccatgctttttctgcctgaaaggggccttaatatttcattttatgttttcaaatggaatctaatgagaacgtgat

SEQ ID NO: 390662 - DNA, 530 bp, Homo sapiens
tggtacactagatgtaagaaaataacaacaaaattagggcccacatctccctgacttgccttttttagtattaagagttatgtttcaaggaaaaagtcacttcactcttctgatctccattttattattaatagaagaaaatcgctgcatagagtgacctgaaagcctccttctagctttaacaatctaacggtataaccagctcttttagtcatgaagtgtgtacgaatgagattctaccacttttctaaatgatatcactctgccaagcaactgggtcttcatacactttgtaatcaataaatgttttatgttgcccctttagtatctatagctattccccaaagttatgttacatgttccccttaaagaggatgaatcattctggcccttcaggatctgatattcttcttctctgtcaaatacaattatttgtaattagaagcctggctccaaaaacagaaacttagatgaagaaaaaataaatgttaccagcatagatttctacatccataagtccctgtacaaaa

SEQ ID NO: 390663 - DNA, 560 bp, Homo sapiens
ttttttttttttttttgcagagatgaggtcttactatgttaaccagcctggagtcttgcactcctggcctcaagcaatccttctgtttcggctttccaaagtgctgggattacaggtgtgagttgctgcacccagcctctggtacctctttttataagccaacccaagcgacagggtttttccctgttgtccaggctggagtgcaatggtgtgatcctagctcaatgtggcctcacactgctgtgctcaagtgatcctctagctccaccttccctagtagctaggaggtccttcatgtccataatgtggaagttacccattccagtatatagattatgtgctgagaatttggaggctgcttccatcaagaatatcatattatgccaggcgcagtggctcacgcctgtaatctcagccctttgggaggccaaggctggtggatcacctgaggtcaagagttcaagaccagcctggccaacgtggtgaaacccagtctctattaaaaatacaaaaactagccaggcatggtggcacacgcctgtaatcccagctacttggga

SEQ ID NO: 390664 - DNA, 307 bp, Homo sapiens
ctcagctgggtggttcttctgctctgcatggtgaagctgaagtcacatctgcagcttcattcaactgggagcttagcttgggctgtgccactgaagatggcctgtcatcctctagggcctctctccacttggcatccattattcagtaatgtatgctgaagctcgacatcatggaagctggttttcaggaaggagcttttcaagaggacaagtggatatcaagtctctgcttgcatcatgctttctttttttgagacattgtgttgctctatggcccaggctggagtgtagtggtgctactatctct

SEQ ID NO: 390665 - DNA, 639 bp, Homo sapiens
gaccatattgcatttgttatttatgtttttgcttatctcagcacctttatggaaatgtgtttcttgttgtctgtcttcaccagggagaagccaaggctgagtgactcatcagaggatcacggttccttccgagttttctagagcctgcagtatgggcaagagttgagggtcagtggggaacagacaatgtttttgtccccgagaaacttatatgtggatggaggagctttctgtctaagaactccatgcccctcaggtttagcacctgaccacttaaccctttgtttctttcccatggttaagggaaacaatgagttaatttcctctctgcaaatgactggtctttgtggaggacagaggaaagaggaatggagccagtgattgaagtttgttcattcattgatgtgtgtaagttacagtcagctgttggctagatagcctcagtgaaacccacttcatgtgcctagagagtcccctcctgttgaaggtacacagggcttgtgcaccactttaagagtgtggtagaagtgatgatactgtgattccagctaagcaatttgagccagcacccagctgtctgagccattctagctgggaccccagatggttccccccaacagatagctcagggagctgaga

SEQ ID NO: 390666 - DNA, 1585 bp, Homo sapiens
tgagcgacaacgagatccagcggttgcctcccgaggtggccaacttcatgcagctggtggagctggacgtgtcccggaacgatatccctgagatcccggagagcatcaagttctgcaaggctctggagatcgcggacttcagcgggaaccccctctccaggctccctgatggcttcactcagctgcgcagcctggctcacctggccctgaatgatgtgtctctgcaggcactgcccggggacgtgggcaacctcgccaacctggtgaccctggagctccgggagaacctgctcaagtccctgccagcgtccctgtcatttctggtcaagctggaacagctggatctgggaggcaacgatctggaagtgctgccagacactctgggggctctgcccaatcttcgggagctgtggcttgaccggaaccagctgtcagcactgcccccggagctcgggaacctgcggcgcctggtgtgcctggacgtgtcggaaaaccggctggaggagctgcctgctgagctcggcgggctggtgctgctcactgacctgctgctgtcccagaacctgctgcggaggctgcccgacggcatcggtcagctgaagcagctatccatcctaaaggtagaccagaatcggctgtgcgaggtgactgaggccatcggggactgtgagaacctctctgagctgatcctcacggagaacctgctgatggccctgccccgctccctgggaaagctgactaagctgaccaacctcaacgtggaccggaaccacctcgaggcgctgccgcccgagatcgggggctgtgtggcactcagcgtcctctccttgagggacaaccgcctggccgtcctgccaccagagctggcccacacgacagagctgcacgtgctggacgtggcggggaaccgcctgcagagtctgccgttcgcgctcacccacctcaatctcaaggccctgtggctggcagagaaccaggcgcagcccatgctccggttccagacggaggatgatgcccggaccggcgagaaggtgctcacctgctacttgctgccccagcagcccccactcagcctcgaggatgctgggcagcaggggagcctctcggagacctggagcgatgccccgccgagccgcgtcagcgtcatccagttcctggaggcccccataggtgatgaggacgctgaggaagctgcagctgagaagcggggcctacagcgccgggccacacctcaccccagcgagctcaaggtgatgaagaggagcatcgaggggcggcggagcgaggcctgcccttgccagccagactctgggtcgcccttgcctgcagaggaggagaagcggctgagtgccgagtctggcctgagtgaagactctcgcccatctccagcaccacccttgccccaagtcttttaacctgggtgttagcattttaaagagaccccacaggagttctggcctgtgactaactaactgccccaccccagccgagacctcggcgagactgtaactagtgatgtttgtacaaccaaagactctattttgtggtttaaggagaataaagttgactacattttaaaaaaaaa

SEQ ID NO: 390667 - DNA, 3804 bp, Homo sapiens
  misc_feature (2360)..(2360): n is a, c, g, or t
tgagcgacaacgagatccagcggttgcctcccgaggtggccaacttcatgcagctggtggagctggacgtgtcccggaacgatatccctgagatcccggagagcatcaagttctgcaaggctctggagatcgcggacttcagcgggaaccccctctccaggctccctgatggcttcactcagctgcgcagcctggctcacctggccctgaatgatgtgtctctgcaggcactgcccggggacgtgggcaacctcgccaacctggtgaccctggagctccgggagaacctgctcaagtccctgccagcgtccctgtcatttctggtcaagctggaacagctggatctgggaggcaacgatctggaagtgctgccagacactctgggggctctgcccaatcttcgggagctgtggcttgaccggaaccagctgtcagcactgcccccggagctcgggaacctgcggcgcctggtgtgcctggacgtgtcggaaaaccggctggaggagctgcctgctgagctcggcgggctggtgctgctcactgacctgctgctgtcccagaacctgctgcggaggctgcccgacggcatcggtcagctgaagcagctatccatcctaaaggtagaccagaatcggctgtgcgaggtgactgaggccatcggggactgtgagaacctctctgagctgatcctcacggagaacctgctgatggccctgccccgctccctgggaaagctgactaagctgaccaacctcaacgtggaccggaaccacctcgaggcgctgccgcccgagatcgggggctgtgtggcactcagcgtcctctccttgagggacaaccgcctggccgtcctgccaccagagctggcccacacgacagagctgcacgtgctggacgtggcggggaaccgcctgcagagtctgccgttcgcgctcacccacctcaatctcaaggccctgtggctggcagagaaccaggcgcagcccatgctccggttccagacggaggatgatgcccggaccggcgagaaggtgctcacctgctacttgctgccccagcagcccccactcagcctcgaggatgctgggcagcaggggagcctctcggagacctggagcgatgccccgccgagccgcgtcagcgtcatccagttcctggaggcccccataggtgatgaggacgctgaggaagctgcagctgagaagcggggcctacagcgccgggccacacctcaccccagcgagctcaaggtgatgaagaggagcatcgaggggcggcggagcgaggcctgcccttgccagccagactctgggtcgcccttgcctgcagaggaggagaagcggctgagtgccgagtctggcctgagtgaagactctcgcccatctgccagcacagtctctgaggctgagcccgagggcccgtcggctgaggcacagggtgggagccagcaggaagccacgactgctggcggggaggaagacgccgaagaggactaccaggagcccacggtgcatttcgcagaggacgcactgctgcccggggatgacagggagatcgaggaggggcagcctgaggccccctggaccctgccaggcgggaggcagcggctcatccgcaaggacacacctcactacaaaaagcacttcaagatctccaagctgccccagcccgaggccgttgtggctctgctgcagggcatgcagcctgatggggagggccctgtggctcccgggggctggcacaatggcccccacgcaccctgggctcctcgggcccagaaggaggaggaggaggaggaagagggtagtcctcaggaggaggaggaagaggaggaggaggaaaacagggctgaagaggaagaggccagcactgaggaggaggacaaggagggggccgtggtttctgcgccctctgtcaagggagtttcgtttgaccaggccaataacctgctgatagagcctgctcgcattgaggaggaagagctgaccctcaccatcctgcggcagactgggggcctgggcatcagcattgcgggcggcaagggctccacaccctataagggggacgacgagggcatattcatctctcgggtgtccgaggaaggccctgcggcccgggctggagtccgtgtgggtgacaagctcctggaggtgaatggtgtggctctgcagggcgccgagcaccacgaggccgtggaggcgctccggggggccggcactgccgtgcagatgcgagtgtggcgggagcgcatggtggagcctgagaacgcggtcaccatcacgccgctgcggcccgaggatgattacagcccccgagagcggcggggaggggggctgcgcctgcccctgctcccgcctganagccccgggcccctccgtcagcgccacgtggcctgcctggcacgcagcgagagggggctgggcttcagcattgctggtgggaaaggctccacaccctacagggctggtgatgcgggcatcttcgtctcccgcattgccgagggcggtgctgctcaccgcgcgggcacactgcaggttggcgaccgcgtcctctctattaatggagtggacgtgactgaggccaggcatgaccacgccgtctccctgctgaccgctgcctcccccaccatcgccctgctgttggagcgggaggctgggggccctcttcctcccagccctctgccacattcctcaccccccaccgctgctgttgccaccaccagcataaccactgccacccccggggtgcctgggttgccgagcctggcccccagcctgctggctgccgcgttggaagggccatacccagtggaggagatccgtctgccaagagctgggggccctctggggcttagtattgtcggaggctccgaccattccagccacccgtttggtgtccaggagcctggtgtgttcatctccaaggtgctcccgcggggcctggccgctcgcagcggcctgcgggttggggaccgcatcctggcagtgaacgggcaagacgtgcgggatgccacgcaccaagaagcagtcagtgccctgctccggccctgcctggagctgtcgctgctggtgcggagggacccggcacccccgggcctacgggaactgtgcatccagaaggcacctggggagaggctgggcatcagcatccgcgggggtgccaggggccacgctggcaacccccgcgaccccacagacgagggcatcttcatctccaaggtgagccccacgggggcagccgggcgcgacggtcggctgcgtgtgggtttgcggctgttggaggtgaaccagcagagcctgctgggcctgacgcacggcgaggcggtgcagctgctccgcagtgtgggcgacaccctcaccgtgctggtctgtgacggcttcgaggccagcaccgacgcagccctggaggtgtccccaggtgtcattgccaacccctttgcggcaggcatcggccaccggaacagcctggagagcatctcttccatcgaccgggagctgagccctgagggcccaggcaaggagaaggagctgccgtggcctgggccctgtgccctcctagaggagcaggcacctcccccagacttggggtgggggccctgccagctccagcaccacccttgccccaagtcttttaacctgggtgttagcattttaaagagaccccacaggagttctggcctgtgactaactaactgccccaccccagccgagacctcggcgagactgtaactagtgatgtttgtacaaccaaagactctattttgtggtttaaggagaataaagttgactacattttaaaaaaaaa

SEQ ID NO: 390668 - DNA, 4943 bp, Homo sapiens
  misc_feature (2360)..(2360): n is a, c, g, or t
tgagcgacaacgagatccagcggttgcctcccgaggtggccaacttcatgcagctggtggagctggacgtgtcccggaacgatatccctgagatcccggagagcatcaagttctgcaaggctctggagatcgcggacttcagcgggaaccccctctccaggctccctgatggcttcactcagctgcgcagcctggctcacctggccctgaatgatgtgtctctgcaggcactgcccggggacgtgggcaacctcgccaacctggtgaccctggagctccgggagaacctgctcaagtccctgccagcgtccctgtcatttctggtcaagctggaacagctggatctgggaggcaacgatctggaagtgctgccagacactctgggggctctgcccaatcttcgggagctgtggcttgaccggaaccagctgtcagcactgcccccggagctcgggaacctgcggcgcctggtgtgcctggacgtgtcggaaaaccggctggaggagctgcctgctgagctcggcgggctggtgctgctcactgacctgctgctgtcccagaacctgctgcggaggctgcccgacggcatcggtcagctgaagcagctatccatcctaaaggtagaccagaatcggctgtgcgaggtgactgaggccatcggggactgtgagaacctctctgagctgatcctcacggagaacctgctgatggccctgccccgctccctgggaaagctgactaagctgaccaacctcaacgtggaccggaaccacctcgaggcgctgccgcccgagatcgggggctgtgtggcactcagcgtcctctccttgagggacaaccgcctggccgtcctgccaccagagctggcccacacgacagagctgcacgtgctggacgtggcggggaaccgcctgcagagtctgccgttcgcgctcacccacctcaatctcaaggccctgtggctggcagagaaccaggcgcagcccatgctccggttccagacggaggatgatgcccggaccggcgagaaggtgctcacctgctacttgctgccccagcagcccccactcagcctcgaggatgctgggcagcaggggagcctctcggagacctggagcgatgccccgccgagccgcgtcagcgtcatccagttcctggaggcccccataggtgatgaggacgctgaggaagctgcagctgagaagcggggcctacagcgccgggccacacctcaccccagcgagctcaaggtgatgaagaggagcatcgaggggcggcggagcgaggcctgcccttgccagccagactctgggtcgcccttgcctgcagaggaggagaagcggctgagtgccgagtctggcctgagtgaagactctcgcccatctgccagcacagtctctgaggctgagcccgagggcccgtcggctgaggcacagggtgggagccagcaggaagccacgactgctggcggggaggaagacgccgaagaggactaccaggagcccacggtgcatttcgcagaggacgcactgctgcccggggatgacagggagatcgaggaggggcagcctgaggccccctggaccctgccaggcgggaggcagcggctcatccgcaaggacacacctcactacaaaaagcacttcaagatctccaagctgccccagcccgaggccgttgtggctctgctgcagggcatgcagcctgatggggagggccctgtggctcccgggggctggcacaatggcccccacgcaccctgggctcctcgggcccagaaggaggaggaggaggaggaagagggtagtcctcaggaggaggaggaagaggaggaggaggaaaacagggctgaagaggaagaggccagcactgaggaggaggacaaggagggggccgtggtttctgcgccctctgtcaagggagtttcgtttgaccaggccaataacctgctgatagagcctgctcgcattgaggaggaagagctgaccctcaccatcctgcggcagactgggggcctgggcatcagcattgcgggcggcaagggctccacaccctataagggggacgacgagggcatattcatctctcgggtgtccgaggaaggccctgcggcccgggctggagtccgtgtgggtgacaagctcctggaggtgaatggtgtggctctgcagggcgccgagcaccacgaggccgtggaggcgctccggggggccggcactgccgtgcagatgcgagtgtggcgggagcgcatggtggagcctgagaacgcggtcaccatcacgccgctgcggcccgaggatgattacagcccccgagagcggcggggaggggggctgcgcctgcccctgctcccgcctganagccccgggcccctccgtcagcgccacgtggcctgcctggcacgcagcgagagggggctgggcttcagcattgctggtgggaaaggctccacaccctacagggctggtgatgcgggcatcttcgtctcccgcattgccgagggcggtgctgctcaccgcgcgggcacactgcaggttggcgaccgcgtcctctctattaatggagtggacgtgactgaggccaggcatgaccacgccgtctccctgctgaccgctgcctcccccaccatcgccctgctgttggagcgggaggctgggggccctcttcctcccagccctctgccacattcctcaccccccaccgctgctgttgccaccaccagcataaccactgccacccccggggtgcctgggttgccgagcctggcccccagcctgctggctgccgcgttggaagggccatacccagtggaggagatccgtctgccaagagctgggggccctctggggcttagtattgtcggaggctccgaccattccagccacccgtttggtgtccaggagcctggtgtgttcatctccaaggtgctcccgcggggcctggccgctcgcagcggcctgcgggttggggaccgcatcctggcagtgaacgggcaagacgtgcgggatgccacgcaccaagaagcagtcagtgccctgctccggccctgcctggagctgtcgctgctggtgcggagggacccggcacccccgggcctacgggaactgtgcatccagaaggcacctggggagaggctgggcatcagcatccgcgggggtgccaggggccacgctggcaacccccgcgaccccacagacgagggcatcttcatctccaaggtgagccccacgggggcagccgggcgcgacggtcggctgcgtgtgggtttgcggctgttggaggtgaaccagcagagcctgctgggcctgacgcacggcgaggcggtgcagctgctccgcagtgtgggcgacaccctcaccgtgctggtctgtgacggcttcgaggccagcaccgacgcagccctggaggtgtccccaggtgtcattgccaacccctttgcggcaggcatcggccaccggaacagcctggagagcatctcttccatcgaccgggagctgagccctgagggcccaggcaaggagaaggagctgcctggacagaccctgcactgggggcccgaggccacagaagccgcaggtcggggtctgcagcccctgaagctggactaccgcgccctggccgccgtgcccagcgctggcagcgtgcagagggtaccgtctggagcagctggagggaagatggctgaatctccctgctcccctagtggccagcagccgccctccccgccttctccggatgagctgcccgccaatgtgaagcaggcctacagggccttcgcggccgtgcccacttctcacccgcctgaggatgcccctgcccagccccccacgcctgggcctgcagcctccccggagcagctgtccttccgggagcggcagaagtactttgagctggaggtgcgcgtgccccaggccgagggcccccctaagcgcgtgtccctggtgggtgctgacgacctgcggaagatgcaggaggaggaagccagaaaactacagcagaagagagcgcagatgctgcgggaggcggcagaggctggggccgaagcgaggctcgccctggacggggagacgctgggcgaggaggaacaggaggatgagcagccaccctgggccagcccgagccccacctcaaggcagagcccggcgtcccccccgcccctgggaggtggcgccccggtgcggacggccaaagctgaacggcgccaccaggagcggctgcgcgtgcagagtccggagccaccggcacccgagcgtgccctgtcccctgccgagctccgggccctggaggccgagaagcgtgcgctgtggagggcagccaggatgaagtcattggaacaggacgctctccgagcacagatggtcctcagcaggtcccaggaaggccggggcacgcgggggcccctggagcgactggccgaggccccttcccctgcgcccaccccgtcgcccacccctgtggaagacctcggcccccagaccagcacctccccgggacgcctgtcaccggactttgctgaggagttgaggtccctggaaccatctcccagccctggcccgcaggaggaggatggagaagtggctctggtgcttctgggcaggccctcacccggcgctgtgggccctgaagatgtggcactgtgcagcagccgccgccccgtaaggcctgggcgccgtggcctgggccctgtgccctcctagaggagcaggcacctcccccagacttggggtgggggccctgccagctccagcaccacccttgccccaagtcttttaacctgggtgttagcattttaaagagaccccacaggagttctggcctgtgactaactaactgccccaccccagccgagacctcggcgagactgtaactagtgatgtttgtacaaccaaagactctattttgtggtttaaggagaataaagttgactacattttaaaaaaaaa

SEQ ID NO: 390669 - DNA, 5018 bp, Homo sapiens
  misc_feature (2360)..(2360): n is a, c, g, or t
tgagcgacaacgagatccagcggttgcctcccgaggtggccaacttcatgcagctggtggagctggacgtgtcccggaacgatatccctgagatcccggagagcatcaagttctgcaaggctctggagatcgcggacttcagcgggaaccccctctccaggctccctgatggcttcactcagctgcgcagcctggctcacctggccctgaatgatgtgtctctgcaggcactgcccggggacgtgggcaacctcgccaacctggtgaccctggagctccgggagaacctgctcaagtccctgccagcgtccctgtcatttctggtcaagctggaacagctggatctgggaggcaacgatctggaagtgctgccagacactctgggggctctgcccaatcttcgggagctgtggcttgaccggaaccagctgtcagcactgcccccggagctcgggaacctgcggcgcctggtgtgcctggacgtgtcggaaaaccggctggaggagctgcctgctgagctcggcgggctggtgctgctcactgacctgctgctgtcccagaacctgctgcggaggctgcccgacggcatcggtcagctgaagcagctatccatcctaaaggtagaccagaatcggctgtgcgaggtgactgaggccatcggggactgtgagaacctctctgagctgatcctcacggagaacctgctgatggccctgccccgctccctgggaaagctgactaagctgaccaacctcaacgtggaccggaaccacctcgaggcgctgccgcccgagatcgggggctgtgtggcactcagcgtcctctccttgagggacaaccgcctggccgtcctgccaccagagctggcccacacgacagagctgcacgtgctggacgtggcggggaaccgcctgcagagtctgccgttcgcgctcacccacctcaatctcaaggccctgtggctggcagagaaccaggcgcagcccatgctccggttccagacggaggatgatgcccggaccggcgagaaggtgctcacctgctacttgctgccccagcagcccccactcagcctcgaggatgctgggcagcaggggagcctctcggagacctggagcgatgccccgccgagccgcgtcagcgtcatccagttcctggaggcccccataggtgatgaggacgctgaggaagctgcagctgagaagcggggcctacagcgccgggccacacctcaccccagcgagctcaaggtgatgaagaggagcatcgaggggcggcggagcgaggcctgcccttgccagccagactctgggtcgcccttgcctgcagaggaggagaagcggctgagtgccgagtctggcctgagtgaagactctcgcccatctgccagcacagtctctgaggctgagcccgagggcccgtcggctgaggcacagggtgggagccagcaggaagccacgactgctggcggggaggaagacgccgaagaggactaccaggagcccacggtgcatttcgcagaggacgcactgctgcccggggatgacagggagatcgaggaggggcagcctgaggccccctggaccctgccaggcgggaggcagcggctcatccgcaaggacacacctcactacaaaaagcacttcaagatctccaagctgccccagcccgaggccgttgtggctctgctgcagggcatgcagcctgatggggagggccctgtggctcccgggggctggcacaatggcccccacgcaccctgggctcctcgggcccagaaggaggaggaggaggaggaagagggtagtcctcaggaggaggaggaagaggaggaggaggaaaacagggctgaagaggaagaggccagcactgaggaggaggacaaggagggggccgtggtttctgcgccctctgtcaagggagtttcgtttgaccaggccaataacctgctgatagagcctgctcgcattgaggaggaagagctgaccctcaccatcctgcggcagactgggggcctgggcatcagcattgcgggcggcaagggctccacaccctataagggggacgacgagggcatattcatctctcgggtgtccgaggaaggccctgcggcccgggctggagtccgtgtgggtgacaagctcctggaggtgaatggtgtggctctgcagggcgccgagcaccacgaggccgtggaggcgctccggggggccggcactgccgtgcagatgcgagtgtggcgggagcgcatggtggagcctgagaacgcggtcaccatcacgccgctgcggcccgaggatgattacagcccccgagagcggcggggaggggggctgcgcctgcccctgctcccgcctganagccccgggcccctccgtcagcgccacgtggcctgcctggcacgcagcgagagggggctgggcttcagcattgctggtgggaaaggctccacaccctacagggctggtgatgcgggcatcttcgtctcccgcattgccgagggcggtgctgctcaccgcgcgggcacactgcaggttggcgaccgcgtcctctctattaatggagtggacgtgactgaggccaggcatgaccacgccgtctccctgctgaccgctgcctcccccaccatcgccctgctgttggagcgggaggctgggggccctcttcctcccagccctctgccacattcctcaccccccaccgctgctgttgccaccaccagcataaccactgccacccccggggtgcctgggttgccgagcctggcccccagcctgctggctgccgcgttggaagggccatacccagtggaggagatccgtctgccaagagctgggggccctctggggcttagtattgtcggaggctccgaccattccagccacccgtttggtgtccaggagcctggtgtgttcatctccaaggtgctcccgcggggcctggccgctcgcagcggcctgcgggttggggaccgcatcctggcagtgaacgggcaagacgtgcgggatgccacgcaccaagaagcagtcagtgccctgctccggccctgcctggagctgtcgctgctggtgcggagggacccggcacccccgggcctacgggaactgtgcatccagaaggcacctggggagaggctgggcatcagcatccgcgggggtgccaggggccacgctggcaacccccgcgaccccacagacgagggcatcttcatctccaaggtgagccccacgggggcagccgggcgcgacggtcggctgcgtgtgggtttgcggctgttggaggtgaaccagcagagcctgctgggcctgacgcacggcgaggcggtgcagctgctccgcagtgtgggcgacaccctcaccgtgctggtctgtgacggcttcgaggccagcaccgacgcagccctggaggtgtccccaggtgtcattgccaacccctttgcggcaggcatcggccaccggaacagcctggagagcatctcttccatcgaccgggagctgagccctgagggcccaggcaaggagaaggagctgcctggacagaccctgcactgggggcccgaggccacagaagccgcaggtcggggtctgcagcccctgaagctggactaccgcgccctggccgccgtgcccagcgctggcagcgtgcagagggtaccgtctggagcagctggagggaagatggctgaatctccctgctcccctagtggccagcagccgccctccccgccttctccggatgagctgcccgccaatgtgaagcaggcctacagggccttcgcggccgtgcccacttctcacccgcctgaggatgcccctgcccagccccccacgcctgggcctgcagcctccccggagcagctgtccttccgggagcggcagaagtactttgagctggaggtgcgcgtgccccaggccgagggcccccctaagcgcgtgtccctggtgggtgctgacgacctgcggaagatgcaggaggaggaagccagaaaactacagcagaagagagcgcagatgctgcgggaggcggcagaggctggggccgaagcgaggctcgccctggacggggagacgctgggcgaggaggaacaggaggatgagcagccaccctgggccagcccgagccccacctcaaggcagagcccggcgtcccccccgcccctgggaggtggcgccccggtgcggacggccaaagctgaacggcgccaccaggagcggctgcgcgtgcagagtccggagccaccggcacccgagcgtgccctgtcccctgccgagctccgggccctggaggccgagaagcgtgcgctgtggagggcagccaggatgaagtcattggaacaggacgctctccgagcacagatggtcctcagcaggtcccaggaaggccggggcacgcgggggcccctggagcgactggccgaggccccttcccctgcgcccaccccgtcgcccacccctgtggaagacctcggcccccagaccagcacctccccgggacgcctgcccttgtctggaaagaagtttgactacagggcctttgcggccctgccttcttccagacctgtctatgacatccagtcaccggactttgctgaggagttgaggtccctggaaccatctcccagccctggcccgcaggaggaggatggagaagtggctctggtgcttctgggcaggccctcacccggcgctgtgggccctgaagatgtggcactgtgcagcagccgccgccccgtaaggcctgggcgccgtggcctgggccctgtgccctcctagaggagcaggcacctcccccagacttggggtgggggccctgccagctccagcaccacccttgccccaagtcttttaacctgggtgttagcattttaaagagaccccacaggagttctggcctgtgactaactaactgccccaccccagccgagacctcggcgagactgtaactagtgatgtttgtacaaccaaagactctattttgtggtttaaggagaataaagttgactacattttaaaaaaaaa

SEQ ID NO: 390670 - DNA, 351 bp, Homo sapiens
caggaagttacaagggttttaggagctctgtgccagaaactggggataaagaccaaatatatgtttcctattatatcacaatatcacagcaccagtgtgaaaaatagaatgtcatagtggaaaagtcatgaattttggagtcaaacagaggcaggttagaatcctaacatttacgggctgtttgaccttgagctacttatatgaccttctgagccttcttttcctcgtctataaaataaggatggcaattcctgctttgcagagttcctgtgaagaacacagaaaaaggttgtatcgttttctggcacatggtaagggaataaagaaaggattgtcaataaattgtggcta

SEQ ID NO: 390671 - DNA, 271 bp, Homo sapiens
ttcatgcatatcaaagaaaatggggtctttgtcttctgaaaaccactctctgacaggttccatgaaaatacccatggctgtttcaaaaaagaatttcataaattttattttgaggattaagtatagtttttgcattcttgctcttatgacatatttacatgtttcactatgcatctaatgactgagaacttttcttatacattctaattcgcagtgtttctactggaaatgacttttgaaatccatttacctccatcttcattcatttact

SEQ ID NO: 390672 - DNA, 117 bp, Homo sapiens
gctctgaatatgaattaactgacgtgagtaaagtgctttgagcagggcttgatgagtgatgtgtactaggacccttttccctcatcgcttgtcgctgctgctgatggcaatggccac

SEQ ID NO: 390673 - DNA, 397 bp, Homo sapiens
gctcctcctgcctctggctctcagtgggctgctgggctcccccctggctccccgctggcctccctgagcacacccatggccctcttgtggcacaatcaggaaccctctcactccagccaaagcccaactcctgtctcgcttgcttggttactgacttcataaggcagtggggctggcccaccctcagcttcttcccctgggcctcagtgacctctgtcatttaggctggaggagaagggcacaaagggggatgctggagaggagaggagagatgaagccccgtgtgtttcctctaggaggaattgagcttgcataatgtgacctccttgtgcaagcccacagtcaccagacgaattggtggcaaagctaggtctcccaattcccaggcccatgtgtc

SEQ ID NO: 390674 - DNA, 407 bp, Homo sapiens
agactccattccccccaccgcccccccaaaaagaagaagttggggaatgaaacattaatgatcgagtgagtgaactgagtctgggtttctccttctcaatcccttttcagctggccagtccacctgtattatatgctttgtatgcgttaaatcctgctggaaggccagactttctaaatccacagagaatatcagaaaatgttttgaactcaacagtaacaaaaacaacccgcatcaaaatttatggggtaggccttcgtgacaaagactcttagaaaagcacaagttggagaggatttcattaattcagtaaagagtatcacacagaacatctagcacacaccacgcttactgatggattaccaaagcgcccgtcacagcctgaaggagacaaggtgcctactgtc

SEQ ID NO: 390675 - DNA, 386 bp, Homo sapiens
tttctcaataactcgttcttttaccctctttccttctttccccagcccaaattgggacagtttcctatgggtgagaatttggtttatctctgtccaagaattggtctcagcattccgataaaagctaccaaaccgagagacaagcagaaagatcacctccttttctctggagtcgttcttcctatgagtgcagtctgaggtctcatcaattttgggagcagccaaatcatatattactattcctatcaactaaagcccttgaatcttttaatatgacttaaaatttgcccaccctatacagttgggttttctaactcaaatgaagaatcttgattacaaaaaggagaaaagaccaaggtatttaaaaagaacttagtattatggag

SEQ ID NO: 390676 - DNA, 396 bp, Homo sapiens
tttgtgttgaagatatgaatgaatgaagtttccacacctttatgtggagacctgataagtaagcaacaataaggaagggtccccaggttggggagagccccaagttgagaacaataatgaacaatgattgtatgaacaattgttagaaacagctaatcacaaacaacctgcgggcacaatgacctcattccacacgtagcacccttcagcaggaccctataaaactttcctccagcccttgcctctttgcaggtagccccttctctgctgagctgcccactgcaacatattttcacaatttctctaataaatctgcccttctttacctacaactatcttggtaaatggctttaccacctgcaaaactgaccctagttgttgcaccacgatatggtt

SEQ ID NO: 390677 - DNA, 333 bp, Homo sapiens
cagcaccacagtagatgctgatgaaaagaaagttatgaatgtcatgtaaaatgacagtagtattagcaaatgtgcttttaattataagaaaattacaatatgtaaaaaaatttcaattttcccatattatctcttaataataactgccatttgttgagcccattgggtatgttacatatattaacacaacaggatggacattatctatcttatatatattatgtgtatatatacggaaaacaggacacaaattgtctgaggccatggacaattagcttgcagtaaagtaggattctaaattaggtttctctagctccaagacccatgccattt

SEQ ID NO: 390678 - DNA, 369 bp, Homo sapiens
gtgtggagccattattcctctcttcacatccaggtcatgtggagagctgccaccttccatataggtagataacctggcctcattgttcataggacaccagagcttccaggaatggggtggccaagggcctgggtcccagcacttcagtggccgttgataacagaggcaagctttcgactgaacccctttaggctccttcattcctgccagctcacccttacctctccagtagtaaagggcttgtgcctttgcctgctctgggtgagagtcccagagcacagtagcccatcaaactgtgttgcagctgtcactattccctggatacagaaagaaacaaaggccaaagttagggtgctaatggtttgggat

SEQ ID NO: 390679 - DNA, 665 bp, Homo sapiens
tgttagtattctgtaaggacatttgtgtttatatatatctgtcatatgtatatatatatcatatatatatcagtcatatatatatctcacacatatatgtaagtgattttatgctatgtatctttttttcttctgatatctttttctggtttcaatgttagtttaatgctagcttcatcaaataagttgggaagtggtcttttactcatattttgaaagaatttgtgtagaattactataaattgttaaggagaatttttgtagaatttgctagtgaatatatttatgttttgaattttcttttgtggaaggtttttactacaaattccacttacttagtagaattaagattattcaagttatctaattttttactgagtaattctggtctcattatgtctttcaagggaatttttttcattttttaatatcattttatagctttatattaaaagttctgaatatgagtggctctctgcctgctccctttcaccaccttaatatcttaagtgaataatgcattctcatcaagagggttaaaactaatcatcagctgatggcagttcactttttgaattacaaaaaactttccccctcaggccatttattttactcataagcaacctaactatattatagattctaaaatattatctccaaagccc

SEQ ID NO: 390680 - DNA, 168 bp, Homo sapiens
agagatcacatgactgtactccagcctgggcaacagactgagaccctgtctcaaacaaaacaaaacaaaacaaaacaaaacaaaacaaaacaaaacaaaacacaccaatggagaactagaagctggcattcacagggtattcttgtgactgtagccattgcactccgg

SEQ ID NO: 390681 - DNA, 369 bp, Homo sapiens
ggtgaggaggtagagggcaagtgaggggcgtgggcaggagaggagcagggtgaaaggcaggttgcagggggctggtggctgatggctgagctgggcagaggggccccaccccgtcccatgccaggctctggactcaggggagaccagtaggacttgaatggcagaaggccatgcatgaaggggactggcagggaggggaacctgccagccgttgggtaaggggctgggctggtgggctggctgggaggactgcggccagtggcaaggcaacaaagacgtgaaaagaaacaacggcatctgaatggaggaatcggcttctgctgacccctgggtgccccagccctgagcatcccagccagagcttcctgg

SEQ ID NO: 390682 - DNA, 239 bp, Homo sapiens
tgccactgcactcaagtctgggcgacagagtgaaactctgtctcaaaaacaaacaaataaagcttgatgctaaagctagaactcttgcttactgtgctgtactccaccgaagggagtctaagacttgacatgtacaaaccacgcctgaaagttagtgaatggggaaaatattgaagaaatatcgactatatcacagaaattgctatttctatactttaaaaccttgcaaatttttgatg

SEQ ID NO: 390683 - DNA, 521 bp, Homo sapiens
actgtggccgaacctagtgtgtaagggggatgtagtgggcagtggttggagaagtcaactgcctgcatgtgcaaacccttctctgtcagcccagaaggccagggctttgtccccatggccaagcagagtcaaggaagggttaagcaggggggtgacattttagacagactgagattgccacatagaccacgagctggaggtgataagtttagaggaagtgaatgtctttgggtgagcagtatggtggcctggactagggtagacatagtggaatatagagaagaagtggaattcaacacagcatggggggaggtgagggagaggaaggcaaccctggctttgttgttggggatataaatcccaggcccacagttgaatttagcaaacagttgctaactggtttgggctcacagagtggggagctgggggtccccacgttgtttcacaggtgaaaaattgaaggccagtagcaagtgagaagccctgacctgccatctaacctgctgacatcagtaaaaacc

SEQ ID NO: 390684 - DNA, 243 bp, Homo sapiens
tggtggctttgcctggacctgggctcctgagaggctgtcaggccctgcagtcccagagggatcagggtgagatccctagtgctgagctaagggccagaatgtaacactgaaacccacctgggacccgcagaccccctcccccgacagacacactcccctcagggtctgtacactcaaaaacacaagcaggagatcctcctgtcaaaataaacacaaaatgatacttccaaagccacaggcgga

SEQ ID NO: 390685 - DNA, 448 bp, Homo sapiens
gggagctgggggatggggtaccaggcccactgtgcagataggggaactgaggctcagagaggagaggaggcttgctgagctgagaatggaggaaggagtccaggggttctcagaaaatggacctaaaaaggcgtatcccggagggcctcgaatgccaagctaaggagttccttctttgccttgtcatgacgctccccaaagccaccatgtgccgctcctgtgctaagcattttgcttggacacgtgcccccgattcttcaactcaacctcgggccaggtggtattggtactggcagaacatttcagaccaggtgaccgagaactgggtacctctgccaaatcactctgctgagaagaggcagaggtaggatctgcaccctggtcccgacctgatgcctaagcctgaaaccctgttccacacggacgggggacccaagaggaagagagt

SEQ ID NO: 390686 - DNA, 470 bp, Homo sapiens
gggccactaatatcactaaggaaacctaaagccgggaactgcttagggcaaacctgcctcccattctattcaaagtcacccctctctgcccactgagatagacgcatatctgatttgcctcctttggaagggctaatcagaaactcaaaagaatgtaaccgtttgtgtatcacttgtctgtgacctggaagtcccttcccccgttccaatcttccgcctttgattcaagttgtctcacctttccagaccgaaccaatgtacttcttacataaattgattggtgtctcatgtctccctaaatggataaaagcaagctatgccccaaccacctcgggcacatgtcgccaggacctcctgaggctgtgtcacgggtgcatcctcaaccttggcaaaataaactttctaaattaactgagacctgtctcacattttctggtttcacagtagttgcacaataacattcaaataca

SEQ ID NO: 390687 - DNA, 123 bp, Homo sapiens
ggtatcttcaggatcaaatataatatcttggagagtgtaggtatgcatgattgattgttggctggctgaacaaatgaattgatattttatttatatttgtaacaacgtgagatagggaaggat

SEQ ID NO: 390688 - DNA, 284 bp, Homo sapiens
agagaaggcaaagccttctaggaagtgaagatccagaggcgtggttaatggaatggccagtagacagttcactatgacataatatgaagtgaaataaagagtatgtaggttggttgggggggttttaagctgatctttgtatatttgcaaattaaccaggcatggtggcatgtgcctgtagtcccatgtactttggaggctgaggcaagaggatcacttgaggccaggagttaaaggctgcagtaagctttgatcaaacctctatgctccaacctgggtgacag

SEQ ID NO: 390689 - DNA, 594 bp, Homo sapiens
tagcctgttaacgcagtattttagtttttagtttttacaaatgctagcaacttaagagatttcataattttcagatgggccatcaactgagaaagaccttgacgaaaagaagaaagaacctgcaattacatcgcagaacagccctgaggcaagagaagaaagtacttcacagtatagacatatatttatattgaaagtcatagttttacttcctgcatcaattcccctgtctaatgttcccctatttacactcctttttttgttttctaatcaaatggaagtagtaaatgtatgtagccatgtattctaatttatttttttttcagatttcttgaacatttgagaggtagaagacattgaataaataagaagttatttatattgtactcaacaagtttaattgaatgggattgctggggtaggcactgatggaattgataatggaggtagtgattagggattcaaatggttgcttcctctatttaccacatttttttttttagatttattttggcccttgatctcattctcctttgcatgctttttttcttccttttgaatttagcaatttgtggctaggcacagtggcccact

SEQ ID NO: 390690 - DNA, 2871 bp, Homo sapiens
agcggagggggccgaaaaccagccccgtgagggggcgggaccggaggtgaacgcgcagcaaaaccgggcgccttccacgaccctctagccggaagccacgcctgcccactagcccgacgcccgcctggcgggaacatgggctcgcccctcaccagcgatctgcagtcagttggtagcgcctgcacgtcgcgcgcggtgttcgattgtcgctgcctggggaggaggagccggagccgccgccgccgccgccgccgccgcgggcttcgttcgtaaggaagggggcctaggcccgggcctgcggtggtgggggttgctgcgcgccgggggtcgctcctgctgtgtcttccgctccagcttcgcccacttccccttgccagcggggtgggcgcggagaagacctgccggagccatggaggacgaagtggtccgctttgccaagaagatggacaagatggtgcagaagaagaacgcggctggagcattggatttgctaaaggagcttaagaatattcctatgaccctggaattactgcagtccacaagaatcggaatgtcagttaatgctattcgcaagcagagtacagatgaggaagttacatctttggcaaagtctctcatcaaatcctggaaaaaattattagatgggccatcaactgagaaagaccttgacgaaaagaagaaagaacctgcaattacatcgcagaacagccctgaggcaagagaagaaagtacttccagcggcaatgtaagcaacagaaaggatgagacaaatgctcgagatacttatgtttcatcctttcctcgggcaccaagcacttctgattctgtgcggttgaagtgtagggagatgcttgctgcagctcttcgaacaggggatgactacattgcaattggagctgatgaggaagaattaggatctcaaattgaagaagctatatatcaagaaataaggaatacagacatgaaatacaaaaatagagtacgaagtaggatatcaaatcttaaagatgcaaaaaatccaaatttaaggaaaaatgtcctctgtgggaatattcctcctgacttatttgctagaatgacagcagaggaaatggctagtgatgagctgaaagagatgcggaaaaacttgaccaaagaagccatcagagagcatcagatggccaagactggtgggacccagactgacttgttcacatgtggcaaatgtaaaaagaagaattgcacttacacacaggtacaaacccgtagtgctgatgaaccaatgacaacatttgttgtctgtaatgaatgtggaaatcgatggaagttctgttgagttggaagaattggcaaaatatctggaccattaagaaaacggattttgtaactagctttaaactaggccaagcaactagttttcctgcaaatcaaatttttaaagcaacttgggttagactttgtttttgacctaacatcccttccttaaatgccttctgtagtttcagatcagtagggagaccatataataattttatggtacctgtttcaaaacatattttttctgtttttataagtaagttgatattaattaaactcttggcaatatttcttctttcttaaaggaaaatataccttaactttttttcttttacactgtgaaacatacacagtagaaattctgttactctctgttattaatacataaatgaaaatacatttttttccatattggcatgtagctacaaatattaaaggaggagaaaaggtaatataattttaggtttaccaaatatggtgtgtattcaaataatacttgaccagcttatctaaaatgtacataattttgaggtagcttatgaatttgattttaattattatgttcacaagcttggaatattagatattattttgcatctgtaactaaccgtgatcatcatttcttgtaatttcttgtacatgtatattacttgttcttaatagatttttggaaacaagactttattgagatcagtttggttttcctgttaatttacctgtttgactttataatgtgttttagttttgcagaagaacactgttgtagtttagaaggcttttcataaatcccctcataggcaaagatgaaaacttcccactatttttttcccctcttaggaagacatactggaaagaaaatgtttagcatcttagtgtagtatagctattgtaaacagttcatgactagattttgattcggaaatctatactgaccaaggattaatcttaaggattgtataattcattaaagctgtggtctttccatgtggagactgatagaaaataattttgtcccaagtcttatttgctgactttttctgtcatgagtgagattgttgaacaaactgaatatatgggctatagcaagtagctttacagtacagatcttacaattaagttttgcttttgttaaagtgtgtaccattttttctgtttggagtaagacaaaaattgttttgacataggttccctagggtacacttgctctagcatactttaaaggccactgttgcaaagtctacattttatgctgaatctgcattctgtcaggcacccgtagaaagacctcagtacatgctttgcactctcctttgctccctttttccaatttcttattgcatatcattttgttgtaatacagaaagcagcatttttaaatgtccgtgttaagaattggcccactggtaccaactcacctctattttgtcagttcatagttgaagattttgttttatttcaaaaacaaagtacatttttgaaataatgtttcagaataaaataatctcacttttaagtgatccattttaaaatttgtaattcaataaagttttttttgttgttaaacataaaaaaaaa

SEQ ID NO: 390691 - DNA, 2808 bp, Homo sapiens
agcggagggggccgaaaaccagccccgtgagggggcgggaccggaggtgaacgcgcagcaaaaccgggcgccttccacgaccctctagccggaagccacgcctgcccactagcccgacgcccgcctggcgggaacatgggctcgcccctcaccagcgatctgcagtcagttggtagcgcctgcacgtcgcgcgcggtgttcgattgtcgctgcctggggaggaggagccggagccgccgccgccgccgccgccgccgcgggcttcgttcgtaaggaagggggcctaggcccgggcctgcggtggtgggggttgctgcgcgccgggggtcgctcctgctgtgtcttccgctccagcttcgcccacttccccttgccagcggggtgggcgcggagaagacctgccggagccatggaggacgaagtggtccgctttgccaagaagatggacaagatggtgcagaagaagaacgcgtccacaagaatcggaatgtcagttaatgctattcgcaagcagagtacagatgaggaagttacatctttggcaaagtctctcatcaaatcctggaaaaaattattagatgggccatcaactgagaaagaccttgacgaaaagaagaaagaacctgcaattacatcgcagaacagccctgaggcaagagaagaaagtacttccagcggcaatgtaagcaacagaaaggatgagacaaatgctcgagatacttatgtttcatcctttcctcgggcaccaagcacttctgattctgtgcggttgaagtgtagggagatgcttgctgcagctcttcgaacaggggatgactacattgcaattggagctgatgaggaagaattaggatctcaaattgaagaagctatatatcaagaaataaggaatacagacatgaaatacaaaaatagagtacgaagtaggatatcaaatcttaaagatgcaaaaaatccaaatttaaggaaaaatgtcctctgtgggaatattcctcctgacttatttgctagaatgacagcagaggaaatggctagtgatgagctgaaagagatgcggaaaaacttgaccaaagaagccatcagagagcatcagatggccaagactggtgggacccagactgacttgttcacatgtggcaaatgtaaaaagaagaattgcacttacacacaggtacaaacccgtagtgctgatgaaccaatgacaacatttgttgtctgtaatgaatgtggaaatcgatggaagttctgttgagttggaagaattggcaaaatatctggaccattaagaaaacggattttgtaactagctttaaactaggccaagcaactagttttcctgcaaatcaaatttttaaagcaacttgggttagactttgtttttgacctaacatcccttccttaaatgccttctgtagtttcagatcagtagggagaccatataataattttatggtacctgtttcaaaacatattttttctgtttttataagtaagttgatattaattaaactcttggcaatatttcttctttcttaaaggaaaatataccttaactttttttcttttacactgtgaaacatacacagtagaaattctgttactctctgttattaatacataaatgaaaatacatttttttccatattggcatgtagctacaaatattaaaggaggagaaaaggtaatataattttaggtttaccaaatatggtgtgtattcaaataatacttgaccagcttatctaaaatgtacataattttgaggtagcttatgaatttgattttaattattatgttcacaagcttggaatattagatattattttgcatctgtaactaaccgtgatcatcatttcttgtaatttcttgtacatgtatattacttgttcttaatagatttttggaaacaagactttattgagatcagtttggttttcctgttaatttacctgtttgactttataatgtgttttagttttgcagaagaacactgttgtagtttagaaggcttttcataaatcccctcataggcaaagatgaaaacttcccactatttttttcccctcttaggaagacatactggaaagaaaatgtttagcatcttagtgtagtatagctattgtaaacagttcatgactagattttgattcggaaatctatactgaccaaggattaatcttaaggattgtataattcattaaagctgtggtctttccatgtggagactgatagaaaataattttgtcccaagtcttatttgctgactttttctgtcatgagtgagattgttgaacaaactgaatatatgggctatagcaagtagctttacagtacagatcttacaattaagttttgcttttgttaaagtgtgtaccattttttctgtttggagtaagacaaaaattgttttgacataggttccctagggtacacttgctctagcatactttaaaggccactgttgcaaagtctacattttatgctgaatctgcattctgtcaggcacccgtagaaagacctcagtacatgctttgcactctcctttgctccctttttccaatttcttattgcatatcattttgttgtaatacagaaagcagcatttttaaatgtccgtgttaagaattggcccactggtaccaactcacctctattttgtcagttcatagttgaagattttgttttatttcaaaaacaaagtacatttttgaaataatgtttcagaataaaataatctcacttttaagtgatccattttaaaatttgtaattcaataaagttttttttgttgttaaacataaaaaaaaa

SEQ ID NO: 390692 - DNA, 2725 bp, Homo sapiens
agcggagggggccgaaaaccagccccgtgagggggcgggaccggaggtgaacgcgcagcaaaaccgggcgccttccacgaccctctagccggaagccacgcctgcccactagcccgacgcccgcctggcgggaacatgggctcgcccctcaccagcgatctgcagtcagttggtagcgcctgcacgtcgcgcgcggtgttcgattgtcgctgcctggggaggaggagccggagccgccgccgccgccgccgccgccgcgggcttcgttcgtaaggaagggggcctaggcccgggcctgcggtggtgggggttgctgcgcgccgggggtcgctcctgctgtgtcttccgctccagcttcgcccacttccccttgccagcggggtgggcgcggagaagacctgccggagccatggaggacgaagtggtccgctttgccaagaagatggacaagatggtgcagaagaagaacgcggctggagcattggatttgctaaaggagcttaagaatattcctatgaccctggaattactgcagtccacaagaatcggaatgtcagttaatgctattcgcaagcagagtacagatgaggaagttacatctttggcaaagtctctcatcaaatcctggaaaaaattattagatgggccatcaactgagaaagaccttgacgaaaagaagaaagaacctgcaattacatcgcagaacagccctgaggcaagagaagaaagtacttccagcggcaatgtaagcaacagaaaggatgagacaaatgctcgagatacttatgtttcatcctttcctcgggcaccaagcacttctgattctgtgcggttgaagtgtagggagatgcttgctgcagctcttcgaacaggggatgactacattgcaattggagctgatgaggaagaattaggatctcaaattgaagaagctatatatcgaaatggctagtgatgagctgaaagagatgcggaaaaacttgaccaaagaagccatcagagagcatcagatggccaagactggtgggacccagactgacttgttcacatgtggcaaatgtaaaaagaagaattgcacttacacacaggtacaaacccgtagtgctgatgaaccaatgacaacatttgttgtctgtaatgaatgtggaaatcgatggaagttctgttgagttggaagaattggcaaaatatctggaccattaagaaaacggattttgtaactagctttaaactaggccaagcaactagttttcctgcaaatcaaatttttaaagcaacttgggttagactttgtttttgacctaacatcccttccttaaatgccttctgtagtttcagatcagtagggagaccatataataattttatggtacctgtttcaaaacatattttttctgtttttataagtaagttgatattaattaaactcttggcaatatttcttctttcttaaaggaaaatataccttaactttttttcttttacactgtgaaacatacacagtagaaattctgttactctctgttattaatacataaatgaaaatacatttttttccatattggcatgtagctacaaatattaaaggaggagaaaaggtaatataattttaggtttaccaaatatggtgtgtattcaaataatacttgaccagcttatctaaaatgtacataattttgaggtagcttatgaatttgattttaattattatgttcacaagcttggaatattagatattattttgcatctgtaactaaccgtgatcatcatttcttgtaatttcttgtacatgtatattacttgttcttaatagatttttggaaacaagactttattgagatcagtttggttttcctgttaatttacctgtttgactttataatgtgttttagttttgcagaagaacactgttgtagtttagaaggcttttcataaatcccctcataggcaaagatgaaaacttcccactatttttttcccctcttaggaagacatactggaaagaaaatgtttagcatcttagtgtagtatagctattgtaaacagttcatgactagattttgattcggaaatctatactgaccaaggattaatcttaaggattgtataattcattaaagctgtggtctttccatgtggagactgatagaaaataattttgtcccaagtcttatttgctgactttttctgtcatgagtgagattgttgaacaaactgaatatatgggctatagcaagtagctttacagtacagatcttacaattaagttttgcttttgttaaagtgtgtaccattttttctgtttggagtaagacaaaaattgttttgacataggttccctagggtacacttgctctagcatactttaaaggccactgttgcaaagtctacattttatgctgaatctgcattctgtcaggcacccgtagaaagacctcagtacatgctttgcactctcctttgctccctttttccaatttcttattgcatatcattttgttgtaatacagaaagcagcatttttaaatgtccgtgttaagaattggcccactggtaccaactcacctctattttgtcagttcatagttgaagattttgttttatttcaaaaacaaagtacatttttgaaataatgtttcagaataaaataatctcacttttaagtgatccattttaaaatttgtaattcaataaagttttttttgttgttaaacataaaaaaaaa

SEQ ID NO: 390693 - DNA, 2928 bp, Homo sapiens
  misc_feature (2881)..(2881): n is a, c, g, or t
  misc_feature (2894)..(2894): n is a, c, g, or t
  misc_feature (2898)..(2898): n is a, c, g, or t
  misc_feature (2904)..(2904): n is a, c, g, or t
agcggagggggccgaaaaccagccccgtgagggggcgggaccggaggtgaacgcgcagcaaaaccgggcgccttccacgaccctctagccggaagccacgcctgcccactagcccgacgcccgcctggcgggaacatgggctcgcccctcaccagcgatctgcagtcagttggtagcgcctgcacgtcgcgcgcggtgttcgattgtcgctgcctggggaggaggagccggagccgccgccgccgccgccgccgccgcgggcttcgttcgtaaggaagggggcctaggcccgggcctgcggtggtgggggttgctgcgcgccgggggtcgctcctgctgtgtcttccgctccagcttcgcccacttccccttgccagcggggtgggcgcggagaagacctgccggagccatggaggacgaagtggtccgctttgccaagaagatggacaagatggtgcagaagaagaacgcggctggagcattggatttgctaaaggagcttaagaatattcctatgaccctggaattactgcagtccacaagaatcggaatgtcagttaatgctattcgcaagcagagtacagatgaggaagttacatctttggcaaagtctctcatcaaatcctggaaaaaattattagatgggccatcaactgagaaagaccttgacgaaaagaagaaagaacctgcaattacatcgcagaacagccctgaggcaagagaagaaagtacttccagcggcaatgtaagcaacagaaaggatgagacaaatgctcgagatacttatgtttcatcctttcctcgggcaccaagcacttctgattctgtgcggttgaagtgtagggagatgcttgctgcagctcttcgaacaggggatgactacattgcaattggagctgatgaggaagaattaggatctcaaattgaagaagctatatatcaagaaataaggaatacagacatgaaatacaaaaatagagtacgaagtaggatatcaaatcttaaagatgcaaaaaatccaaatttaaggaaaaatgtcctctgtgggaatattcctcctgacttatttgctagaatgacagcagaggaaatggctagtgatgagctgaaagagatgcggaaaaacttgaccaaagaagccatcagagagcatcagatggccaagactggtgggacccagactgacttgttcacatgtggcaaatgtaaaaagaagaattgcacttacacacaggtacaaacccgtagtgctgatgaaccaatgacaacatttgttgtctgtaatgaatgtggaaatcgatggaagttctgttgagttggaagaattggcaaaatatctggaccattaagaaaacggattttgtaactagctttaaactaggccaagcaactagttttcctgcaaatcaaatttttaaagcaacttgggttagactttgtttttgacctaacatcccttccttaaatgccttctgtagtttcagatcagtagggagaccatataataattttatggtacctgtttcaaaacatattttttctgtttttataagtaagttgatattaattaaactcttggcaatatttcttctttcttaaaggaaaatataccttaactttttttcttttacactgtgaaacatacacagtagaaattctgttactctctgttattaatacataaatgaaaatacatttttttccatattggcatgtagctacaaatattaaaggaggagaaaaggtaatataattttaggtttaccaaatatggtgtgtattcaaataatacttgaccagcttatctaaaatgtacataattttgaggtagcttatgaatttgattttaattattatgttcacaagcttggaatattagatattattttgcatctgtaactaaccgtgatcatcatttcttgtaatttcttgtacatgtatattacttgttcttaatagatttttggaaacaagactttattgagatcagtttggttttcctgttaatttacctgtttgactttataatgtgttttagttttgcagaagaacactgttgtagtttagaaggcttttcataaatcccctcataggcaaagatgaaaacttcccactatttttttcccctcttaggaagacatactggaaagaaaatgtttagcatcttagtgtagtatagctattgtaaacagttcatgactagattttgattcggaaatctatactgaccaaggattaatcttaaggattgtataattcattaaagctgtggtctttccatgtggagactgatagaaaataattttgtcccaagtcttatttgctgactttttctgtcatgagtgagattgttgaacaaactgaatatatgggctatagcaagtagctttacagtacagatcttacaattaagttttgcttttgttaaagtgtgtaccattttttctgtttggagtaagacaaaaattgttttgacataggttccctagggtacacttgctctagcatactttaaaggccactgttgcaaagtctacattttatgctgaatctgcattctgtcaggcacccgtagaaagacctcagtacatgctttgcactctcctttgctccctttttccaatttcttattgcatatcattttgttgtaatacagaaagcagcatttttaaatgtccgtgttaagaattggcccactggtaccaactcacctctattttgtcagttcatagttgaagattttgttttatttcaaaaacaaagtacatttttgaaataatgtttcagaataaaataatctcacttttaagtgatccattttaaaatttgtaattcaataaagttttttttgttgttaaacataaaaaaaaaaaaaaaaaanaaaaaaaaaaaanaaanaaaaanaaaaaaaaaaaaaaaaaaaaaaaa

SEQ ID NO: 390694 - DNA, 3031 bp, Homo sapiens
agcggagggggccgaaaaccagccccgtgagggggcgggaccggaggtgaacgcgcagcaaaaccgggcgccttccacgaccctctagccggaagccacgcctgcccactagcccgacgcccgcctggcgggaacatgggctcgcccctcaccagcgatctgcagtcagttggtagcgcctgcacgtcgcgcgcggtgttcgattgtcgctgcctggggaggaggagccggagccgccgccgccgccgccgccgccgcgggcttcgttcgtaaggaagggggcctaggcccgggcctgcggtggtgggggttgctgcgcgccgggggtcgctcctgctgtgtcttccgctccagcttcgcccacttccccttgccagcggggtgggcgcggagaagacctgccggagccatggaggacgaagtggtccgctttgccaagaagatggacaagatggtgcagaagaagaacgcggctggagcattggatttgctaaaggagcttaagaatattcctatgaccctggaattactgcagtccacaagaatcggaatgtcagttaatgctattcgcaagcagagtacagatgaggaagttacatctttggcaaagtctctcatcaaatcctggaaaaaattattagatgggccatcaactgagaaagaccttgacgaaaagaagaaagaacctgcaattacatcgcagaacagccctgaggcaagagaagaaagtacttccagcggcaatgtaagcaacagaaaggatgagacaaatgctcgagatacttatgtttcatcctttcctcgggcaccaagcacttctgattctgtgcggttgaagtgtagggagatgcttgctgcagctcttcgaacaggggatgactacattgcaattggagctgatgaggaagaattaggatctcaaattgaagaagctatatatcaagaaataaggaatacagacatgaaatacaaaaatagagtacgaagtaggatatcaaatcttaaagatgcaaaaaatccaaatttaaggaaaaatgtcctctgtgggaatattcctcctgacttatttgctagaatgacagcagaggaaatggctagtgatgagctgaaagagatgcggaaaaacttgaccaaagaagccatcagagagcatcagatggccaagactggtgggacccagactgacttgttcacatgtggcaaatgtaaaaagaagaattgcacttacacacaggtacaaacccgtagtgctgatgaaccaatgacaacatttgttgtctgtaatgaatgtggaaatcgatggaagttctgttgagttggaagaattggcaaaatatctggaccattaagaaaacggattttgtaactagctttaaactaggccaagcaactagttttcctgcaaatcaaatttttaaagcaacttgggttagactttgtttttgacctaacatcccttccttaaatgccttctgtagtttcagatcagtagggagaccatataataattttatggtacctgtttcaaaacatattttttctgtttttataagtaagttgatattaattaaactcttggcaatatttcttctttcttaaaggaaaatataccttaactttttttcttttacactgtgaaacatacacagtagaaattctgttactctctgttattaatacataaatgaaaatacatttttttccatattggcatgtagctacaaatattaaaggaggagaaaaggtaatataattttaggtttaccaaatatggtgtgtattcaaataatacttgaccagcttatctaaaatgtacataattttgaggtagcttatgaatttgattttaattattatgttcacaagcttggaatattagatattattttgcatctgtaactaaccgtgatcatcatttcttgtaatttcttgtacatgtatattacttgttcttaatagatttttggaaacaagactttattgagatcagtttggttttcctgttaatttacctgtttgactttataatgtgttttagttttgcagaagaacactgttgtagtttagaaggcttttcataaatcccctcataggcaaagatgaaaacttcccactatttttttcccctcttaggaagacatactggaaagaaaatgtttagcatcttagtgtagtatagctattgtaaacagttcatgactagattttgattcggaaatctatactgaccaaggattaatcttaaggattgtataattcattaaagctgtggtctttccatgtggagactgatagaaaataattttgtcccaagtcttatttgctgactttttctgtcatgagtgagattgttgaacaaactgaatatatgggctatagcaagtagctttacagtacagatcttacaattaagttttgcttttgttaaagtgtgtaccattttttctgtttggagtaagacaaaaattgttttgacataggttccctagggtacacttgctctagcatactttaaaggccactgttgcaaagtctacattttatgctgaatctgcattctgtcaggcacccgtagaaagacctcagtacatgctttgcactctcctttgctccctttttccaatttcttattgcatatcattttgttgtaatacagaaagcagcatttttaaatgtccgtgttaagaattggcccactggtaccaactcacctctattttgtcagttcatagttgaagattttgttttatttcaaaaacaaagtacatttttgaaataatgtttcagaataaaataatctcacttgtgaatcatttaaattgtatcataagttttatgtgttaaaaaaaacaaagggggcgttaattcccgagggcaagtaggctccgtttttcaatgcctagggacgtatagagggggggtaaagtggtggaatgtctggtttgtggactcttggggtatgacccgagtagcggatatagttgacgttgggatgtgttataaaaaaaaaataacatataatagacataat

SEQ ID NO: 390695 - DNA, 1673 bp, Homo sapiens
tccacgatgaggccgaggaggaagggggggcctctggtacaaacccgtagtgctgatgaaccaatgacaacatttgttgtctgtaatgaatgtggaaatcgatggaagttctgttgagttggaagaattggcaaaatatctggaccattaagaaaacggattttgtaactagctttaaactaggccaagcaactagttttcctgcaaatcaaatttttaaagcaacttgggttagactttgtttttgacctaacatcccttccttaaatgccttctgtagtttcagatcagtagggagaccatataataattttatggtacctgtttcaaaacatattttttctgtttttataagtaagttgatattaattaaactcttggcaatatttcttctttcttaaaggaaaatataccttaactttttttcttttacactgtgaaacatacacagtagaaattctgttactctctgttattaatacataaatgaaaatacatttttttccatattggcatgtagctacaaatattaaaggaggagaaaaggtaatataattttaggtttaccaaatatggtgtgtattcaaataatacttgaccagcttatctaaaatgtacataattttgaggtagcttatgaatttgattttaattattatgttcacaagcttggaatattagatattattttgcatctgtaactaaccgtgatcatcatttcttgtaatttcttgtacatgtatattacttgttcttaatagatttttggaaacaagactttattgagatcagtttggttttcctgttaatttacctgtttgactttataatgtgttttagttttgcagaagaacactgttgtagtttagaaggcttttcataaatcccctcataggcaaagatgaaaacttcccactatttttttcccctcttaggaagacatactggaaagaaaatgtttagcatcttagtgtagtatagctattgtaaacagttcatgactagattttgattcggaaatctatactgaccaaggattaatcttaaggattgtataattcattaaagctgtggtctttccatgtggagactgatagaaaataattttgtcccaagtcttatttgctgactttttctgtcatgagtgagattgttgaacaaactgaatatatgggctatagcaagtagctttacagtacagatcttacaattaagttttgcttttgttaaagtgtgtaccattttttctgtttggagtaagacaaaaattgttttgacataggttccctagggtacacttgctctagcatactttaaaggccactgttgcaaagtctacattttatgctgaatctgcattctgtcaggcacccgtagaaagacctcagtacatgctttgcactctcctttgctccctttttccaatttcttattgcatatcattttgttgtaatacagaaagcagcatttttaaatgtccgtgttaagaattggcccactggtaccaactcacctctattttgtcagttcatagttgaagattttgttttatttcaaaaacaaagtacatttttgaaataatgtttcagaataaaataatctcacttttaagtgatccattttaaaatttgtaattcaataaagttttttttgttgttaaacataaaaaaaaa

SEQ ID NO: 390696 - DNA, 1682 bp, Homo sapiens
ccacctactcacacctaccgcaccgaagaggaagcctcctgcagggtacaaacccgtagtgctgatgaaccaatgacaacatttgttgtctgtaatgaatgtggaaatcgatggaagttctgttgagttggaagaattggcaaaatatctggaccattaagaaaacggattttgtaactagctttaaactaggccaagcaactagttttcctgcaaatcaaatttttaaagcaacttgggttagactttgtttttgacctaacatcccttccttaaatgccttctgtagtttcagatcagtagggagaccatataataattttatggtacctgtttcaaaacatattttttctgtttttataagtaagttgatattaattaaactcttggcaatatttcttctttcttaaaggaaaatataccttaactttttttcttttacactgtgaaacatacacagtagaaattctgttactctctgttattaatacataaatgaaaatacatttttttccatattggcatgtagctacaaatattaaaggaggagaaaaggtaatataattttaggtttaccaaatatggtgtgtattcaaataatacttgaccagcttatctaaaatgtacataattttgaggtagcttatgaatttgattttaattattatgttcacaagcttggaatattagatattattttgcatctgtaactaaccgtgatcatcatttcttgtaatttcttgtacatgtatattacttgttcttaatagatttttggaaacaagactttattgagatcagtttggttttcctgttaatttacctgtttgactttataatgtgttttagttttgcagaagaacactgttgtagtttagaaggcttttcataaatcccctcataggcaaagatgaaaacttcccactatttttttcccctcttaggaagacatactggaaagaaaatgtttagcatcttagtgtagtatagctattgtaaacagttcatgactagattttgattcggaaatctatactgaccaaggattaatcttaaggattgtataattcattaaagctgtggtctttccatgtggagactgatagaaaataattttgtcccaagtcttatttgctgactttttctgtcatgagtgagattgttgaacaaactgaatatatgggctatagcaagtagctttacagtacagatcttacaattaagttttgcttttgttaaagtgtgtaccattttttctgtttggagtaagacaaaaattgttttgacataggttccctagggtacacttgctctagcatactttaaaggccactgttgcaaagtctacattttatgctgaatctgcattctgtcaggcacccgtagaaagacctcagtacatgctttgcactctcctttgctccctttttccaatttcttattgcatatcattttgttgtaatacagaaagcagcatttttaaatgtccgtgttaagaattggcccactggtaccaactcacctctattttgtcagttcatagttgaagattttgttttatttcaaaaacaaagtacatttttgaaataatgtttcagaataaaataatctcacttttaagtgatccattttaaaatttgtaattcaataaagttttttttgttgttaaacataaaaaaaaa

SEQ ID NO: 390697 - DNA, 1677 bp, Homo sapiens
gcacacccaccacctcccccacgggcaacgaggggaaaaacttaaaaaaaccggacgctgtttaccaatgacaacatttgttgtctgtaatgaatgtggaaatcgatggaagttctgttgagttggaagaattggcaaaatatctggaccattaagaaaacggattttgtaactagctttaaactaggccaagcaactagttttcctgcaaatcaaatttttaaagcaacttgggttagactttgtttttgacctaacatcccttccttaaatgccttctgtagtttcagatcagtagggagaccatataataattttatggtacctgtttcaaaacatattttttctgtttttataagtaagttgatattaattaaactcttggcaatatttcttctttcttaaaggaaaatataccttaactttttttcttttacactgtgaaacatacacagtagaaattctgttactctctgttattaatacataaatgaaaatacatttttttccatattggcatgtagctacaaatattaaaggaggagaaaaggtaatataattttaggtttaccaaatatggtgtgtattcaaataatacttgaccagcttatctaaaatgtacataattttgaggtagcttatgaatttgattttaattattatgttcacaagcttggaatattagatattattttgcatctgtaactaaccgtgatcatcatttcttgtaatttcttgtacatgtatattacttgttcttaatagatttttggaaacaagactttattgagatcagtttggttttcctgttaatttacctgtttgactttataatgtgttttagttttgcagaagaacactgttgtagtttagaaggcttttcataaatcccctcataggcaaagatgaaaacttcccactatttttttcccctcttaggaagacatactggaaagaaaatgtttagcatcttagtgtagtatagctattgtaaacagttcatgactagattttgattcggaaatctatactgaccaaggattaatcttaaggattgtataattcattaaagctgtggtctttccatgtggagactgatagaaaataattttgtcccaagtcttatttgctgactttttctgtcatgagtgagattgttgaacaaactgaatatatgggctatagcaagtagctttacagtacagatcttacaattaagttttgcttttgttaaagtgtgtaccattttttctgtttggagtaagacaaaaattgttttgacataggttccctagggtacacttgctctagcatactttaaaggccactgttgcaaagtctacattttatgctgaatctgcattctgtcaggcacccgtagaaagacctcagtacatgctttgcactctcctttgctccctttttccaatttcttattgcatatcattttgttgtaatacagaaagcagcatttttaaatgtccgtgttaagaattggcccactggtaccaactcacctctattttgtcagttcatagttgaagattttgttttatttcaaaaacaaagtacatttttgaaataatgtttcagaataaaataatctcacttttaagtgatccattttaaaatttgtaattcaataaagttttttttgttgttaaacataaaaaaaaa

SEQ ID NO: 390698 - DNA, 1605 bp, Homo sapiens
gtatcaacgcagagtggccattaacggccggggatggaagttctgttgagttggaagaattggcaaaatatctggaccattaagaaaacggattttgtaactagctttaaactaggccaagcaactagttttcctgcaaatcaaatttttaaagcaacttgggttagactttgtttttgacctaacatcccttccttaaatgccttctgtagtttcagatcagtagggagaccatataataattttatggtacctgtttcaaaacatattttttctgtttttataagtaagttgatattaattaaactcttggcaatatttcttctttcttaaaggaaaatataccttaactttttttcttttacactgtgaaacatacacagtagaaattctgttactctctgttattaatacataaatgaaaatacatttttttccatattggcatgtagctacaaatattaaaggaggagaaaaggtaatataattttaggtttaccaaatatggtgtgtattcaaataatacttgaccagcttatctaaaatgtacataattttgaggtagcttatgaatttgattttaattattatgttcacaagcttggaatattagatattattttgcatctgtaactaaccgtgatcatcatttcttgtaatttcttgtacatgtatattacttgttcttaatagatttttggaaacaagactttattgagatcagtttggttttcctgttaatttacctgtttgactttataatgtgttttagttttgcagaagaacactgttgtagtttagaaggcttttcataaatcccctcataggcaaagatgaaaacttcccactatttttttcccctcttaggaagacatactggaaagaaaatgtttagcatcttagtgtagtatagctattgtaaacagttcatgactagattttgattcggaaatctatactgaccaaggattaatcttaaggattgtataattcattaaagctgtggtctttccatgtggagactgatagaaaataattttgtcccaagtcttatttgctgactttttctgtcatgagtgagattgttgaacaaactgaatatatgggctatagcaagtagctttacagtacagatcttacaattaagttttgcttttgttaaagtgtgtaccattttttctgtttggagtaagacaaaaattgttttgacataggttccctagggtacacttgctctagcatactttaaaggccactgttgcaaagtctacattttatgctgaatctgcattctgtcaggcacccgtagaaagacctcagtacatgctttgcactctcctttgctccctttttccaatttcttattgcatatcattttgttgtaatacagaaagcagcatttttaaatgtccgtgttaagaattggcccactggtaccaactcacctctattttgtcagttcatagttgaagattttgttttatttcaaaaacaaagtacatttttgaaataatgtttcagaataaaataatctcacttttaagtgatccattttaaaatttgtaattcaataaagttttttttgttgttaaacataaaaaaaaa

SEQ ID NO: 390699 - DNA, 1438 bp, Homo sapiens
catataataattgtatggtctccctactgatctgaaactacagaaggcatttaaggaagggagaccatataataattttatggtacctgtttcaaaacatattttttctgtttttataagtaagttgatattaattaaactcttggcaatatttcttctttcttaaaggaaaatataccttaactttttttcttttacactgtgaaacatacacagtagaaattctgttactctctgttattaatacataaatgaaaatacatttttttccatattggcatgtagctacaaatattaaaggaggagaaaaggtaatataattttaggtttaccaaatatggtgtgtattcaaataatacttgaccagcttatctaaaatgtacataattttgaggtagcttatgaatttgattttaattattatgttcacaagcttggaatattagatattattttgcatctgtaactaaccgtgatcatcatttcttgtaatttcttgtacatgtatattacttgttcttaatagatttttggaaacaagactttattgagatcagtttggttttcctgttaatttacctgtttgactttataatgtgttttagttttgcagaagaacactgttgtagtttagaaggcttttcataaatcccctcataggcaaagatgaaaacttcccactatttttttcccctcttaggaagacatactggaaagaaaatgtttagcatcttagtgtagtatagctattgtaaacagttcatgactagattttgattcggaaatctatactgaccaaggattaatcttaaggattgtataattcattaaagctgtggtctttccatgtggagactgatagaaaataattttgtcccaagtcttatttgctgactttttctgtcatgagtgagattgttgaacaaactgaatatatgggctatagcaagtagctttacagtacagatcttacaattaagttttgcttttgttaaagtgtgtaccattttttctgtttggagtaagacaaaaattgttttgacataggttccctagggtacacttgctctagcatactttaaaggccactgttgcaaagtctacattttatgctgaatctgcattctgtcaggcacccgtagaaagacctcagtacatgctttgcactctcctttgctccctttttccaatttcttattgcatatcattttgttgtaatacagaaagcagcatttttaaatgtccgtgttaagaattggcccactggtaccaactcacctctattttgtcagttcatagttgaagattttgttttatttcaaaaacaaagtacatttttgaaataatgtttcagaataaaataatctcacttttaagtgatccattttaaaatttgtaattcaataaagttttttttgttgttaaacataaaaaaaaa

SEQ ID NO: 390700 - DNA, 612 bp, Homo sapiens
gtgccaagcaaccccttggcacttcaaggcaaccacaaaataattttgtcccaagtcttatttgctgactttttctgtcatgagtgagattgttgaacaaactgaatatatgggctatagcaagtagctttacagtacagatcttacaattaagttttgcttttgttaaagtgtgtaccattttttctgtttggagtaagacaaaaattgttttgacataggttccctagggtacacttgctctagcatactttaaaggccactgttgcaaagtctacattttatgctgaatctgcattctgtcaggcacccgtagaaagacctcagtacatgctttgcactctcctttgctccctttttccaatttcttattgcatatcattttgttgtaatacagaaagcagcatttttaaatgtccgtgttaagaattggcccactggtaccaactcacctctattttgtcagttcatagttgaagattttgttttatttcaaaaacaaagtacatttttgaaataatgtttcagaataaaataatctcacttttaagtgatccattttaaaatttgtaattcaataaagttttttttgttgttaaacataaaaaaaaa

SEQ ID NO: 390701 - DNA, 1161 bp, Homo sapiens
agcggagggggccgaaaaccagccccgtgagggggcgggaccggaggtgaacgcgcagcaaaaccgggcgccttccacgaccctctagccggaagccacgcctgcccactagcccgacgcccgcctggcgggaacatgggctcgcccctcaccagcgatctgcagtcagttggtagcgcctgcacgtcgcgcgcggtgttcgattgtcgctgcctggggaggaggagccggagccgccgccgccgccgccgccgccgcgggcttcgttcgtaaggaagggggcctaggcccgggcctgcggtggtgggggttgctgcgcgccgggggtcgctcctgctgtgtcttccgctccagcttcgcccacttccccttgccagcggggtgggcgcggagaagacctgccggagccatggaggacgaagtggtccgctttgccaagaagatggacaagatggtgcagaagaagaacgcggctggagcattggatttgctaaaggagcttaagaatattcctatgaccctggaattactgcagtccacaagaatcggaatgtcagttaatgctattcgcaagcagagtacagatgaggaagttacatctttggcaaagtctctcatcaaatcctggaaaaaattattagatgggccatcaactgagaaagaccttgacgaaaagaagaaagaacctgcaattacatcgcagaacagccctgaggcaagagaagaaagtacttcacagtatagacatatatttatattgaaagtcatagttttacttcctgcatcaattcccctgtctaatgttcccctatttacactcctttttttgttttctaatcaaatggaagtagtaaatgtatgtagccatgtattctaatttatttttttttcagatttcttgaacatttgagaggtagaagacattgaataaataagaagttatttatattgtactcaacaagtttaattgaatgggattgctggggtaggcactgatggaattgataatggaggtagtgattagggattcaaatggttgcttcctctatttaccacatttttttttttagatttattttggcccttgatctcattctcctttgcatgctttttttcttccttttgaatttagcaatttgtggctaggcacagtggcccact

SEQ ID NO: 390702 - DNA, 496 bp, Homo sapiens
agatcttacaattaagttttgcttttgttaaagtgtgtaccattttttctgtttggagtaagacaaaaattgttttgacataggttccctagggtacacttgctctagcatactttaaaggccactgttgcaaagtctacattttatgctgaatctgcattctgtcaggcacccgtagaaagacctcagtacatgctttgcactctcctttgctccctttttccaatttcttattgcatatcattttgttgtaatacagaaagcagcatttttaaatgtccgtgttaagaattggcccactggtaccaactcacctctattttgtcagttcatagttgaagattttgttttatttcaaaaacaaagtacatttttgaaataatgtttcagaataaaataatctcacttttaagtgatccattttaaaatttgtaattcaataaagttttttttgttgttaaacataaaaaaaaagaatattattaaagagtatgat

SEQ ID NO: 390703 - DNA, 2630 bp, Homo sapiens
agcggagggggccgaaaaccagccccgtgagggggcgggaccggaggtgaacgcgcagcaaaaccgggcgccttccacgaccctctagccggaagccacgcctgcccactagcccgacgcccgcctggcgggaacatgggctcgcccctcaccagcgatctgcagtcagttggtagcgcctgcacgtcgcgcgcggtgttcgattgtcgctgcctggggaggaggagccgggctggagcattggatttgctaaaggagcttaagaatattcctatgaccctggaattactgcagtccacaagaatcggaatgtcagttaatgctattcgcaagcagagtacagatgaggaagttacatctttggcaaagtctctcatcaaatcctggaaaaaattattagatgggccatcaactgagaaagaccttgacgaaaagaagaaagaacctgcaattacatcgcagaacagccctgaggcaagagaagaaagtacttccagcggcaatgtaagcaacagaaaggatgagacaaatgctcgagatacttatgtttcatcctttcctcgggcaccaagcacttctgattctgtgcggttgaagtgtagggagatgcttgctgcagctcttcgaacaggggatgactacattgcaattggagctgatgaggaagaattaggatctcaaattgaagaagctatatatcaagaaataaggaatacagacatgaaatacaaaaatagagtacgaagtaggatatcaaatcttaaagatgcaaaaaatccaaatttaaggaaaaatgtcctctgtgggaatattcctcctgacttatttgctagaatgacagcagaggaaatggctagtgatgagctgaaagagatgcggaaaaacttgaccaaagaagccatcagagagcatcagatggccaagactggtgggacccagactgacttgttcacatgtggcaaatgtaaaaagaagaattgcacttacacacaggtacaaacccgtagtgctgatgaaccaatgacaacatttgttgtctgtaatgaatgtggaaatcgatggaagttctgttgagttggaagaattggcaaaatatctggaccattaagaaaacggattttgtaactagctttaaactaggccaagcaactagttttcctgcaaatcaaatttttaaagcaacttgggttagactttgtttttgacctaacatcccttccttaaatgccttctgtagtttcagatcagtagggagaccatataataattttatggtacctgtttcaaaacatattttttctgtttttataagtaagttgatattaattaaactcttggcaatatttcttctttcttaaaggaaaatataccttaactttttttcttttacactgtgaaacatacacagtagaaattctgttactctctgttattaatacataaatgaaaatacatttttttccatattggcatgtagctacaaatattaaaggaggagaaaaggtaatataattttaggtttaccaaatatggtgtgtattcaaataatacttgaccagcttatctaaaatgtacataattttgaggtagcttatgaatttgattttaattattatgttcacaagcttggaatattagatattattttgcatctgtaactaaccgtgatcatcatttcttgtaatttcttgtacatgtatattacttgttcttaatagatttttggaaacaagactttattgagatcagtttggttttcctgttaatttacctgtttgactttataatgtgttttagttttgcagaagaacactgttgtagtttagaaggcttttcataaatcccctcataggcaaagatgaaaacttcccactatttttttcccctcttaggaagacatactggaaagaaaatgtttagcatcttagtgtagtatagctattgtaaacagttcatgactagattttgattcggaaatctatactgaccaaggattaatcttaaggattgtataattcattaaagctgtggtctttccatgtggagactgatagaaaataattttgtcccaagtcttatttgctgactttttctgtcatgagtgagattgttgaacaaactgaatatatgggctatagcaagtagctttacagtacagatcttacaattaagttttgcttttgttaaagtgtgtaccattttttctgtttggagtaagacaaaaattgttttgacataggttccctagggtacacttgctctagcatactttaaaggccactgttgcaaagtctacattttatgctgaatctgcattctgtcaggcacccgtagaaagacctcagtacatgctttgcactctcctttgctccctttttccaatttcttattgcatatcattttgttgtaatacagaaagcagcatttttaaatgtccgtgttaagaattggcccactggtaccaactcacctctattttgtcagttcatagttgaagattttgttttatttcaaaaacaaagtacatttttgaaataatgtttcagaataaaataatctcacttttaagtgatccattttaaaatttgtaattcaataaagttttttttgttgttaaacataaaaaaaaa

SEQ ID NO: 390704 - DNA, 2682 bp, Homo sapiens
agcggagggggccgaaaaccagccccgtgagggggcgggaccggaggtgaacgcgcagcaaaaccgggcgccttccacgaccctctagccggaagccacgcctgcccactagcccgacgcccgcctggcgggaacatgggctcgcccctcaccagcgatctgcagtcagttggtagcgcctgcacgtcgcgcgcggtgttcgattgtcgctgcctggggaggaggagccggagccgccgccgccgccgccgccgccgcgggcttcgttcgtaaggaagggggcctaggcccgggcctgcggtggtgggggttgctgcgcgccgggggtcgctcctgctgtgtcttccgctccagcttcgcccacttccccttgccagcggggtgggcgcggagaagacctgccggagccatggaggacgaatctctcatcaaatcctggaaaaaattattagatgggccatcaactgagaaagaccttgacgaaaagaagaaagaacctgcaattacatcgcagaacagccctgaggcaagagaagaaagtacttccagcggcaatgtaagcaacagaaaggatgagacaaatgctcgagatacttatgtttcatcctttcctcgggcaccaagcacttctgattctgtgcggttgaagtgtagggagatgcttgctgcagctcttcgaacaggggatgactacattgcaattggagctgatgaggaagaattaggatctcaaattgaagaagctatatatcaagaaataaggaatacagacatgaaatacaaaaatagagtacgaagtaggatatcaaatcttaaagatgcaaaaaatccaaatttaaggaaaaatgtcctctgtgggaatattcctcctgacttatttgctagaatgacagcagaggaaatggctagtgatgagctgaaagagatgcggaaaaacttgaccaaagaagccatcagagagcatcagatggccaagactggtgggacccagactgacttgttcacatgtggcaaatgtaaaaagaagaattgcacttacacacaggtacaaacccgtagtgctgatgaaccaatgacaacatttgttgtctgtaatgaatgtggaaatcgatggaagttctgttgagttggaagaattggcaaaatatctggaccattaagaaaacggattttgtaactagctttaaactaggccaagcaactagttttcctgcaaatcaaatttttaaagcaacttgggttagactttgtttttgacctaacatcccttccttaaatgccttctgtagtttcagatcagtagggagaccatataataattttatggtacctgtttcaaaacatattttttctgtttttataagtaagttgatattaattaaactcttggcaatatttcttctttcttaaaggaaaatataccttaactttttttcttttacactgtgaaacatacacagtagaaattctgttactctctgttattaatacataaatgaaaatacatttttttccatattggcatgtagctacaaatattaaaggaggagaaaaggtaatataattttaggtttaccaaatatggtgtgtattcaaataatacttgaccagcttatctaaaatgtacataattttgaggtagcttatgaatttgattttaattattatgttcacaagcttggaatattagatattattttgcatctgtaactaaccgtgatcatcatttcttgtaatttcttgtacatgtatattacttgttcttaatagatttttggaaacaagactttattgagatcagtttggttttcctgttaatttacctgtttgactttataatgtgttttagttttgcagaagaacactgttgtagtttagaaggcttttcataaatcccctcataggcaaagatgaaaacttcccactatttttttcccctcttaggaagacatactggaaagaaaatgtttagcatcttagtgtagtatagctattgtaaacagttcatgactagattttgattcggaaatctatactgaccaaggattaatcttaaggattgtataattcattaaagctgtggtctttccatgtggagactgatagaaaataattttgtcccaagtcttatttgctgactttttctgtcatgagtgagattgttgaacaaactgaatatatgggctatagcaagtagctttacagtacagatcttacaattaagttttgcttttgttaaagtgtgtaccattttttctgtttggagtaagacaaaaattgttttgacataggttccctagggtacacttgctctagcatactttaaaggccactgttgcaaagtctacattttatgctgaatctgcattctgtcaggcacccgtagaaagacctcagtacatgctttgcactctcctttgctccctttttccaatttcttattgcatatcattttgttgtaatacagaaagcagcatttttaaatgtccgtgttaagaattggcccactggtaccaactcacctctattttgtcagttcatagttgaagattttgttttatttcaaaaacaaagtacatttttgaaataatgtttcagaataaaataatctcacttttaagtgatccattttaaaatttgtaattcaataaagttttttttgttgttaaacataaaaaaaaa

SEQ ID NO: 390705 - DNA, 2817 bp, Homo sapiens
agcggagggggccgaaaaccagccccgtgagggggcgggaccggaggtgaacgcgcagcaaaaccgggcgccttccacgaccctctagccggaagccacgcctgcccactagcccgacgcccgcctggcgggaacatgggctcgcccctcaccagcgatctgcagtcagttggtagcgcctgcacgtcgcgcgcggtgttcgattgtcgctgcctggggaggaggagccggagccgccgccgccgccgccgccgccgcgggcttcgttcgtaaggaagggggcctaggcccgggcctgcggtggtgggggttgctgcgcgccgggggtcgctcctgctgtgtcttccgctccagcttcgcccacttccccttgccagcggggtgggcgcggagaagacctgccggagccatggaggacgaagtggtccgctttgccaagaagatggacaagatggtgcagaagaagaacgcggctggagcattggatttgctaaaggagcttaagaatattcctatgaccctggaattactgcagtccacaagaatcggaatgtcagttaatgctattcgcaagcagagtacagatgaggaagttacatctttggcaaagtctctcatcaaatcctggaaaaaattattagatgggccatcaactgagaaagaccttgacgaaaagaagaaagaacctgcaattacatcgcagaacagccctgaggcaagagaagaaagtacttccagcggcaatgtaagcaacagaaaggatgagacaaatgctcgagatacttatgtttcatcctttcctcgggcaccaagcacttctgattctgtgcggttgaagtgtagggagatgcttgctgcagctcttcgaacaggggatgactacattgcaattggagctgatgaggaagaattaggatctcaaattgaagaagctatatatcaagaaataaggaatacagacatgaaatacaaaaatagagtacgaagtaggatatcaaatcttaaagatgcaaaaaatccaaatttaaggaaaaatgtcctctgtgggaatattcctcctgacttatttgctagaatgacagcagaggaaatggctagtgatgagctgaaagagatgcggaaaaacttgaccaaagaagccatcagagagcatcagatggccaagactggtgggacccagactgacttgttcacatgtggcaaatgtaaaaagaagaattgcacttacacacaggtacaaacccgtagtgctgatgaaccaatgacaacatttgttgtctgtaatgaatgtggaaatcgatggaagttctgttgagttggaagaattggcaaaatatctggaccattaagaaaacggattttgtaactagctttaaactaggccaagcaactagttttcctgcaaatcaaatttttaaagcaacttgggttagactttgtttttgacctaacatcccttccttaaatgccttctgtagtttcagatcagtagggagaccatataataattttatggtacctgtttcaaaacatattttttctgtttttataagtaagttgatattaattaaactcttggcaatatttcttctttcttaaaggaaaatataccttaactttttttcttttacactgtgaaacatacacagtagaaattctgttactctctgttattaatacataaatgaaaatacatttttttccatattggcatgtagctacaaatattaaaggaggagaaaaggtaatataattttaggtttaccaaatatggtgtgtattcaaataatacttgaccagcttatctaaaatcttggaatattagatattattttgcatctgtaactaaccgtgatcatcatttcttgtaatttcttgtacatgtatattacttgttcttaatagatttttggaaacaagactttattgagatcagtttggttttcctgttaatttacctgtttgactttataatgtgttttagttttgcagaagaacactgttgtagtttagaaggcttttcataaatcccctcataggcaaagatgaaaacttcccactatttttttcccctcttaggaagacatactggaaagaaaatgtttagcatcttagtgtagtatagctattgtaaacagttcatgactagattttgattcggaaatctatactgaccaaggattaatcttaaggattgtataattcattaaagctgtggtctttccatgtggagactgatagaaaataattttgtcccaagtcttatttgctgactttttctgtcatgagtgagattgttgaacaaactgaatatatgggctatagcaagtagctttacagtacagatcttacaattaagttttgcttttgttaaagtgtgtaccattttttctgtttggagtaagacaaaaattgttttgacataggttccctagggtacacttgctctagcatactttaaaggccactgttgcaaagtctacattttatgctgaatctgcattctgtcaggcacccgtagaaagacctcagtacatgctttgcactctcctttgctccctttttccaatttcttattgcatatcattttgttgtaatacagaaagcagcatttttaaatgtccgtgttaagaattggcccactggtaccaactcacctctattttgtcagttcatagttgaagattttgttttatttcaaaaacaaagtacatttttgaaataatgtttcagaataaaataatctcacttttaagtgatccattttaaaatttgtaattcaataaagttttttttgttgttaaacataaaaaaaaa

SEQ ID NO: 390706 - DNA, 1794 bp, Homo sapiens
tctgcattcaggttggcaggaacatcatctgaaagagatgcggaaaaacttgaccaaagaagccatcagagagcatcagatggccaagactggtgggacccagactgacttgttcacatgtggcaaatgtaaaaagaagaattgcacttacacacaggtacaaacccgtagtgctgatgaaccaatgacaacatttgttgtctgtaatgaatgtggaaatcgatggaagttctgttgagttggaagaattggcaaaatatctggaccattaagaaaacggattttgtaactagctttaaactaggccaagcaactagttttcctgcaaatcaaatttttaaagcaacttgggttagactttgtttttgacctaacatcccttccttaaatgccttctgtagtttcagatcagtagggagaccatataataattttatggtacctgtttcaaaacatattttttctgtttttataagtaagttgatattaattaaactcttggcaatatttcttctttcttaaaggaaaatataccttaactttttttcttttacactgtgaaacatacacagtagaaattctgttactctctgttattaatacataaatgaaaatacatttttttccatattggcatgtagctacaaatattaaaggaggagaaaaggtaatataattttaggtttaccaaatatggtgtgtattcaaataatacttgaccagcttatctaaaatgtacataattttgaggtagcttatgaatttgattttaattattatgttcacaagcttggaatattagatattattttgcatctgtaactaaccgtgatcatcatttcttgtaatttcttgtacatgtatattacttgttcttaatagatttttggaaacaagactttattgagatcagtttggttttcctgttaatttacctgtttgactttataatgtgttttagttttgcagaagaacactgttgtagtttagaaggcttttcataaatcccctcataggcaaagatgaaaacttcccactatttttttcccctcttaggaagacatactggaaagaaaatgtttagcatcttagtgtagtatagctattgtaaacagttcatgactagattttgattcggaaatctatactgaccaaggattaatcttaaggattgtataattcattaaagctgtggtctttccatgtggagactgatagaaaataattttgtcccaagtcttatttgctgactttttctgtcatgagtgagattgttgaacaaactgaatatatgggctatagcaagtagctttacagtacagatcttacaattaagttttgcttttgttaaagtgtgtaccattttttctgtttggagtaagacaaaaattgttttgacataggttccctagggtacacttgctctagcatactttaaaggccactgttgcaaagtctacattttatgctgaatctgcattctgtcaggcacccgtagaaagacctcagtacatgctttgcactctcctttgctccctttttccaatttcttattgcatatcattttgttgtaatacagaaagcagcatttttaaatgtccgtgttaagaattggcccactggtaccaactcacctctattttgtcagttcatagttgaagattttgttttatttcaaaaacaaagtacatttttgaaataatgtttcagaataaaataatctcacttttaagtgatccattttaaaatttgtaattcaataaagttttttttgttgttaaacataaaaaaaaa

SEQ ID NO: 390707 - DNA, 857 bp, Homo sapiens
aaagaattttatatatagcatgattagtatatatagcaggatttgagatttgcctagttcattcaccttaactgctattaagtttgaatatacttccttttattgaatgataaatatttaggttcagtctcctttttattgaagtaagtttttcagtattttcagtgacagtctgtgactgtgtgcatacgtttgaaaatgtcatgatttcactttattttgaatagtaatttggctgcatataaaatacaggttgactgctagtttttattagcactttgccagtattgcttaattcttattcggcttctatcattgttgagaagtctgatatcagttaattatgatttcttttaatttttttctctagtttgttttaaaatattttccttttctgtggtgccctgcggtttcattaaaatatgtctccatgcatacatgattttccatttatcttgcttaggacttttcgctttgaacactccatctgccttcacttctgtataattcttggtcatgcttattttgaatattgcttttctcttatccttgctgttttctccaagtggaactcttattagacctgtgttagaccttcttagtttaccctttgtgtcttttaagccttctttcatattttccacatctttttaggttttatttgggtagaatttctcagtgttatcctttcagtacactaattctttcctcagctttgtctaatttactttttttgatggtgatatgtatatataacataaaatttattttaggccaggtgtggtggctcatgcctgtaatcccagcatttgggaaggccaaagcaggaggatcactggagcccaggagtttgagac

SEQ ID NO: 390708 - DNA, 553 bp, Homo sapiens
gagaagtaggagccttgtgcaaggattcaggagaggcctctagaaactgaggatggccctcaactggcaagcacaggcaactgaattcggccaggcatctgggtcctgtgctaggggctaggaagacaaagagaaacagagtcacatcctcccacaaaaatccatgagatgtcggagagccgaacttgtaaacagccatcatcaacacaaagaaggatgcactgatgctctctagaggctcacaggaaatgattcatgggcatagaggtgtgcaatttgcttcctgccccagccctgaccctgagatgcagcatggagggagtagaggggtggggtttgcgaagtcacttccagtcatcgtgggacctttatggaaacctgggctccactccacaggatgagtctcaactggaacccttgcccattgggctcactgttccaatctaaagggcaggctttccactactctttgggacttgtagtttgtgggtttttttcacatgcacatcatcttacttacagttccccaagaataaaagctttccatctcaat

SEQ ID NO: 390709 - DNA, 865 bp, Homo sapiens
gagaagtaggagccttgtgcaaggattcaggagaggcctctagaaactgaggatggccctcaactggcaagcacaggcaactgaattcggccaggcatctgggtcctgtgctaggggctaggaagacaaagagaaacagagtcacatcctcccacaaaaatccatgagatgtcggagagccgaacttgtaaacagccatcatcaacacaaagaaggatgcactgatgctctctagaggctcacaggaaatgattcatgggcatagagatgtggaacctacggacatggagggccaacttcacatataatgaaatattatttggccgtaaaaaggaaggaaatcctgccatttatgacaacatggatggacctggaggacattatgctaagtgaaataagctagacacaggaagccaaatactgcctcatctcacttctgtataaaacctaaactagttaaacacatagaagcagagaatagaatggtagttgccaggagctggagggaaggggaaatggggaagtattggccaaagagttcaatttgtgtaaagtttcagtgtgcaaaataagtaaattctggaaacctcctgtgcgatatagggcatatgattaacaccactatattgtgttttaaaaaatttgctaagaaggtagattaagaaaaacaaagaaaaccaaaaaacccaaaggcagcagaaggacacttttggagataatggaaaagtttatggcattaatattggtagtgatgatggttacatgggtgtatgcttatctccaaacacatcgagttgtatacattaaatatctatagcttcttgtatgtcaattatatctcaataaagcggtttaaaaaattgga

SEQ ID NO: 390710 - DNA, 228 bp, Homo sapiens
aaatccagcccaccgcctgttcttctacagcccgtgagctaagaatggtttttacatttttaaatggctaaaaaaataaagaggaatgatactccagggcatataaaaaactatataatactcacatctcagcgtccatatgggagcacagccatcctcattagttgcctattgtctaaggctgctttcaccctacagaagctgtatggcccacaaagcctgaagtgt

SEQ ID NO: 390711 - DNA, 746 bp, Homo sapiens
gcttctttcatttaccataatgttttcatccctgttgtatctgtactcttctttttttctggctaaataatcatctatggtatggatataccacactcatcaattatccatttatcgtttgatggacatttaggttgtttccatcttttagttattatgaagaatgctgctatgaacattcacgtataatttttttgtgtggacatatgttttcatttttcttagtcatatgccaaggagtgaaattgctgggtcacatggtaactctccttaaaattgtggaaacaaaatgtaattttaaaataatccatactttgcatgtagtgggtgaacctgcagaagggatattggaaggcattctgccagagatttgagttggtcacgatgtgtttgttttgaaagtagagcttgggttatcatggtttctgagttggctcctttctgttctctgtaaagcagaacttaactgggctgagtttcttcctaggaaggccccagttaactcacatgtcagcagggcctcactgtaagtttatctcactgaaagttagtcctttggtatggacacttcaattagtcagatatcattcattcttttcataggccttgaatctggaatccacttattcttcaaacagggaatgttcacagctagatcatgaaggtctatgggctataaatggttctgttggtgttttgcagtattataattcacagaattgtagagctagaagtccaagatgttg

SEQ ID NO: 390712 - DNA, 331 bp, Homo sapiens
ggggagggtgtcaagaaacgaactggctagatatgctggttctgagaaaaaccagcaagaacaagtcaatacataatgtccttcaaaccggagcatctggctcctgtcacaggcccctggggactgggtgaactcaggacagtggacatgattcattattgtgcttgaaaacagaatccgtacagacatctgtgaattctctggatcttgattccataatttctacttagatataggaagggaagaaaagatagtacgtagcctttttttctgttattaacaagtatctgaacaagcacaaacagaagtttggaaaattatcaggttttta

SEQ ID NO: 390713 - DNA, 403 bp, Homo sapiens
gtagctggagatagaaacattaatccagtgctggggtcatcgattcagcaaacagtggtagttaagtgtgcaggccgtctgtcctgtgctgggctctgccccctcaggaagatgcatggctctggcctcctggggctagtgctgcatgcttggcaattccaatggatggactttgcaaagcagaacgtcaaccatggcgtgagtgtgtggggaaggggcccttggaggcaagcatgtaagtataactggtaatggactgcacattcctaagaagaaaatgtgaatgtcatgaattcttacagaatattgttattttacaatatttttgcaagctttacatttataaataagtatttacaatctgcatttaattaaggtgaaagctcacagggtttgggtgttg

SEQ ID NO: 390714 - DNA, 554 bp, Homo sapiens
acaataaagggaaatgaagtattgataacatagtaacatagatgaatctcaaagaattatgtcaaatgaaagaagctatacaatcaggggtatatatggtatgattccatttatatagcattctaaaaaatgcaaattgagcttttggaggtggtggatatcttgattgtggtggtggtttcatgggtatgtacagatgtactgatcagatagacaatttaaatatatttaatagtttaaatgtaagtcagttatacctcattgaagctataaaacataggtaagctgatactattttcagtacctcaccaagcttcaattttctcatcagtgaagtaaaaataataatacctgcctcacagggatttttttaacattttgtgtgtggtatgtgtgtgcatgcgcacccatccacaatacctccgtatcactccttatcaggccttatttttcttcaaagcaattataattatgtatttaattgtttacctcccccaactatactgtaaattctttgagaacaaaaactttacctattgaccactaccttccca

SEQ ID NO: 390715 - DNA, 313 bp, Homo sapiens
caaattttgatcacaagttaggctcactactaattgaaacaactttcatgattgctgcaagaagcaagtcctttatatggcagtatttccttagttatgaacttagacttgctcatttaaagtgttataaagtaaaatgaatgttaattcttccacttagaagaaagattattttaaaatgtaccaacaggctgggcgcaagtgactcacggctgtaattccagccctttgggaggctgaggcgggtggattgcttgatcccgagagtttaagtccgcctgggtaacatggcaaaatcctgtctctacaaaat

SEQ ID NO: 390716 - DNA, 374 bp, Homo sapiens
cctattgtgaactgcactggggagggatctaggttgcatgcttcttatgagaatctaatgcctgatgatctgaggtgttacagtttcatcccaaaaccatcatcccttcatgctcttgcctctgtcacttccgccacacccctgtctgtggaaaaattgtcttccacaaaaccagtccctggttccaaaaaggttgggagccactagcctaaagagtagaggaactgtacattcctacatccaacttaattctggcccaggtatgctttcatggtgccttcaagaaaatgcaatatgcagcacctcattattcatacaaataggttctatttgttcagccgaaaaacattaattacatatagcagacaaaaaca

SEQ ID NO: 390717 - DNA, 720 bp, Homo sapiens
gtgagcggatcacctgagttcaggagtttgagaccagcctggccaacatgatgaaattccatctctactaaaactacaaaaattagctgggcgtggtggcgggcgcctgtaattccagctacttgggaggctgaggcaggagaatcacttgaacccgggaggaggagtttgcagtgagctgaaatcgcgccactgcactccagcctgggctacagagactccatctcaaaaaaaagaagaagaaaacagggagaaagtgttacagcgttgaatttagcaatgatttctcgaatgtgacaccaaaagcagagataaaaacagtaaaaatacataaaatagacatcaaaatttaaaatctgtgcattaaacaacacaatcaacagaataaaaaggaaacccatggaatgggagaaaatgcttgcaatttacatatatggtaaggcattaataacccaaatatatgaataactgctacaactcaacaacaacaaaataaacaacccaatgaaaaaatgggcaaaggacttgaacagatatttctccaaagatataaaaatggccaacgaccacatgaaaagatgctcaaaatcactaattttaggaaactgcaactcacaaaaagacaccgcctcacatccattgaggtgaccactaccaagaaaacaaaaaaccaaccaaccctacaaaataacaagtattagtgaggatctggagtaactg

SEQ ID NO: 390718 - DNA, 206 bp, Homo sapiens
tttactccttgtatcaactgccagaaatagtcagtcctgttatcttaaagagtcccactagctggctgcagtgggaccacaggagcgttaagtgcctctttccccacattacgtccttctgtgggcacatcctcacctgctgacttttttctgcaatgctcattgttttctcccgtcttaagagttactgatgaacactctttcct

SEQ ID NO: 390719 - DNA, 674 bp, Homo sapiens
gtgatctgttaaaaatggaaatcaggctaggcgaggtagctcaggcctgcaatcccagcactttgggaggccgaggtaggcggatcacgaggtcaggagtttgaaaccagcctggcccacatgctaaaaccccatctctactaaaaatacaaaaattagctgggcgtggtgatgggcacctgtaatcccagctactcaggaagctgagacaggagaatcacttgaacccaggaggtggaggttgcagtgagccgagatcacgccactgcactccagcctgggcgacagagcaagactccatctcaaaaaaaaaggaaatcggatcgtgttatcacctatataagtcctttgggtagctttctgtacacctggcatcaggtgaaaactactggcccagcctcaaagcccaacatgctcgtgcccctccaaattatctggccgcccctcactgcaagctgtcctcctgcctgttggtctttctcatccttggacacgtcaaattcttcctgccaactgttccctctgctgataatggctgctccaatcttcacattgatgggaacttcttgtcactcaggccttaagtgtcactactgtagtgggcctttcccagaccatccagtgtgagggcccccttcccacgccactccctccatcacctctgtctgtactga

SEQ ID NO: 390720 - DNA, 434 bp, Homo sapiens
gtaaataaacctgttctgccagtcataaaagcatagcacgtataattaggtacagtacataatacttgataaatattaacaattatgttactagtttatctactgtacttttagtagttattttatagagtgcacttctacttattttagaaaaaagtaaagtgtaaaacggcctcaggcaggcccttcaggaggtattccagaagaagacattgttttcgtaggtggcgatagctccatgcatgctattgcctctgaagacctttcagtggtactgtccagtgatactgatgattctggccttgggtaggcttaagttaacgggtgtgtgtgtgtttgtttttaacagtatttaaaagtgtgtgtttgtatttaaacagtaaaaaaaaaaattaaaaaatagaaaaaagcttatagaatcagaatataaagaa

SEQ ID NO: 390721 - DNA, 786 bp, Homo sapiens
tgaagaaaataaaacaggatgctgtgccatagtgtgcctggagctgccacttcacctctctatcagcttcattgttttatctgtaaaatggggctaatacagtcttgttatttgtggtagttccataaagttgaattgtagaactgaattaccaaatcttcaaccattgctcctaggggaaatacagggctaggttcctgcgagcctctggtcactttttcaacctgtcaatacataaccttattttatgtgtttctttttttttctttttttgagacagggtcttgctctgttgcccaggttagagtccagtgacatgatctcactcactgcagtttctgcctcccaggctcaagcaatcctcccacctcagcctcctgagtagctgagacctcaggtgtacaccaccacacctggctaatttttgtatttatttactttttggtagagacagggtttcgacatgttgcccaggctggtcttgaactcctgggctcaagcaatccactcacctgggcttcacctgctgagattacgggtatgagccactgaacctggcctgtttcatgtgtttctgtttatttttatttttaatttttatttttttgagacagtgtcctgctctgtcacccaggctgtatagtacgagagtgtatcataggccaggcacagtggctcacgcctgtaatgccagcactttgggaggccgaggcaggtggatcatgaggtcaggagttcgagaccagcctgacaaacatgctgaaaccccgtctctattaaaaatac

SEQ ID NO: 390722 - DNA, 211 bp, Homo sapiens
tccataaataagctgtttctgtaacctctaattcaagctagaatcaaacatgtgaaaaagaaaatattctactctatttcatgctaatgcctaagggctggtacataatacctgttaacttatgtacagtttaacaaaatatttttcacccatccatttataaatactcattgaacacctactatgggtcaggtgctattcgaggcacata

SEQ ID NO: 390723 - DNA, 262 bp, Homo sapiens
ggtggggaagatgcctgtctttgggacaagaaggagcaggttaaaggagatcaggagaaggtcagagagattatgttttctgaggcctgctcatgaggccttaaggcgcctcaacagtataacaaaagctatgggagttatgagctaggagctgcggacaaaaaccaacatgtatgtatgtcataatatcacagatggtaagcatggttattttctaatgtgtctaatttccaatatgcttagtcctgtttctgtttttagt

SEQ ID NO: 390724 - DNA, 330 bp, Homo sapiens
gcacgagataaatcgctgcttatgaaatgcaaggaatcgagtgtcatggaggggaggaagggaagtaacagggagaagaactgtgagagatggaggtccagccaggcccgggctattaatcatcgccctccattatttcctgaagattcattcattgttccataggtacctagagggtcaattagagaccacagacaggctttttcaaagacgcaagagggtcaattaggccctccttataattttctgctttaacagcaaatgccagcctatcgtgcatcagatgcaagggagtttggaaataaacagggtactttccctcctcctcta

SEQ ID NO: 390725 - DNA, 675 bp, Homo sapiens
gtgaaatatcagagcagcagctgttgtttacagtgggaattgtggagtttgtgggtggtagaggaatatagaaatcttggaaacacaactcttgaaattaaaaccaattctaaggtgagaagttaaaaaatatcaccatatctctgtgaacataatgaccagagccgaacgatcatttgtattacctcaattgaggtaggaactaccagcgagttataaaaatagccagggtgctttgatcaattgcgtacacgtggccactaatacattagacctatgataaaagatctttttggctttttaaactccaaacttttaaattccctctggaattgaaactatcttaaagatgggaagcagattgtgctcattttgcttttgttatgtctgggatatttctaatctcccttgcacgtataaaaatcattgttagtttcacacaatttaactttatagcaaggttctgctgcaagacacttctggaaagtgtcccagataaacaccattaaaatctccacatagctgcatagagaactgctgtcgccacaaaagtaagggaaggtggttcttgcactggagggttttcaaagcagcatttccgctttcaagtagctcatcagttggtttgttctcttcaaaaatggactcacccatttccaccagtgttctgcaacc

SEQ ID NO: 390726 - DNA, 679 bp, Homo sapiens
gtctagacaaaggcttgcaagcgtctagttttgtgctgtgtgcagctgctggcttaacacaatgtggaagccaccaagccttgaagcttgcaccctctgaagcagtgacccaagctgtacctgtgcatctttcagccaaggctggagctggagcctcaggaatgcagccagcagtgtcctgaggttggacatagcagtggggccatggggctggagaaggaaaccattcttttctcccagacctcagggcctgtgatagcaagcgctgctgcaaaagtctctgaaatgccttcaagacctttttaatattgtattggctattagcactgaactcctttttatgcacatttctgaagactttttgaactttcccactgataatcagcttttctttttggccacttggccaggcttcaaattatccaaacttttaagctctccttctcatttaaatacaagtttcaccttgaggtcatttctttggtcacatataggaccacaggctgttcgacacagacaggaaacctcttaagctttgctgcctaaaatttcattccaccaagtacactctaaattatcaccctgatgttcaaaatttcacaggtctccaggttaggggcattgtgcagcaacatcctttgctaaggaaaaaacaaaagtgaccttgactcctgttccc

SEQ ID NO: 390727 - DNA, 143 bp, Homo sapiens
tgcccagtggagaagtttagggaaaattatcttacatttttcatcgaagaactggtattgttgatttaaccgtcttttcccatcaccattgttcctatagcaatttttagactgggtggaggaatctacttctcatttcaatt

SEQ ID NO: 390728 - DNA, 543 bp, Homo sapiens
ccagaaagaaaatctcagaccagtaaagctctgaatggaggtttgatctcaataccaaggacaatataagcagagttgctttaaggatgctattgctgttgtccatgggaaagaccctttatgcctgaattattttgattccagattgaaggaaaaactgctaatttcagttcgttttatagaggctggagttttgggcattcctgtttgactgtaaactctcaataaggtagggaaataaatcagaaatcatgggtgtacatttttagagaccttgacagacttattttgcagttggggcttcagggcccagaatcttttagcatccctgccctagttgaaatcagacacaccctctccctggtatccaaacaaagctagttcaggtgctgccctgaagggatttggttgatgtgaagttccaagtccttaaattaatcaacaggagtactctcctggatgggcctgatttgatcaggtgggtgacatgtaagttctcctcctttacaggggaagacaccaggactcggagagtcccacttc

SEQ ID NO: 390729 - DNA, 284 bp, Homo sapiens
ctagcttctggaccctttccttgtgtaagtgggtttgctcttgaaaagaataagcaagataacacatgtggaagcctctagcatggacccactatacaggacatgtcaatcatttgtggggtttcaaactgaaatctttcttgatcaaaccctcaaacacacttctaattgcctgtttgctgtaacttgacttcaaatgtcttctcttttcaagtggaggtttcctgctgtggccccagggaatagctgctacctctgggcgctggtctgggcactgctgcctt

SEQ ID NO: 390730 - DNA, 244 bp, Homo sapiens
aaagaatgaatacacagtgggaagtaatggaatttgtattagttaatcaaacatatgttgttattttctttctttttttaactctcacttttgcatctttaaatagcacacttttttaatttatggaagacttgtattcttagaatcttgtttcaaaacagttcatgctaaatccagctatgccattctttgtattatttcttgccccaaaaagtaaaaaactgcttagcaattaaggccttca

SEQ ID NO: 390731 - DNA, 383 bp, Homo sapiens
tgtgcagcagctgaaactcctcctccgtcctgatgccagcctccaggcagccacagacatcctcttcagagaagtaggtcttgcgggaggacaccccctcataggccaacttgcccatggttcgggctgcataggccatcagggacaaattggaggggtcagtgctgtccagggtttccccgctgaagttgaggcgcaggaagctggtatagatgcttgtaagggtctgcccagcaggcgtgggggcatgcaggaagtgcaaggtggcacaaacgagccagcaataggacggcaggaagcaggcagcggctatctggtggtgcccctccaggttccgggagagcatctgcaccaggtggtcacgctgagctggtgtggcagag

SEQ ID NO: 390732 - DNA, 321 bp, Homo sapiens
gagtggagtggagtagaactcttgagtgaatttagaagcatgagctaagggatgatctaaggtggaggattatctttgcagtcccctctttccccagtggtacttctctgactgctgctcctccatagaaatggagcacaggagacccttgctgttcatgggtgtttgtctttgggttcccacaaatagggcagtctgagatattatgtaacctggtgataaggatttgtgtggaaaagaggactcctactcccatcatccagacaccttttttcctcccaagcttttgtttccatattgtattcatttattgccagttgc

SEQ ID NO: 390733 - DNA, 514 bp, Homo sapiens
tacatgtcctgttacacagtcaatgccttccctccatgctctgaccctactcaaccactgatctggtatcacaatagctttgccttgtctagactttcacataaatgaaattataccatctatagccttttgtgtctggtttccttcattcagcacaaagcttttaggattcatccatgttgctttattcatagcagtttattccttttttgtggagtagtattccattgtacagttatatgccacattttgtttctccatacaccaattaatagatgtgaattatttccagttttgtgctagtattagatatgttttcatttctgttgggtaaatacccagaagtggaattgctgtgctacatggtaaacagatatttaacttattaaacaattgccaaacagcttctcaaactggctgtactatttcgcatttttatcagcaatttctaagagagttccagttacttaccatccttgtttgcacttaatactgtcaatttttgttttgtagc

SEQ ID NO: 390734 - DNA, 286 bp, Homo sapiens
cggaccttgcctgataactcttccatctcagtgtagtttaaatctgttcttgcaatctgtatggacactctaggtagccttctggcattgctactgcagcagccttggaacgtgatttgggacacaacacagctcaatttcaggcacagtggttggcttttaaagtgctgtttttttggagagggagtctctcgctctgtcacccaggctggagtgcagtggcacgatcttggctcactgcagcctttgcctttgggttcaagtgattctcatgcctcagcctccc

SEQ ID NO: 390735 - DNA, 341 bp, Homo sapiens
cccagttatcagaggtcaactgcagtctgaaaatattaaatggaaaattccagaaacaattaatgagttttaatttgtgagcagttctgagtagcataataaaatctcacaccatcctggctctacctgctgtagatgctacctgcccattagtcacttgtagctgcctcggttatcagattgtaaaaacagtattatgcagggttcggtactatctgcagtttcaggcactaagtggtgagtcttggatcacatacccacagataaggggagactactgtaaaagttactagcaattcacacaaatctatcaatgctaataatagtttatcttgtgtgct

SEQ ID NO: 390736 - DNA, 603 bp, Homo sapiens
tcaggtaaaggtttaccattttagctggatgtggtggctcatgcctataatcccaacactttgtgaggccaggagttcaagaccaacctgggcaacatagcaagaccccatctgttttaaaaaatgtagctgaatgtggtgatgtgtgcctgtagtcctagctactcgagagactgaggtgccggtgtagcttgagcccacgagtttgaggatacaatgagctatgattgcaccactgcacgtcagaatgagaccctgtctctagaaaataaaaaatgataaaagaaagctttgacttatttgagcacgtgagaaaggggaagaggaagaaacctttattaaatgcagatttaaatgccttgtgcagtcttaggcattatttactcatcataaaaaccctataaaatagctattagcattttcaaattagagattggaaaacaaacgtttagacggttcaagtcctttaaactaggccgtatagagtagaaagtatataagcatgtgaatgatacaacaagaagtaaacagaaaccaattcagtatatgtctggccaatgaggtatgattctgagtccacacacacatacacacacacatgca

SEQ ID NO: 390737 - DNA, 407 bp, Homo sapiens
tatcctgtagaccacaaagcgagcagagaattgttgtgcatgagaatgacatgatcagccctgttttttaggaaaaaagcttgacagctggggttggagaaatgagagaaaaggaagcaggaaaacagtgggattatgaactgaggcagtggcattgggaatggagcgggcatatattaagagacatttctgatgtagaattgatgagaatccatagccagttagttgcaggaggggtaacagaaaatatactcgtgtaacaaacctgcacttgtatcccctgaatctaaaataaaaattgaaattacttaaaaattttaagaaagaaagaaagaaaaatggagaaaccaaggacaggactggcatgtcaagtttgggagattgtataaacagtattcaacttagtt

SEQ ID NO: 390738 - DNA, 268 bp, Homo sapiens
aattcttactgacaggtagaccctcaaaatttggggtagatctcttttattttaagtagcattactatgaatgtaaatgtctagctttctaactttatttgaagaatagcaaattgttaaattaagtttgacctggatgcagtggctcatgcctgtaataccacactttgggaagccaagacaggaggatcgcttgatcccagaagttaagaccagccttggcaacacaacatgaccctgtctctataaagaaaacaaaaatgaaaaa

SEQ ID NO: 390739 - DNA, 486 bp, Homo sapiens
agatattaagcatgtgttcaacattagcccccaagcaaggggggacacaccttcactggggggagtgtgactctcctactagcccggcaagtgaactattcacacttcaggaaggagacatgcttaggaatttccattaagcagtaagcaacgtctttgatcttttcacctgcaggttttcgaggtgtgtgtgcatgtgtatacgtgcacatgctacacagagctcctcgacaagcacctgggagtccgcctgtgctgataaaatgacttacgtagaatcagggcagggaggaagtggcttttgccttggagcctcttcaagtctaggtttggcttgtctctcgagaagggtctatacagctgagagacacatggacagttctgacaggaggcaagttcatctcacaactttaaacatacccatatgttctcatcatttagctcccacttataagtgagaacatgcacaaagaggggaacaacaca

SEQ ID NO: 390740 - DNA, 646 bp, Homo sapiens
gtgtcatcgtttcctttcccttctgggttttgttttgttttgttttaatgtatgagaaactgccttactgaggaaggagaatcacttaaatggtactcggtgcctgccctgtccttctctcgccttggggaaagaaagaaagaaataacatccgctccttgatctgtatgcacaggagaaacagaacaccctgtactttctgagcagataaaggagagaagaaaaaagtgctggctcagccaggcagggaagaggaggagggcgggcaacagacacttgccttcttgctcctgcttccatggcaaagtgggggtgtgagcctcttgcccagcgcctgcacccacgccttgaggttattctccatgtccccaagcaggcaatgcctaggagtgccaagaaatcaggccagccagggcatgagtgcaccccccggtcccctggcaatttcatccaagataccacgcagccagttctccagcctgcaggccaccgcctcccccagctgtccagagccaccaccaccctgactgaagtgtcccaagaggccacattggacacaggaaggcagcagggtatggagagaggaaaagagggaggaaaaaccccgtcctgtggcagggttgccaaagacggatgaatagaataa

SEQ ID NO: 390741 - DNA, 329 bp, Homo sapiens
ttcagtggaggctctgtacatccaggtgttgaggggtcctggctgcaaaatgcagtcatgtgtcatgtgttgaaactgtagcaaaagggatgaatgctcttttcagtctggtttgctttggtaatgttcttgtagaccaactacacgtttttgtttctttctacaggaataatattaagtatatgtaaaaatgccactgcaaatttgatgttgtttagtaagggcagttagctatctgtaaaaccagcagaaaaatatgctgtgttattggctaataatatacctatttttagaggaaataattttttcttgtctaatttttagccaga

SEQ ID NO: 390742 - DNA, 432 bp, Homo sapiens
caaagaggagccaggtcatgtatacatgatgattagggtagagaaactgactaccctttatcagtagagccaaacttccggatggatagggtgagggagtcaaggatgaagacaacattggtaattggttaatagcaagaatacagttgacagtaactgagatagttgtgaacggagaaagggaagggggatatgagtcaaattttcaaaacacaaagttggaaatatctgttagatgcccaagtaggatttcaaaataggtagtgagatctagaaatctggattggaggaactagttgggggatttataaatgtggttttaagccataaattgggatgagatcacacacaaaaaagagtaaattgaatgaataaatggtggcttatttacttaatgcaatattagtcatctatataacaatgacttcttat

SEQ ID NO: 390743 - DNA, 148 bp, Homo sapiens
gggatggatgagtgattttccctgcaggccgctcagtcccaccacaaatatttgagaatagtggggaagaacaaacagagacttatgtgccaagagactaatatttaacagctataaatcaaactatcacactgttgactaaaacgtg

SEQ ID NO: 390744 - DNA, 549 bp, Homo sapiens
ttgttctgactactaaaagggggtgaaaagactgtaaaaaaaaattggttgaatttttgctgaattcttgccagtctgtgtaaaaactagaataacttacacttatttccaaagaactctatatttgaaaaacgttcacatattaacattgcaatgtgttctcaaagaactttaaaattaagtgacattacagttcaaatcacatattatgataattcaaattaatggctccttgggaaaaaacctttgtaatgaaacagatgaagttgaaaaattaatacattgtgctaagcaaaactgtattgttcaaaactgcacacaacaaaaacatatcgtaattcctttccctcagttgaataaaccctgtgtttaaaaaaactaaaacaaagcctgttgtaaagtctgcaatctgtcttatgcatctcatgtcttttccttccagatttttcccccgttccctagttcatgtgactaataccttcataatcaatttaccatcttcctatcaaaacagtaatgtgttttaaacctgctgtgactaattgtaaa

SEQ ID NO: 390745 - DNA, 244 bp, Homo sapiens
agaaactgtgaaactgaaattacttacattatttgataagctaaacccaaaattcatgaggaagagaataagtaaaacaaacaaacaaacagaaacccagacgtttataatggacaaataattgttcactcatatttgttgtccttcctggaggtgaccctcccagtgggaatatcacatatttttgctccattaattcaggagtggtcgagtgattttcttcagccagtgagacagcatagaa

SEQ ID NO: 390746 - DNA, 531 bp, Homo sapiens
actcagggatgggcacctgggttccaatccttgttgctccattcactagctgtgtgcccctgggcaagtcacttcactgtcctagaattcagttgacttatctgtaatattggaagaatagcgcctgggaagtagcgaggaccagataaattgtaaatgtacccagcccagtgctgacacatagtaactcggtggcagttgcaggccaggggaacagttgttaactcatcaccagaggggccagaactgggcagggggaaaggtgtcctgagtgggagatccaggtcttggggtgctccgactctggatctctgggaagaggaatccccaactctgcttcccaagtagctagaaactgacttaggagggggacagcgtatagggaacactgaaatgctgctgtaaacgatggctggagttagcctcatctgaactctgtgtttgagggtacacactctgaagtcagatgatacggattcagatctgcctctattatatactatgggacaagtgacttcacttctctgtgcc

SEQ ID NO: 390747 - DNA, 341 bp, Homo sapiens
tgcagctgagcggtgacctcagccagtgtcacaaggagcagaagagacatccagctgagccctttaaaaattcctgacccacaagcaggactgaatcacttaacgttgtcttgcttgagtgctttgacccgccatctcctcctcctaccaactcttaattccgaggcaagagaatcctcccaagaggaggccactagtagcagagctgaaacaaaagcctcagaagcagtggggaagcattttacctgcagctctggaaaacgacctactgaagaaagtttcagatggggaaacatttagatttgacctaaatggggaaaaaaagtttataatagaaggac

SEQ ID NO: 390748 - DNA, 1931 bp, Homo sapiens
  misc_feature (3)..(3): n is a, c, g, or t
  misc_feature (5)..(5): n is a, c, g, or t
  misc_feature (10)..(11): n is a, c, g, or t
  misc_feature (1513)..(1513): n is a, c, g, or t
ccnangcgtnnggcagccggctgaccgagaagctcctggaaggtgctccgaccgaggataccttggtccagatggagaagctcgctgatttagaagaggaatcagaaagctgggacaactctgaggctgaagaggaggagaaagcccctgtgttgccagagagtacagaagggcgggagctgacccagggcccggcagagtcctcctctctctcaggctgtgggagctggcagccccggaagctgccagtcttcaagtccctccggcacatgaggcaggtcctgggtgccccttctttccgcatgctggcctggcacgttctcatggggaaccaggtgatctggaaaagcagagacgtggacctcgtccagtcagcttttgaagtacttcggaccatgcttcccgtgggctgcgtccgcatcatcccatacagcagccagtacgaggaggcctatcggtgcaacttcctggggctcagcccgcacgtgcagatccccccccacgtgctctcctcagagtttgctgtcatcgtggaggtccacgcagccgcacgttccaccctccaccctgtggggtgtgaggatgaccagtctctcagcaagtacgagtttgtggtgaccagtgggagccctgtagctgcagaccgagtgggccccaccatcctgaataagattgaagcggctctgaccaaccagaacctgtctgtggatgtggtggaccagtgcctcgtctgcctcaaggaggagtggatgaacaaagtgaaggtgctttttaagttcaccaaggtggacagtcgacccaaagaggacacacagaagctgctgagcatcctgggtgcgtccgaggaggacaatgtcaagctgctgaagttctggatgactggcctgagcaagacctacaagtcacacctcatgtccacggtccgcagccccacagcctcggagtctcggaactgacccgtcacacacacctgcctaaagacagggatggctgtccacaggatcctccagccccgtgagagggactgtcccttgagtttctcaactgctggaaggagctgtgtcccagcaaggaagggaaaccatcagggctgggctcggccctgtcaggtttggggcctgtgtgcttcccagactctccctccagccgttggaatcgctgaagatggcaatgaaaggcggagggatgatgggctctctctgtgttcaaactccttggagagacgactaggaggacagcttgcctcccaggccccttgtggacttagactcaaaacccgcaggagaaacaggtccgactcagtatgcagtcgcaataacatgtctgctcccgaggttaacattcaagcgtttctactttgaaattcagcaagagtttctgggccttatgtttgagggtaccttttgctgcagttgtgaatattcagtacattgccagctcttggtcactgagtgattgagttagggctccgcaagagactttggggagtgaagtggatctcttcctcatcttntggtcctctgaaatgtgtgttctgaagccatggggctcgtcttctggggtgttcccctgcaggtgctggtgaaggtaacctggggcttaatgatggagtccctgatcatttttgcacaagacaggttgctgaggggtcggcaagcatctgacttgcccaatcccctggatatggtgagccccgccatgcttttattctgtatcgcttttgtctttattgctgctttcaacatttacgtttggttacagttaactattttcggagtgtggtgattgaagacaatttcatcatcccactgtacttttttttttgagagggagtctctgtctcaaataaagaaaaaaaaaaagataaaaataatttttaaaaagtaaagataggcctgggcaacagagtgagactctgtctcaaataaaga

SEQ ID NO: 390749 - DNA, 489 bp, Homo sapiens
  misc_feature (3)..(3): n is a, c, g, or t
  misc_feature (5)..(5): n is a, c, g, or t
  misc_feature (10)..(11): n is a, c, g, or t
ccnangcgtnnggcagccggctgaccgagaagctcctggaaggtgctccgaccgaggataccttggtccagatggagaagctcgctgatttagaagaggaatcagaaagctgggacaactctgaggctgaagaggaggagaaagcccctgtgttgccagagagtacagaagggcgggagctgacccagggcccggcagagtcctcctctctctcaggctgtgggagctggcagccccggaagctgccagtcttcaagtccctccggcacatgaggcaggtcctgggtgccccttctttccgcatgctggcctggcacgttctcatggggaaccaggtgatctggaaaagcagagacgtggacctcgtccagtcagcttttgaagtacttcgggtgagaacatcttttccttaggtgtgcggcgcagggcagtattggcctggtgcctggcgtcaggtggggatgccaaggtgcaccgactgcccagcac

SEQ ID NO: 390750 - DNA, 1888 bp, Homo sapiens
  misc_feature (3)..(3): n is a, c, g, or t
  misc_feature (5)..(5): n is a, c, g, or t
  misc_feature (10)..(11): n is a, c, g, or t
  misc_feature (1513)..(1513): n is a, c, g, or t
ccnangcgtnnggcagccggctgaccgagaagctcctggaaggtgctccgaccgaggataccttggtccagatggagaagctcgctgatttagaagaggaatcagaaagctgggacaactctgaggctgaagaggaggagaaagcccctgtgttgccagagagtacagaagggcgggagctgacccagggcccggcagagtcctcctctctctcaggctgtgggagctggcagccccggaagctgccagtcttcaagtccctccggcacatgaggcaggtcctgggtgccccttctttccgcatgctggcctggcacgttctcatggggaaccaggtgatctggaaaagcagagacgtggacctcgtccagtcagcttttgaagtacttcggaccatgcttcccgtgggctgcgtccgcatcatcccatacagcagccagtacgaggaggcctatcggtgcaacttcctggggctcagcccgcacgtgcagatccccccccacgtgctctcctcagagtttgctgtcatcgtggaggtccacgcagccgcacgttccaccctccaccctgtggggtgtgaggatgaccagtctctcagcaagtacgagtttgtggtgaccagtgggagccctgtagctgcagaccgagtgggccccaccatcctgaataagattgaagcggctctgaccaaccagaacctgtctgtggatgtggtggaccagtgcctcgtctgcctcaaggaggagtggatgaacaaagtgaaggtgctttttaagttcaccaaggtggacagtcgacccaaagaggacacacagaagctgctgagcatcctgggtgcgtccgaggaggacaatgtcaagctgctgaagttctggatgactggcctgagcaagacctacaagtcacacctcatgtccacggtccgcagccccacagcctcggagtctcggaactgacccgtcacacacacctgcctaaagacagggatggctgtccacaggatcctccagccccgtgagagggactgtcccttgagtttctcaactgctggaaggagctgtgtcccagcaaggaagggaaaccatcagggctgggctcggccctgtcaggtttggggcctgtgtgcttcccagactctccctccagccgttggaatcgctgaagatggcaatgaaaggcggagggatgatgggctctctctgtgttcaaactccttggagagacgactaggaggacagcttgcctcccaggccccttgtggacttagactcaaaacccgcaggagaaacaggtccgactcagtatgcagtcgcaataacatgtctgctcccgaggttaacattcaagcgtttctactttgaaattcagcaagagtttctgggccttatgtttgagggtaccttttgctgcagttgtgaatattcagtacattgccagctcttggtcactgagtgattgagttagggctccgcaagagactttggggagtgaagtggatctcttcctcatcttntggtcctctgaaatgtgtgttctgaagccatggggctcgtcttctggggtgttcccctgcaggtgctggtgaaggtaacctggggcttaatgatggagtccctgatcatttttgcacaagacaggttgctgaggggtcggcaagcatctgacttgcccaatcccctggatatggtgagccccgccatgcttttattctgtatcgcttttgtctttattgctgctttcaacatttacgtttggttacagttaactattttcggagtgtggtgattgaagacaatttcatcatcccactgtacttttttttttgagagggagtcagcctggtgacagcgtgagactctttaaaaaaagaaattaaaagagttgagac

SEQ ID NO: 390751 - DNA, 1563 bp, Homo sapiens
  misc_feature (1145)..(1145): n is a, c, g, or t
tctgagtcctgctgtcctcctcagaccatgcttcccgtgggctgcgtccgcatcatcccatacagcagccagtacgaggaggcctatcggtgcaacttcctggggctcagcccgcacgtgcagatccccccccacgtgctctcctcagagtttgctgtcatcgtggaggtccacgcagccgcacgttccaccctccaccctgtggggtgtgaggatgaccagtctctcagcaagtacgagtttgtggtgaccagtgggagccctgtagctgcagaccgagtgggccccaccatcctgaataagattgaagcggctctgaccaaccagaacctgtctgtggatgtggtggaccagtgcctcgtctgcctcaaggaggagtggatgaacaaagtgaaggtgctttttaagttcaccaaggtggacagtcgacccaaagaggacacacagaagctgctgagcatcctgggtgcgtccgaggaggacaatgtcaagctgctgaagttctggatgactggcctgagcaagacctacaagtcacacctcatgtccacggtccgcagccccacagcctcggagtctcggaactgacccgtcacacacacctgcctaaagacagggatggctgtccacaggatcctccagccccgtgagagggactgtcccttgagtttctcaactgctggaaggagctgtgtcccagcaaggaagggaaaccatcagggctgggctcggccctgtcaggtttggggcctgtgtgcttcccagactctccctccagccgttggaatcgctgaagatggcaatgaaaggcggagggatgatgggctctctctgtgttcaaactccttggagagacgactaggaggacagcttgcctcccaggccccttgtggacttagactcaaaacccgcaggagaaacaggtccgactcagtatgcagtcgcaataacatgtctgctcccgaggttaacattcaagcgtttctactttgaaattcagcaagagtttctgggccttatgtttgagggtaccttttgctgcagttgtgaatattcagtacattgccagctcttggtcactgagtgattgagttagggctccgcaagagactttggggagtgaagtggatctcttcctcatcttntggtcctctgaaatgtgtgttctgaagccatggggctcgtcttctggggtgttcccctgcaggtgctggtgaaggtaacctggggcttaatgatggagtccctgatcatttttgcacaagacaggttgctgaggggtcggcaagcatctgacttgcccaatcccctggatatggtgagccccgccatgcttttattctgtatcgcttttgtctttattgctgctttcaacatttacgtttggttacagttaactattttcggagtgtggtgattgaagacaatttcatcatcccactgtacttttttttttgagagggagtctctgtctcaaataaagaaaaaaaaaaagataaaaataatttttaaaaagtaaagataggcctgggcaacagagtgagactctgtctcaaataaaga

SEQ ID NO: 390752 - DNA, 153 bp, Homo sapiens
ggatgctttcagagggtctaggctcagttccatactcctgggctgcattctctaaccctgggtctatagctttgtcctctggtccctcgaggtcaagtcctacctgggctggagtggccaagttattccagtactgctggcaacagcattctt

SEQ ID NO: 390753 - DNA, 667 bp, Homo sapiens
ggcacctggcccagtcacatatcatgtggaacttttctatgtggagaaaactctgtaggtatattgttttccaaattgacatttgtgttttatgggaaaaacgcagatgagctagagtaggctcaatttttcattaagtgtgcattggggaaaatctgagctttcttccttcctgtggttcgagttctatttccagttgttaattgggaagttgaatgcctgacagctgggccaagtaaattgattgccataaagaaagcaacacactctgaggaaagcactggaagtctgcgactacttgttgttatgtgacacaaggcagccaaaataatcagacttttttgctaagcatatggttgccaaagataattcccagaagtcttcattcaaggaggccgaaatctcagtgttcaatatagaggatatataacattagatagtgtaagagattcagagtacctttaaactctggttttgcaatgtctggtcaccttgcaaacttatgggatagctgtgttatcatggatatgatgtaatgctgaaaatgacacaaaattttgtctgttttgtctctgttttgctttaagagaagtagctagatgcaaagtgatgaagataaatgccctcttctttctttggggagttacatgtttccatgggaatacat

SEQ ID NO: 390754 - DNA, 731 bp, Homo sapiens
agcctgggcgacagagccagactccatcacaaaaaaaaacaaaaacaaacaaacaaaaaccaaccctcccagagctctcagctcactcggtaaaagccaggtcctgacacgggcattcgtggtcccacacgagagcctgcctgctgcttcttcaatcacacctcttaccacccatggccccttgctcactccactcgaaacccggaggtctcctttctgtttctgcctcaggacctttgcactggctgtcttccaacctgaaaggttgcttttgcccttggttcctccaggtcttgactcaaatgtcatcttaccagtaaagtcttttcaccttggcagtttttatccctctttcttgctcagtttttgttttatattacattgcacttaacaccattccatacttaataccaaacaacgtcttctttgtttattatctgtctccccctaaaatgtaagttccatgagatttttttttttcattgctatatccaaaatgcctagagttgttactggaacatagtaggtggtctgtacacatgaaccaaatgaatgagttattttgaagatcaaagacaatgaatgtgaaagtactgtacaaatgtacaatgtttggttattcatatgaaaatgaagtttccttgatacaccaaagtctacaccagtagaatcgaatttgtgatgtttgaaaaaagcaaataacaaaaataaaaattttcagttggaaaact

SEQ ID NO: 390755 - DNA, 108 bp, Homo sapiens
gcacaaatcattttgttatataaacttctctggcagttacaggaatataattttctggggatatgctaaaccaagcccactgataagagtaacagaccaaaggaaaca

SEQ ID NO: 390756 - DNA, 476 bp, Homo sapiens
accaaggagagaaaggacgctctgaaatgctccaaccataaaagtggggtgggggagttagggactcggtgagtctgagcaggagactgtggactcttccagatgggagctggcagccagtgcagctgtgcagggagcgctggccccaggggagaaggtggtgggccctgagatgtggaaggccgagcttggccacaagaggaccagagaggtatggcttaaggctggagttagggtggctctctgggcatctgccacggcaaaagcagcttggagcagaaccttgaagtcctgggcaagtgcaaaaaccacaccccagggggagagaaaatacttttgtattttgggggagatgagatttctagagtaactccgggcctggtcaagtgggactttgaaggcccgatgaaggtcaaggcctgatgggggctcaggaacaggccaggaacagcaggttgggaagctggacctatgct

SEQ ID NO: 390757 - DNA, 140 bp, Homo sapiens
atagaagaggtatcacagaaacagacccaagtgttgaaaaattgtaacatatgataaagatgaattataaattatcaagaaaatgatacattgttgaagactggtgctgggacaatcgacaagctgaagaactggtaaaa

SEQ ID NO: 390758 - DNA, 889 bp, Homo sapiens
tgatcatattctgcttgtaagtacattgagtctaaaatctcaagaacaaaagatactgagaacataattaagaggatgtataatgttcatgtatcattgtgtgatgggaaaagtccctcctttataaaataaggagctgaatcagatgattccttaagattctttcctaattcattaagagcatggctttgatgtatgacagacttaggttcaatagctggctatgtgacctcaagcaaggcatagcttctttgggtctgtttttctcagctgaaaaaaaaaaaaaggtatagaagtaatacctaacttacgagattgtcagtactaattaaaaatgatgtatacacagtatttagcactgttattagcattctctattattttattgtttatatttttacttgaatattcatttggatataatacttttagtaagcacttcatgatttacagagataatctaggtgaagaatagaatcttggacaattaagacaggtatgaaccaacttcccacccaatacagatctttggcaggtggttatccaaactctgcttgaatatgtcctggaactgcaaaaaagaaaacaaaaaaatcgataaccttatcacccattgttaatttctgatatatactagtctagacttttcctatgcctttatacattttttaaaacaaaataaaattttttttctatgctacatatttttaatgaggttataacattatcatgttttgcccctaaggtattttaccatcagtgagtataggtctgtggtgtcatttgtattgactatgtataaattcatctgtgacttaaccataatttaaccaataccctattttttctttttgcgcatttggacattcattcattaaacaaatacttc

SEQ ID NO: 390759 - DNA, 303 bp, Homo sapiens
aagatggcaccaccgcactccagcctgggtgacagagcaagactctgttcccccagaaaaagaaaaacaataaacattgttttctgaaagatgtgctgaaaggtaggctggggattggatgatccaggatggtgtcagctggtcatatgggtttggagacacaggtttggtgggactgtgcctctggttgagctgattttatttattctgggtcccaggctgcctagggaaggtctcctcttggtgagggcagaagtgtgagagggcacgtagcaacacatgcacctcctaaagcttaggcat

SEQ ID NO: 390760 - DNA, 483 bp, Homo sapiens
tggaagggaagtcttatcagtgtcggtgctaatgacatccaccacacaggaaggatcaatcagacacaaagcagagttcctggaaatgaacaaatatggtggccaaaatcaacactttttaacaagggaactgaataacagagaaacctgtaagacagataacacctcccagaagaaaaacaggagggaggaaaaaatgagagaaaagctacaggatgcttggaagagatgcaggaagtctaatattccctgtggtgcctacaggacatacagggaacgatgcaggagaagaaatcatcagagagatcacaggagaaaaatgtcctgagctaaaggaagattcacacgtccagactgaagccaaggggttgagctccaaggaggatgaacggaaaaagcaaaccaaagcccctttagacacttgggagctcctggtctcagacaatgggtgacagcgccttagctctttactacatgcactca

SEQ ID NO: 390761 - DNA, 467 bp, Homo sapiens
aggaagagatttattacagctgtggggattaactgtattctcctggaagttgattttctgataggttaatgcaaaagtcattgcaaaaactgctattacttttgcgccaatttaatagttcacttgtttactttttaacctatattggcttaaattcactttttagcccctctttgtcataaggttctgtgctgcatttgctacaatagaagctcctatggttttaaagaaagttcagtgttttgtcagtgtcaagtgctacttgatgattatatttgtctggaacagtattcacttaagtctgtttatagcaatcccttttttgacaaaatttacaaagttggcatttttactttaaattccatctctatcagtgacttcctaaaaagagcaacttagaaattgggggaaaaatgtttttaaagcccaaatgctccagtttttattcaaagtcaaagtcgttattc

SEQ ID NO: 390762 - DNA, 419 bp, Homo sapiens
ctgctcaagtcttttgctcattttaaaaatttggttgtttactatttatttgtcctttgtgaagtatacgtgttgtgaatatttttttccagtttgtggttcatctattcattttctcagtgatgtctcttatggacagcaatttcttattttgatgaaattcaatgtatcttttttaaattttaggaagtggtaggcagagaagcccctctctgacaaaaagtacctatgtcctaatcctcagaaactatgaatagattacattacatggcaaaagggactttacagatgtgattaagtgatcttcagatggattatgcagatgggctcaatctatcacaggagcccttaaaaatagaagaggaaggccttagggtgaatcataaagatataacaatggaagaagaggcaggagagat

SEQ ID NO: 390763 - DNA, 350 bp, Homo sapiens
ctcgctctgttagtttcatgtttcaacagacggaattcagatggattggttgaaatgatttttacttagaaccatcaggctaacaaagaactttctaggctgggcacagtcactcacgcctgtaatcccagcactttggatggccgagacaggcagagcacatgaggccaggagttcgagaccagcctggccaacatagtaaaaccccgtctctactaaaaatacaaaaattagccaggtgtggtggcagacacctataatcccagctacttgggaggctgaggcatgagaattgcttgaatccagcaggcagaggttgcagtgagccgagatcgcgccactgcactcca

SEQ ID NO: 390764 - DNA, 294 bp, Homo sapiens
cgtgagcagacacaagcccaggtgaccacgctgaagcccttcatccctggcacatgtggctgggttacactggacccttaaaaatgcttgtcctctcccgaccttgggctgaggcctcttgtacttcagttccgcaccttagctgctctctgacgggtcttaggtgttgaaatagtatttttacccccgtttgctgacatagtgaataacaacttagtcctgcctattttagtgctggtagaaaataaaaaagaaagcaatgacttagaacaagatgtttcatgaaaatgttgg

SEQ ID NO: 390765 - DNA, 317 bp, Homo sapiens
agaatacttaaactgccttttacatatttcctttggaagtctcattgccaccacctcaaactcactatttcccaaactcattgttttcctcttcagaatgttcttctttcggtggcagcatccatacagttggcctagccagaaacctgaaagtcatcattgactcttccttctcccttctgcctcatatcctgttccttaaccctgtcagtttcaaagcctaaagaactcttgtatctttgacttctatttgttcctattgccaccaacatcttagccatgttagcatcatcaccatgtgatcactggggtggttt

SEQ ID NO: 390766 - DNA, 272 bp, Homo sapiens
aggatgagtttggtctggggagaaccaggagcctagaatccttttttctcctggtcccatctggctggatttctctgtcactggcactgggtggcctgggtggggctgcacatggggcaggaccccagggccgaatgacctgcaagtggggcagctcagccaggcctttggaaacccagcctctcgctcctgcttgagggtctcatgaagaaccctgggccctggcaggaatcccttgagccgcccacaactccagagcctgggtcaggatg

SEQ ID NO: 390767 - DNA, 335 bp, Homo sapiens
tgacatcatgtgattggcaaagcgtgaagcagtcaccacttggcctcttacaaagaaagcttgctgaccccggctatgcacagggtgaagcccctgagatgtttagaaggtatctctgttggctacttggggggcggtttgatggagaacaaggagagcacgcttgctccagtaccgtattctttcttctcacaggcccccaaaactccgtcagtctctttctcttccccagagccgtcagctcctgctggaacctcctgtctctctctctgctggggactccacaaagggaagcatggcccagcattccacctccccctgcccctaagactggg

SEQ ID NO: 390768 - DNA, 408 bp, Homo sapiens
ttgaatgtgtgaacctggtcggctgactcagcgtgattaagattgacgtcttagtaatgcgttacgaaacccgagttgatagtccatctacccctagaaactgcagctgtatcaacatttccatacacgattcttacacatctataaagtgaaatagactatactggaggaatgaagcagccaatgcatgcaacaagtcatataggcaataatgttgcttgcaaaggagtgttcgttttgtttagctttgtttttcaaatggggtttcaccatgttggccaggctggacttgaactcctgacctcaggtgatccacccacctcgttctcccaaagtgctgggattataggcgtgagccactgcgcccggccaacagcttctttttttaatgttatttttctgtttgta

SEQ ID NO: 390769 - DNA, 423 bp, Homo sapiens
taagacgcggtaggtagtgagaaatcccttctacttacaataccccagcccgcggtgtggctccggctgcggggctgttttattgctgtctccctttctttctctctctctctctccctctctctctccccctctctctttttttttctcggggtacaggcttgtttttcaaaggacagttgaattgcacgtcagaaacagggagaccgagcctgcgattttcctgacgaatacatatctattctgcaacctcggcattaattatttaatgaatcacgtgaccgggagggggaagggggtctttcgatttcaggctcaaaggaccactatgaccttccccttcaggaggagaaattttcctgcaaaataagttccccctcaacccaccaatggaacagtagtgaggtctccgtctgtctccca

SEQ ID NO: 390770 - DNA, 327 bp, Homo sapiens
aattaaggaggaggtgttgtactctaaggaagctatctggatgctgctggctgaaatacagatttgatctcctcgtgctggttagctaacatcgattttctgccccagtggaagagatttcactctgatgcatgccatttaaattcattttacacagctgcttaatgtggtttggcaaggcacagtcaaactagctttgtgggtctaaagaggcctctggagttggtaaaaggacagatcctatggattagctgcagatgatgaatgcttgcttcctccgactgttatcttcctactgactcatgaattgaccttgaaggtaccaca

SEQ ID NO: 390771 - DNA, 336 bp, Homo sapiens
  misc_feature (167)..(167): n is a, c, g, or t
tttgggtctttgctatttaaacagagtggtcagggaagcgctcctaaagatacgacatcggccaggcgcagtggctcatgcctggaatcccagcactttgggaacatgaataacacagacaaagtccctcatgaaattcattctctagcaaggaagcaagaaacagnaaaaactaattctttctggagtgacaggctgtgaaggaaaatatagcagagaatgatcagagaaaacaagggaagggcgggggatgctatttaaacagagtggtcagggaagcgctcctaaagatatgacatcggccaggcgcagtgtctcatgcctggaatcccagca

SEQ ID NO: 390772 - DNA, 229 bp, Homo sapiens
atctgccctggagggtgggtccggccaacactgtggagagggcgcagtgctcttttgggggacacttatgttccaagcaacaggccttccaggtacccctggtccaggccctaccctagctcccctgaaggagggtggcagggacgacgatggctgtcactcttttctgctttggaaaaagtagcccagaggaagggcactgcctgctgccaaccccctttgggggaag

SEQ ID NO: 390773 - DNA, 303 bp, Homo sapiens
ggagtccccaacctcacagaagccacaggatcacattctgggttgggtatagacttgcctaccagcccagtggaagatactctaacccaaactttccacaagtttggtcctcaaggcatctgcattaagatcacctagtgagactgatacaatccaagttcctcagtccactccacacttgctggatccaattctctagtaatatatttccaaaatctccatttttaagaaagccccaaatacaactggcgactgttgaaatccaaggactgctctccttcctacttttttgttgttgtttaa

SEQ ID NO: 390774 - DNA, 851 bp, Homo sapiens
catttacaatgatcagtgaagggttggtactgatttaaacagacagctgaattatccaattacactttcttgtgtttttgtacgaactgtacagtcctttggcctccttgatccacagttttctgcacttcatggtatatatctgctgagttattaaaaataataatctatcattaatcaagtctaaatattcatcaagccaattctcctccatagggataacatcccaacaggactttaattcagtctctcaatgtatttgatcatcatcatcagtattatactaaattttataagctcctaaaatattaattttacctgacccctatattacatcatatagcagtaccattgaagtgagaagtcagacaaaatttagctgctaaaggcttacattaaaataaaaattaaggccaggtgtggtggctcacacctgtaatcccagcactttgggaggctgaggcaggagaatcacttaagcttaggagttcaagactagcctgggcaacatggagagacccccccatctctacaaaaatttttttaaaatagccaagtgtggtggtcccaactgcttgggaggctgaggtaggacgatcacttgagctggggcagttgaagctgcgatgagatgtgatcgtgccactgcactccagcctgggcaacagagtgagaccacatctcaaaaaagaataataaaattttaaaaaataaaattaacaaataagatggctggatgcagtggctcacgcctataatcccaacactttgggaggccaaggtgggcagatcacttgagcccaggagttcaagcccagcctgggcaacatggtgaaaccctgtctctgcaa

SEQ ID NO: 390775 - DNA, 475 bp, Homo sapiens
cacggtggctcacacctgtaatcccagaactttgggaggctgaggtgggcagatcacttgagatcagtagtttgagaccagccttgccaacatggtgaaaccccatccctactacaaatacaaaaaatagccgggcatggtggcaggtgcctgtaatcccagctacttgggaggctgaggcacgagaatcacttgaacccgggaggcagaggttgcagtgagctgagatccactgtactccagcctgggcaatagagcaagactcagtctcaaaaaaaagaaaaaggaaaggaaaaaataattgctgaacctgaggtttcatttcaccatgtcaaaacgagctcactagctgggcacggtggctgaggtaggatcacttgcctgggagacacaggtttcagtgtgctgagatggcgtcgctgcactccaacctgggagacagagtgagaccccatctcaacaacaaccaaaaaaa

SEQ ID NO: 390776 - DNA, 458 bp, Homo sapiens
ctgtgcctggatgtgcaggtaggccagatttatgtttcactttatgcaaatatctcagtgtagcaaagagtaacagagcagtattgctgccagcatatcttgcctcccacagggcggttttctcctatttcagaatagaatgaatggtcggctttacacagagacattccattccccggaacgagcaggagacagaagccttcctcttatctcaactgcaaagaggcctccctctttcactattcctcctcagcacagaccctttaggggtgtcaggctgggggatggtaaggtctttcctttcccacgaggccggatctcaggctgtctcagtgggggaaaaccttggacaatacccaggctttgttgggcagaggtccctgcggctttccgcagtgcactgtgcccctggttaaccgagaatggagaatggtgatgacttttaccaagcatactgc

SEQ ID NO: 390777 - DNA, 559 bp, Homo sapiens
aactaggggcacgcatgggcagagtgacactcaaaggaggggctgggatttgccttttacacttacttatgagttcttttactgcatatcctcaaataactcactatctatagcaacaagttaacaaagataaaagacaataacaaaaatgagaacaacaatggcatgaaaaaggacaccttcaaggggataaaaacagaatagaggtattacttaatgagagaaaatagttttggttgatgactatacacagtatagatgatgtttaaaaattaccattcaacatatatttaatgagcacctgttatatggcagatattgtgctagtcacagtattcatagtctttattttaaaaaatatcccagcataaagtttatttctaaaatgtaattattatttagtatgaaaatgattagattcaaggaatgagctgtagaatttcagagaagggaatcataagattcgggaagaatgctatagaggaagggccatgggaacagattcttgacacgtgaatgggacagtgaccagcagagatggaatgaagtgtgtgtcaga

SEQ ID NO: 390778 - DNA, 576 bp, Homo sapiens
gggcctggaccccgctgggttcacaagaagtccccagcgctagcccggggctcagcagggaccacagtgtgtatgtaaataaatgaatgccgcccaccctttctgaccccaccgcagccagacgcagcggcgacatggggcgtttgtgtctgaattccccctccagcccggatccatcctcagaacctcctttggccaggaccagatcctggagaccctggaggggctccctcgtcctctcctgcccccatctttgaggaaatgatgtcatcattttttttggcattcacttccaaacctgctgatgaaaagtcaaagcttatttttttccctattcgcagtgctgcacacccgcctcctctatcaagtttcaaaacctttgcatcactgccctgtaaaaccctgtaaccattagcaggcctcattcctgcctcaccctgccctcctggtagccaccagtctcctttctgcctcgtggatgtgcctgttctggacatttcatatccgtggagtcaggcagttcgtggccttttgtgtctggcctctttggttcagcatgacattttctggttatgt

SEQ ID NO: 390779 - DNA, 406 bp, Homo sapiens
acccaacacttctaagacatgtcagcatgtgccttgctgaaacaggtgacatttaagtcaaatctcgaaaaaggagcaagctgaggttcatttcatgacatgacactgcctctcaagtgagaagagaataaaaaatgtccatctgattctgaaactgtaaagatactaatgaccttagtaagcaatgtggagtggagccaagtggaagagctgaatagctgtgaagctctcctggttctcaggcttttagaattggaatggaatctacaccaccaggtctctggctttcaggccttcaaaccacacaactggctttcctgggtctccagcttgcagacagcagatcatgggacttctcagtctccataattgcatgagccaatatgttataaaaaactctttttat

SEQ ID NO: 390780 - DNA, 296 bp, Homo sapiens
gccggctgggcgggaccaggcctttgtatctgcggtgcggaggtggagcagaggagagggtgcccggtgtccccctccctcgccccgcagactgcccctcctttcccacctccactctcagtcccctggggtctgatctctcctcgtctggccttcccctccctgtgctcgcatttggggtccaggcccccagccttccctcagacagccactgtgccccaccttatacaatttcttttctttcttttttttttttgagacatagtctccctcggttgcccaggctggaaagcagt

SEQ ID NO: 390781 - DNA, 212 bp, Homo sapiens
gggggagcttggggccaggccaaaggcatctgcagaaagaagacctactgccttgggactcagcccggctggaggctcagaggctgcagagcacgggcctgggggcagggaaggagctgggtggacaaggagtcgaggccctgcctacagtgatcgctgacgggccaggccccacccaccacacccctgcctggtgtcccccagcctggccc

SEQ ID NO: 390782 - DNA, 527 bp, Homo sapiens
agtggtagcatctcatgctcactgcaactccactttactgggttcaagcgattctcatgcctcagctcccaagcagctgggattacaggcgcctgcaccaagcctcgtaaatttttgtatttttagtagagatggggtttctccatgttggtcaggctggtcttgaactcctgacctcagttgatctgcctgcctcccaaagtgctgggattacaggcctgagccaccatgttcagcccatccagagaatttaaatgttcttctgagggcagagtaaatgcatatttggggactatccctaatgaatgaaaattggctttggcttcctaatggaaaagaaggcatgagccaaatctagtacagaatactgatctctctgagcttgcagcacagctttagttgttgatgccatatcagatatagctgatcaaatggggtgacaccaatttatcaagtcttccgtaatctatagttaatttaccagatccatcagcttttcttccaggccatcctagaccgaggctgga

SEQ ID NO: 390783 - DNA, 719 bp, Homo sapiens
aagtgtagcaaataagccatgtacatttaatgtgttctacttgctagtattaactgtatgattaatgaatgtgttatttaatgcccaagtttgttaacttttattctagaaatcatcctctgaatttattataaatcacagatttcattgtgctctatatttagtcattctcagttgaattctagaatattccacagtacagtataagaaagtattagaaccaacttgcttgaactattttgaaccagtgttgtaattctatatgttaatcagtatttagcatttctgctccttttgagatgatgatggtttaacttcaggaaagtgacttttctgacttcttttattatcattgtgcaatttttagcaacaaaactcactatatctttgtcagttcttcagatgttacaatactgcctgctaatttgaaacagaaataacaatggtattttaaaaagtcattgatattactgatactttccattatcattatattttttactattattatgttctttttgccttgtccaccctagagaataggtacaaatgagtagtgagtatccacaaacttactaagatggagagaaggctagatggtgcatgaataatcagcatctcagcaacagagttgactggagccagtttctgacatcagagaatctctttgctgtaatcattttagccttatctcttatttataccatttttatgggaag

SEQ ID NO: 390784 - DNA, 665 bp, Homo sapiens
gtagataaatttgattatgccctgatattggatgatatcaagaaatgagtgatacttttattaggcatattcatggcattatagttatgtgagattgtgcccatcatttttagagatacatacaaaagaatgtaggaataaaagtgagttggatttgcttttttatattacaggaaaaaatttaaaaaaaggacaaattaattaattataaaaaacaaatttttgtaattgttgaatctgggtagtagctatgtgggtttaatggacaattcactctacttctttatgtttaaatatagtccaataaattttaaagtcatgagttatgtgaaatctctcaagttattcccaggtttgaaaggccgatgagccattattgtcttctgccatgaactcaggggtatactggactctaagaagtaatgggaactgaagtaattatatcctggcatttaaaaaaatatctcatgcatccttttcattgactttcaacagaagaatcctaggattataactcccttttgcccagtaagagtttaaatacaatatctgaatttgaattccaattctgtgtgaacttgtatgaacacttgcaagttttttttctttaagcttaggattcctataatgtgaagtgataaaataagtatggcatagggttgccg

SEQ ID NO: 390785 - DNA, 504 bp, Homo sapiens
aatattctggccacactgttactcagtctttaaagaatatgttaaaaagagaaaaaactgaacagttcctaagtataatgttctagaactcacatttaattttagttagtatacaatatcacagcaaaaaatatgtatgcatggtcatatttttttcttcatgtactcttcacaaccatcatcaatttggaatatggtctgagacaggacaggatttccaaaacatttgaatagttcaccatattcaaagttgaataatttaaacaattaatttaaaaactattatgaggtttatttggtaaagtttgtgttaaaatatttcaaaacacgaaaatgttaagagttttggaactcttttacataaaaatttaccttaaataggtaaatagatactgaaattatagcctttaagtgcttttcttacttctgaatcacttattcacttatttcttaattttatttataccctcagtgaacactagctattcagaagaaaattctcaa

SEQ ID NO: 390786 - DNA, 198 bp, Homo sapiens
tcaaatggtgctttctaaaaacagaacagattgcttcagaaggactgaacctccaactctgaaggtcttcacttagaggaggagggctctgtgtttaatgatggtgaggtagggactgagcatcaggagtgtgatttaaggatgtggccccagggactctttcgttgctgaaacctaccatgctatgaaataccattg

SEQ ID NO: 390787 - DNA, 302 bp, Homo sapiens
gccactgttccagtagttcaacaagtcttagaactgagtccaactgtctttctgattggtcttttctgggtaacatgcacagccctgaaccaatcgctgtggcaggcaaatgcgacgctctgattggccatcttggatcaaatgccctccccctgagggagattgggtgcagcttgcacctgctcaggtacagagactgagaatgagggaaagattgcaggtttccagggaaatgcgggtaccgtttgtgaatggtgggtaggcaaaagccaaggatgtccaatatagtaggtttttaatca

SEQ ID NO: 390788 - DNA, 624 bp, Homo sapiens
ctgaagtggggccaatgagttgaacctttgttgttcagaaacaacttctgatatttatgtttatggcagaaagctgcacatttatgagcaaatgaatgagtttacagcgagcgtgcggcagcctggaaataactgctgaatgattttaccatctcgagcactgtgcacactgtgatgtcggggcagagcagggtgaggactagagggtatcaaacgtatatgggcaggtactaattatcccgtgaggcatgatactaactgcatctaaaattgcatcacctcactgcagtagccactgataatccagcaaatgcttaaacatcgggcagaagaaacatttatatcaaactggctttctcaatatgactacctggttttattctgctgagctcaaactttacatgtactttagaaaaatggaataaccacatgtagatactgcagagatcaacttggctagtggactctgatgctgaaaaaaacaacacactggaccaggtttgaatctgagttcagctactcaccaaccataacctctctgatctttcaactactacctttataattcatcaataaagggagtcaatgtcagtagcactgatttcactggatttaaaaaaaaaa

SEQ ID NO: 390789 - DNA, 725 bp, Homo sapiens
actccaatatctgatttccccaatttccttcaaattttagggtcttaaggtataagttatacataatgccaaactattgcattttacacagtgagaatttatccttaaatattgttggactaggataccccattctccatgatgtgcttatttcgtattgcatgcctgtatcaaaacatctcatgtaccccataaatatgtaactactatgtacccacaaaaatttaaaaaataaaatgttgttgtactattttaaggtttttttcatctttaaggttcttttcctgaagagaattcccatcagcaacagattatctctttaaagcatttttacatgttatatgttctaatatatacaattgtatagaaaagagcaaaatgaaccattacccatttcaatatttatcatgtgcagtcttgatttttcattttttcaatttttattttttaagagacagattctgtgttgcccagcttggtcttgaactccaggcctcaggcgatcctctcacctcagcctcccaagtagctggaattaccggtgtgagccattgtcgcctggctgcaatcttgttttttatacttaatccacatcccacctccccaacccagaatattttgaggctaattccatacatatttacatatatatacatctctcaaagaaaataacttattttccattcttcatatatctattcctataaataatgttcttgggggaa

SEQ ID NO: 390790 - DNA, 385 bp, Homo sapiens
aagcttcagcctcacacttgagatatagagaaaggagtcaggacgcattccttcgggtccaaagctttaactcttacttagactgccttagttttacctctccttgccttagaatctgaacaatatccaataaaaacattcgctctatgatgacacacatggggcaaagcctttggtagggttttcacacaagtctgagagtacatttacactcccaccatcaagaaggggagcctatggcctctccccataaacctggatgggccattgtgaccatcttggccaacaaatgaagcaaaaggaacaccgttgacttccaaggctggaacaaagaaggcaacatggcctccatcgggctctctctgaggactctcccctacagccc

SEQ ID NO: 390791 - DNA, 328 bp, Homo sapiens
tacaactagcacactaaactcattatttcaaatattgatcaggataaaaatatgttaacaaaaaagtcattaaaaataatgagcttcttgtgagtgatttacagatttgactaaaatgcaaactgtcaatgacaaatatgagaattaatatactccaaagggtaatgaaggaacagtcctcctgacatctttacatgccaggtagcaccctggccttttagagaggtagggatagcaattgtaaagcagcactgggtcccctagctagaatcgtccattactggcttttgtcactaactgaaaaatgcggtcatggtttccttttctc

SEQ ID NO: 390792 - DNA, 170 bp, Homo sapiens
aacaaacaaaaaaacttttatttaaccccagatataaaaattatttagctactttagattttttggtactaaatcttcacaatccactttgtattgtacactcacagcatattttatctcagctgggtctaaccacatttcaactgtgcaatagccacatgttaagacta

SEQ ID NO: 390793 - DNA, 196 bp, Homo sapiens
cccaacgctcacggcagcggtcgcctacttgctctagacgaaggtttggctccagacagaagcctgcccagtgaccacagtgttgtgaccttcctgctggccaggaaggccccaggggactctgtggcagtatagggccctatggaggaactttgtcctgctacagagctattgctcttggtaaacctagaagaca

SEQ ID NO: 390794 - DNA, 912 bp, Homo sapiens
atgttgcattatatattatattatatagtccagctaattgacatggcccagcagactgcccagggcatgaactacctccatgccaagaatatcatccaaggcgatctcaagtctaataacatttttcaacacaaagatgagtgactctcgtctggccacagtgaagacagagtgaagcagggcccagcccttggagaagccttcaggttctgttttgtggatcgcagctgacctgaaccccttcagcttccagtcggacgtctatgccagtgtggctgtgctctaaaatctcacgactggctcactgccttacagccacattggcagctgtgaccagattatctttatggtgggctgtgactcttcatccctggacctcagaaaaatctccagcaactgcccgaagccatgtggtgcctgctgtctgactgcctcatgttccagcaaaaggagtggctccatttgccccagactctcaccacaatttttctgctgcaagggtcgctccccaagatggaggggaatacctctaaatcgtccttttatcaaacccaagctgatgagtttccttcctgactactcaacacaggctgtcttgagcctgaccttactcccagccactagggagccaatctgagcccgccatgccaaggagccctgcccaccaacgaatcaatgttttatctctgtcctgaagttgcatcaggatctcatatcccccaccctgttagatgagggggtcctgatgtgctttcccagttcctctaaaattggaaaactcttaaagattgagcccctgcccccctccatcattttattttttggcttagaagatacctctaaattgggggaactccttcatctctcatggctaaaatttgtagcagggatttcactcagaacctctatggg

SEQ ID NO: 390795 - DNA, 160 bp, Homo sapiens
ctccttccccgtagggagctaggaaagaagggaaatgatactcactgaggtattggctcttctccattgggagggtgggggaaggctgtcgttctcagggaaagaagtattaggtgaacacacccggatcctaagggtgacccagcctaaaagctcaggg

SEQ ID NO: 390796 - DNA, 399 bp, Homo sapiens
gcactttggaaggctgaagtgggaggattgcttgaggccaggagttcaagaccagtctgggcaacagagggaaaccctgtttctaccaaaaaaaaagaaaaaatgctgggcatggtggtgcacacctgtagtcccatcccagatcttctgggaactgtgagtgcaccagaggcagctccttgggcacataagtgactcactgtctgggagggaacctgaaccacaggtgaagaccaactcccctgtcccctgccgtgtctggggacctgacactgggtttgtgtctgtgctctagccgtgccctgcaggggaaagggcaacgtctcgatctgaacagatattcctgttgggctctgaggtgtgcaggctggcaccagtcttgcccgacaggaatcgtgg

SEQ ID NO: 390797 - DNA, 391 bp, Homo sapiens
catcgggaacattcaaaatccatttctactaagtgggagagtgtaaaatcccagggagggtgggatcgactgtctcccactctgtttgaacttacttcccagcttcaccatttccacagcggtataatcctgcattgtggtggtctgccttctttcaggtggaggcaagtcttgtagggctaccctctgtgggtgtggttggtcttcttttatcttggtagtgaccatcagacatgctgagaggatgggaacctctatggactcatcccagtcctcatcctccctgccactagatctcttcacggggtcccaggacttagggttccaggacaatttagtcatgatagtcctaactccatgtggcagtcagtgacccttcaaacaggctatg

SEQ ID NO: 390798 - DNA, 377 bp, Homo sapiens
ctgtgatcttgttacaacttatcaagtggaggccacttacggtagccacttggtagacaaacactacagatcaccagatcttaaacaacgatgtaccaggacactttttttttgtctgcatgagtagaactaatttaaaatactgtatgtgtttttcctatttcaatgacttcagatggtctagtttcaatttcatgaaaaaatgaaaatcttaagtctaatatcaccactgtatacatgaatacttcctcaaactatgcaatatgcttacacatgtattccatcagctcatgcttcagactgtgctgttaggcaagcagggcaggcagtctgactatattttccagttgacataatgaaaaaatcagagaggggca

SEQ ID NO: 390799 - DNA, 753 bp, Homo sapiens
cagagaaacaagcaaatccctgcacttactttgtgctgtttgtgggatgtggctggcccattatcaccccagacttagtatggctaaaactaatctgtgcagtgattctctccagccatttaaatcaaggtatatatagaattgctctaatcggaaatagagcacagtgatcattttaaaaaggtttcgattctgaaatgaatggatacttttttggtctaaaggtgctaactcagctccttcactgaggtccctggttcttagctcagtgtggttgaggtaagtgttgatgttatcctgtcacttactagtaggagccagggtgctctatttgcatcccagctctacctcttactggatttggggaaagttgcttgacctccacgaacttcagcatccttgtatgtaaaagcaagaaaataaagttcatttagcaaatatttcataagatcccataggctctaggcattctaggagcaagtgtacaaagtggaataaggaaaaaaccctgccatcagggagccacagtattggaggagggaggcagacaggcaggcatcagcgggttggtaagcacaggagagtaagagttaaatcaagtcactgctattattgattatcggagtgctcaataaatattagctatcccaggaacccaaaaaggagaaaatagggactcaactgagaaagaagacaattgggaaatggaaagaattagggaaacatttcatacattacaaagtcttgagtgag

SEQ ID NO: 390800 - DNA, 415 bp, Homo sapiens
acaacaaattatttagcattcctattttaatgcccaatcactgttttaagccatccatgtccatatatattaactaatctaatccctaataactgcccccatgcggtagttactaagattataccaattttacagatgagaaaactgatgtgcagagtaggcaacatggccacatcacaatctggagaacgacaaagttggatttagaatcccaggtatatgggctccagcatcttaagtcttaacctgggcactagactgcttctccacaagatcatggctgatttattaacagcaacagttatggaagactatcctgaccattttcactacttgattgggcagaaacgcatagaaagcataaatgaagatttaaaaatcataatctctttgaggacttcagggctaaaaaaaa

SEQ ID NO: 390801 - DNA, 344 bp, Homo sapiens
cccagaatgtgatctgtcttggtgaatgctccatgtgattttgagaagaattgtaatctgctgcctgctgctggatgaaatattctgtagatgtcaattatatacagttgattgatagtgttgttgaattcaactgtgtccttactggttttctgcctgctgactgtgtccatttctgttagaggagtgttaaagtctccaactataatagtagattcacccaggtcttcttgcagttttatcagtttttcccttacatatttggatgccctgctgttaggtgaatacacattaagaattattgtgtcagcggggtgcagcggctcatgcctgtaatcccagca

SEQ ID NO: 390802 - DNA, 877 bp, Homo sapiens
catggtgatggaaggtcccagatatctgagtccaaactgtcctgaccttttaagtgaaaaccctttacatgccttgttgccacataaaataaaaagagagaaaaagaccagtgctgttcatggtcaaagtcagagtggaacctgcaattctccagatctaatgtgtttcatgacccttgtcattggtcatactgggatctgcatacctccatgtgcccctggaagagcagaactgtttgccaaatatctaatacaggaggcctgcaatctgggtctggaagctgtaaggcctgggttttgttacttggccaagttattccaggtttttggtctactcattcataatttttggtgtcgagcatccgaaccgggagcacctgaactatctcgggctgtgcaagtgtggcctgggaaacagctgaaacatttggtaatttggcaaatatttatgcttaaaaggcagtgctggaaccaattatgacttccttgaggggtttgagaatgctacctatggaatccgactacagggtttgagtgtaacattgccttggtatatctaggaagggtccaggaccatttctgttttcaatgcaaaggggaaaattcctttccaatgacttcaactgaattgtttgacatttcccagcccagactccagacctggtgatcagatgatcccagccccagccttcaaaccactgcaaatagagaagagacaagctatccctgagagagccctgcccaatctacagattaataaagaaaataaatactgttattatttttaaaaacagccctgtttggggtggcttgttatgcagcaataggtaacacgaacaaacggtaaagcttggagcctctgaatgcccggagtaaa

SEQ ID NO: 390803 - DNA, 413 bp, Homo sapiens
tgctccgtgtaatttaagagccttctcaccttcacagtctatgattctgagcgcagaatagcagtatgaagccaacgagagtgcaaattcaggaaagtatctggggctccagctcattttttagcacaaaccattacttctaccttatctatgcacacctgaaagctcctgtaagggctccacttggtctgggggcaaggttctcattggggtcttctataacttatgtctgttattgggccagactgtcagtacccactctctgcatacgttcttaccgcctctcacccctttatcctctccactttttagggttcccaccttcaggtgcatgggcttccatagatgtgagtctccacttgccagtgattctcctctctcctggtggagtcatttttcttaactaagatagg

SEQ ID NO: 390804 - DNA, 452 bp, Homo sapiens
tgctccgtgtaatttaagagccttctcaccttcacagtctatgattctgagcgcagaatagcagtatgaagccaacgagagtgcaaattcaggaaagtatctggggctccagctcattttttagcacaaaccattacttctaccttatctatgcacacctgaaagctcctgtaagggctccacttggtctgggggcaaggttctcattggggtcttctataacttatgtctgttattgggccagactgtcagtacccactctctgcatacgttcttaccgcctctcacccctttatcctctccactttttagtgggatagagcagggagggaaatgaatttttaaaaaatatttagtgggacagttcttctaagctcttccttgagcccgaaacattcataactctgagatcctgtgtttcaagagagtggaaaatgaccctaaggtgtagg

SEQ ID NO: 390805 - DNA, 180 bp, Homo sapiens
gcagacagtggggaagaatgccccagagccaggtaccacactgaggggacccagacactggctcagcctcccctttccttcagctgctgaacgcctgagatgagttaaagtctaatacttgggtccttctcttattttcccagcaactcacaagctccttgagagcaggaaacagcactg

SEQ ID NO: 390806 - DNA, 409 bp, Homo sapiens
aaataatgaaagaatagttgtattattctgggagtcggatagatcttcttaatttcggaaataacaggacaggcatggtggctcacacctgtagttccaacatttttggaggccaaggtggaaggatcacttgagcccagacttcaagaccagcctgagcaacatagggagctcctgcctctacaaattaaaaaaattagctgggcgtggtggtgcacgtctgtggtcccagctactggggaggctgagggaggaggatggattcagccagtgagatcaaggctgcagtgagctatgattgtgccaccgcactccagcctgggtaacagaacaagactctaacatccacacacacaaccacacacctacctaccttacaaagtatagatatattacttacataaaattt

SEQ ID NO: 390807 - DNA, 229 bp, Homo sapiens
gggctgaggatcccggcggctggggtctgtagatttaggaacaaacgttacgtataacttgatttgattatgaaatgatcacatacagcataataaaaagataataaaattctggataaagctggaaatgtttctgaaaaacatcttctgctatttcttaaaaaaatatctgaggaaaacaacccaaaaagccagaggagcgaggacacggtctttccactttcctttt

SEQ ID NO: 390808 - DNA, 479 bp, Homo sapiens
tgggcccacatggagggagtgacctggaatagctgggggccttctagacacaggtgggccacgtggggttcagagagcagcctcaggctcaggctggcaggatgggggcaggggagggagctctgaacgaggagggacctggggtgtcaggcctaagagcatgcaggtcacctggacagcagggcctctctcacctggccagcttctgcccccaggggactcttggccaaggctgggcatgcccttggttgtcacattgggagggagatggcatcggcacagcgtgggtggaggctgggtactgctcagcgccccgagaagagaatcacctggcccccacgaggatgacgcagccctcacgaggatgacccagccccatgaggatgacccagcccccacgaggatgacccagcccccacgaggatgacccagcccccattaggatgacccagcccgcgattaggatgacccatccccca

SEQ ID NO: 390809 - DNA, 351 bp, Homo sapiens
tcataggatattagcattcctttcccgctaccttttctttttcttctccacctttcgtgtcctgacagctctgcctttacatttatagcattataattggataagttaacttttgttctataactgttatgaacacttcagtgttttcctctgtaaattggattcacatgttaaaaaccaatgaaaatagttaggctcagtggctcacatctgtaatctgaacactttgggagacttaggaaggaggatcgcttgagccctggagtttggagctgtcataagctatgattgcaccactgcatttcagcttgggcagcaaagcaacaccctgcctaaataaataaataaggt

SEQ ID NO: 390810 - DNA, 801 bp, Homo sapiens
aactcggctaggtgttaagaggcaggcaggaagcaatggacagggagtccgagtgaggttgtgctctttcctgagagaggggttccgcaagggattggaggcgtccttgtagccaggtacagctttccccttagagatgagcgctcttggagaaatgagaatggggagaaatcgtccatgaacatggagattggacatccccacgaaggaaaggatgatttaggagacaagagggtcatcatgggaacaaaatttcccatggagttggggatcagagtaggattaggaaaagaagattcccgatgcggggagagccctgtggttagtaataagtgtgagggaaggatggcaccaccagaaacaaaatttccattgagcaaggggcttgaaatgggattagaaagacagaatatttctaggactgtcatgcagaggggtagtttaggagtcgacagtgtctcagcttcacagggaacaaaaccttctctgttgccaggaagaatggggttagaaaatgagagtcttcttgcaggatatacccatgaacggataatacagcctcctttgggcagggtgtgtggaagttcacaggctgcagggagcaggagagctcctttggctagtggccctgaaggggtagaggaattagtgggaaagcctgctttcgttatggaaccaagacaggaaatggaaaaagagtctacctgtgttttaatgaaacccaacacagagattaagcttcctgtggaggtggacattggactaacccaagccgaggggccagatgagactaagaataca

SEQ ID NO: 390811 - DNA, 292 bp, Homo sapiens
ctgtttggagtttaccatcatccacagcacactgtgggatgcagtgtctgttagttaccactaccttgggtacatgacagtcagccccaaccagactctgcttgtcattcaagaagtttacaaacatttgtcaggtgcaacaaatctttccagatacaaacttgaggtacttgtgactgttagtgcatctgtctctagcacgtggcgttgaaccaggtagttatcctctgttgctctctcttgttagcagaagcttgtcactgtactcaattggaaaacattttgttgaatt

SEQ ID NO: 390812 - DNA, 709 bp, Homo sapiens
cacaaataaaatcccaatgatttgggtgcatattgactcttggactgtttttaatggactttcaatttggtctagcaagtggactgtagataattggacaataaagatacccctgtctcagatattgctctttctataattctgagtgcaaatcaaagtaaatcatactgttgttcatcaaagaacttctagtttctcaaggtgattggaatcaacaagttgatgctttagttcaatctcttgaagtggcaatatgggtctatgaaatgagtggacattctggaggtcaagccatgcaatgatgggctgactggcaatgtatactactggactctgctgaagctcaaatttcttataaaaatagattattctgcttgccagcaggagaggcaacatttgaagtcatttctgagaagtaatcccagggaagaaagtctaacatataacagggaagtagattatattgcctcatttcctgttcattcaagggtatttgaatagaatatacaagcataatagatattcttgatttggctttgcatttcgatatctgaattcatggctgctaatactacccaaagattgaacaacagaaacaaaattatggcatgagttttgtcctcctagttaaattcctcatgtcaaggtgaagctttcagactgtgcaccaagattatgttgcaactgtgctcttgcattatctcctcag

SEQ ID NO: 390813 - DNA, 263 bp, Homo sapiens
gccagccttggccttccaaagtgctaggattacaggcatgagccactgcgcttggccaccatcgctatttattttgatgtccacattgtctctggtttgtgcagtgggcgcctcttcaagctggcctctgtgtcctcttgacacattcccaccatctttggagccctttcctgctttctagtggaacaagatctttctggctgatcttattcctgtctgctccaggcctaaaatcaaccctctctgattttagggtcctgatt

SEQ ID NO: 390814 - DNA, 355 bp, Homo sapiens
atggaatctttatctttgagtaaatggggctttctaaatagcaatatgaatactttttctgtttttgctggcataggtctttggggtctatgctgcttttcagtttgacttgtcaacaccttaaccaagtaaaactgactttgtggtttaagtgattgcgtgtgttttgggggcaggtgtcttaagctggttgaggtgtccactgtgcttcctgtcaggtttgtagctttcagatttgcaaggaggcagatcctctagttcaggcttgtccaacctgccttattttgttgtattgttttagacttgtagcagcctgaaaccatggtacttagtttctgtctctagtgataaatgg

SEQ ID NO: 390815 - DNA, 965 bp, Homo sapiens
gtcagcaggagtatctggagaatcacattcaaacccagtcgtctgccctggatcgtgttaatgccatgaactcagccttggcgtcagattccatgggggggcagaaaaccctcgtggatgtgactttggaaaacagcaacatcaatgatgaaaaccagaaacagaaagcagaactgctggctcaggagaagctggcagaccagatggtgatggagtttaccaagaagaagatggctcgagaagcagagtttgaggctgagcaggagagaatccggagggagaaagagaaggagatcgcacgcttgagggccatgcaggagaaggcccaggattaccaggcagaacaggatgccttgcgggccaagcgcaaccaggaggttgcagacagagagtggcgcagaaaggaaaaggaaaatgcgcggaagaagatggaaacagaggctgagctgcgaaaaagtcggctcgaacaggtggctttcaaggagcacgctctggctgttcaggtgcaacgggaccgggatgagttcgagaggattcttcgggctcagagagaacagattgagaaggagcggctggaggaggagaaaaaggccacagggcgcttacagcatgccaatgagctccggcgccaggtgcgcgagaaccagcagaaggaagtgcagaaccggattgccacctttgaggagggccggcgcctcaaagaggaggcccagaaacgccgtgagcgcatcgatgagatcaagaggaaaaagcttgaagagctgagagccactggccttcccgagaagtactgcattgaagctgagcgcaaagctaacatcctgccagctacctctgtgaactgaggggagccttcgtggccctcaggatgccttcgggggacagattctgcccagtctctgggcatccataattgctgctaacctagacatttcatagttacagattaaatctacttgacttta

SEQ ID NO: 390816 - DNA, 1827 bp, Homo sapiens
cggcgccggggcggcagcagaagtccggagtcagggcgtgtggctgaggagatgccactaagcacagctggcatcctgagctcctcttctgccgcttccaacaggtcaaggaataaggctcgctatcggaccaaagccgtgagctctgaggtggatgagagcctctttggagatatcaagtccccagcccagggccagagcgacagccccattgtgctgctccgagataagcatacccttcaaaaaactctcactgctttgggcttggatcgcaagccagagaccatccagctcatcacccgggacatggtccgagaactcattgttcccacagaggatccctccggggagtccctaatcatcagccctgaggagtttgagcgaatcaaatgggcatcccatgtcctgaccagagaagaacttgaggccagggaccaggccttcaagaaggagaaggaagccaccatggatgcagtgatgacacgaaagaagatcatgaaacagaaggagatggtgtggaacaacaacaagaagctcagtgacctggaggaggtggccaaggaacgggcccagaacctcctgcagagagccaacaagctgcggatggagcaggaggaggagctcaaggacatgagcaagattatcctcaatgctaagtgccatgccatccgggatgcccaaatcctggagaagcagcagatccaaaaagaactggacacagaagagaagcggttggatcagatgatggaagtggagcggcagaaatccattcaaaggcaggaggaactggagaggaagaggagggaggaaagaattagaggaaggcggcaaattgtggaacagatggaaaagaaccaggaggagcgatcgctgcttgctgagcagcgggagcaggagaaggagcagatgctggaatatatggaacagctccaagaggaagatctaaaggacatggaacgaaggcagcaacaaaaactgaagatgcaagctgagattaagcgcatcaatgatgaaaaccagaaacagaaagcagaactgctggctcaggagaagctggcagaccagatggtgatggagtttaccaagaagaagatggctcgagaagcagagtttgaggctgagcaggagagaatccggagggagaaagagaaggagatcgcacgcttgagggccatgcaggagaaggcccaggattaccaggcagaacaggatgccttgcgggccaagcgcaaccaggaggttgcagacagagagtggcgcagaaaggaaaaggaaaatgcgcggaagaagatggaaacagaggctgagctgcgaaaaagtcggctcgaacaggtggctttcaaggagcacgctctggctgttcaggtgcaacgggaccgggatgagttcgagaggattcttcgggctcagagagaacagattgagaaggagcggctggaggaggagaaaaaggccacagggcgcttacagcatgccaatgagctccggcgccaggtgcgcgagaaccagcagaaggaagtgcagaaccggattgccacctttgaggagggccggcgcctcaaagaggaggcccagaaacgccgtgagcgcatcgatgagatcaagaggaaaaagcttgaagagctgagagccactggccttcccgagaagtactgcattgaagctgagcgcaaagctaacatcctgccagctacctctgtgaactgaggggagccttcgtggccctcaggatgccttcgggggacagattctgcccagtctctgggcatccataattgctgctaacctagacatttcatagttacagattaaatctacttgacttta

SEQ ID NO: 390817 - DNA, 137 bp, Homo sapiens
tttcctacctggtttatgtgacttcaaattcagcagcatccttttctgtcatttccagagactcaggctgacactctttcctgtggcctttgctttatgcatttctaccaccccggcccagattgcttgccttctcc

SEQ ID NO: 390818 - DNA, 419 bp, Homo sapiens
atcaccctgtagtgtgtgtttgcagctaggatgtccatccccggccgggaggtgtggctgctgcccctgggtttattatctgggtcagcagagcctggcccacagggtgctgttgtttctgggttccttgtccccagttgcatccatccgtgcacccttgtttggtggtatttgtatctggctgtccccttcccaaggctggtggtgtggcccctgccccacccctgctgttcccatcaagtgttctgcgtggccttcagagtcctgatgcacgttactgcatctggggatggtgtgagccctgcctgcaagcaagcagggaaacagatgccacttcttatggccattaatgagagccagggagcctgcctccctgagggtcttgattcctgttgagtatttgatggtgaatatgaagc

SEQ ID NO: 390819 - DNA, 437 bp, Homo sapiens
gatgaaaagcccccgatacaccataaagatgtcctgctttcccaggttctctcaagttaagtatcagtaaagaagtgatctctttaaagccctgaagtaacacagggctaagtctcttgggtatactctgtcacatcttacggacttttaacgtgtatcgttctacagtaaacagtatcgttctacagtgaacagtatgctcatttcattagcatttgaaaatttgactgataatttttagctatataattgttcagtctggcatgtagcaaactgtcatcttgtttatttatttattatttattttttgaaatggagtctccctctgtcacccaggctggaatgcagtggcgcgatcttggctcactgcaacctccgcctcctgggttcaagcaattcccctgcctcagcctcccaagtagctgggactataggca

SEQ ID NO: 390820 - DNA, 433 bp, Homo sapiens
tgtgcaaacctgaaaactgtaaatgccaaaatactttgtaaatattcagatttttaaaatctttcctattacctggtgtggaattatgtacatatttggatggtcttcttgtgttatgccattttttgaaaagacagaatatagacatgtaaaatataattttcagatgcttgtacttaaacattcacataacattttagtgaatttctaaaaatcaaggaaataatcatctcagcttcaggcacaatgctaacttagatgagtcataggtacgtcagaaattaatgataaggaaacaatgtcaggggaagttaggtaacttgcctaaggtcacagagactatagaaaaataataattaaaatgcttctcctaactccaaccaagttcgcacgccttccattttagcataaggtttatgtgttgagcccttct

SEQ ID NO: 390821 - DNA, 508 bp, Homo sapiens
ggagaacggaatccagatttcagctggaaagctcggtaaagttacctttgtattttgtccctgaatgtcttcatctatagctgttactagtagactaagtaggtgctgtttcaggtggctgtctagtgtggaatagctataattctccaaagtttaagttaatgatagatgtttgcttttcagacaaactaattcaaggacagagattatagttgtagggtttggtatattttttaaataacagagcgccatccttaaagcagtgattcttagggagaggcatacaaccccaaccctcaagaatatcagaacttcctgggggtgtatgcgatgaaaaaaaaagcaaatatttaagttcataattctgttttgttttgtaacagagtttcgctcttactgcccaggctggagtacaatggcgtgatcttggctcaccacaaacctccacctcccaggttcaagcaattctcctgcctcagcctcccaagcagctgggattacaggcgca

SEQ ID NO: 390822 - DNA, 504 bp, Homo sapiens
atgaaagcattctgaaatagtctggggaatatggccaaggcaatgtctaatatatgttgcttataaaggagaacaaaaaaaccttagcttgcttctctcccacacccaccctgagtagaataccaagcgcctgaaccagagagagtgcacctaaaataaagatttccctcacccttcaccaaacacacacattcatgcacatgtgcacactcacacacactaaaaggagagcccaggtttctgggctctgacaatgtatcaaactcagatgtatgaaggcagagatgtgaggatccaagcagcatccctgttaccaacctcaagagtaggacactttaaacatcccagttagggcatagacttgggaacactgggttttttgtttgtttttgcaaaggtctcctgagtttccttcaagggatatgggcccctttggcagcagggaggtatactacaatacaggggacctatctgtgatcctcactttttcaccttcttcactgt

SEQ ID NO: 390823 - DNA, 374 bp, Homo sapiens
aactttgctctgttagggctttcccagcttttcacttctagtgttttggcgtagagctctctggtgaggctgttcaaatatcacaagctgtcagtgtcttcgagctgatcttcattgtactctgactgatgtcacgtgcccagtaggttgttttgtttccttaaggcattgcagctttcagcttgggggtggaaatgcctccataggactgaaccttaaaccttacggtcaaaagtcattgcctccaaatttaccatcctttgacctagggcagcactgagcaactggttagccgcctttctcagtctggtactgctgtgtgcttattgttttcagagtgtgtacttctcagttaatggaggcatcccaggtca

SEQ ID NO: 390824 - DNA, 242 bp, Homo sapiens
aactcttactgagaataatagtgaaaatattttgaaaatattgaatattttagcagcaagaatatgtgcacatgtgcctgtagttattcatttccaagtaaactgagaactgatctcatcacatcagacactattctaacaaaaagcaatccaataactgcaaagtgtcatgagacttctttccattaattgatgtgagattcaagaacagaatccagctgatagatatagtttggatgtgt

SEQ ID NO: 390825 - DNA, 388 bp, Homo sapiens
tagtattgtttcttaattgtacagttttcttatgagtgaagatacttggtaggtgtacgtgatttcactgaaagcaaagggattttcatcttcctttgaccctttaacaacaacaacaaaaagggctgagccaggcagggcacgatggctcacacctgtcatcctagcactttgggaggccaaagcgagtggatcacttgaggtcaggagttcgagaccagcctggccaacatggtgagagaacaaccccctctctactgaaaatacaaaaattagcctggcttggtgttgggcgcctgtaatcccagctattcaggcggctgaggcaggagaatcgcttgaatccgggaggcagaggttgcagtgagccgagatcacgccactgcac

SEQ ID NO: 390826 - DNA, 345 bp, Homo sapiens
aaggtcccagaaatccctgccggtcacctgctgccgcttgccagttcttctgtggtgattctttggaagaagcccagtactgaatcacggaatagggcaagcagagggttctcttggaacataagaaacacatgaaaataaagactgttttgttctgtttcctagtttgcacacaaatatgtctgtattttactcataattggcctgaagatacattgtactagaaaaatcaaatggcttatttcaccaggcttttctcccattctgaaagtgctgaagcccttttactcatggctgactttcccccccccacccattaatggttaatttctgtgcccagttctt

SEQ ID NO: 390827 - DNA, 846 bp, Homo sapiens
ggaaggcattgctgaaagtctttttcacaccttaaaaacaaggaagaagagaaatgaaaataaaatagtgagcaacacctcggtgaaagtagaggtgtttgtacagttcagctgctgccttattcaaaaacaggaagaaaaacccactgcccaggtcagctggtgggtgatctccactgaactcctattcagaggctcagtttctctgcaggacagaaatgagaggcacaaaatttcatagctgtcttgcccctcctgtggtctgtaagaatgggaccaggactcctagttgtgaacccgaaaggatttccattaggatcaggaagtgtgagttggcttagaaaaagtaaagaaagaacagtgctgtttcatttatttatcatgtgtaagtaaactgggatttattttattttattttttattttttgtttcagtttcggggggtacatgtgtaggtctgttacatggatatcttgcaagatactgagatttgggcttcaattgaacccatcacccaaattagtaaacatagtactcaataggtagtttttcaatccttttctccttccctccctagtccccccttttgaagtccccagagtctattgttcctgtcttcatgcccatgtgtacgcagtgttgagcttcgacttgtaagtaagaacatgcggtatttggttttctgtttctgcatttattcgctcaggataatggcttcaagctgtatccacgttgctgcaaagaacatgattttcttcttttttatggctgtgtagtatttcgtggtgtatacgtaccacattttctttaactaatccaccattgatgggcacttaggatgattcc

SEQ ID NO: 390828 - DNA, 173 bp, Homo sapiens
tcctccatgagtcctgagtcttttgtgagtgatgtggttcgtgtgcacctgtgtgcatgtgtgtgtgcgagggggcacaggagtctcgtctcgtctccgtgctgtgtgggcagatgaaggttggcctgtttttactctctctgtgtttctccttgtcttttttttattccctc

SEQ ID NO: 390829 - DNA, 539 bp, Homo sapiens
ctatgtaatctcaatagatgacagaaaaaatattcaaaagaatccactactctttattgataaaaacaataaatactcaacaatctagaaatatagaactttcttgatctcgtaagaaacttgtgaagcactccacagctaatgtcatactcaacagagaaagactaaatgctttcccttaagaccaaaacaagacaagagtatgtactgttactatttcttttcaacattgtactggatgttctacccagagtgattaggttagaaaaaagaaataaagccatctgaaatagaaataatgtgacatttttaaagtcatatcaaagtttctaaggaattcattaaaaaggaagcataaacaagttcatcaatgcagcaggatacaagaccattatacaaagatcaattgtatttctataccctggcaatgaacaatgcaggaaatcaattacatttataatagtaccaaaaataataaaacacctagaaataaatttaattaaaaagtgcaaggcttgtacactgaaaaccatgaaatg

SEQ ID NO: 390830 - DNA, 141 bp, Homo sapiens
ttttacccagttttgaattgggttaattccttttttttgctaagaaacctgacccatttgttttctaaacatataatgtgtataaaaaggaattaacccaattcaaaactgggtaaaagattttaataggaatctccatat

SEQ ID NO: 390831 - DNA, 543 bp, Homo sapiens
agtatcaattatcattgactatttcttcacctgaagaagtagaaatagtagtttgaaattaatattcatactctcaaacaccttctgtagactaagggtcatgaattcaaggcagtaaagatgaacagaaaatagtctcaatgttggaggaaaagggagcatgggatccatggagcatggcccatctaaaacagcagcatctcagctcaagttgactgtcatcatgttgaatgtgttgacaaggccaggtgcagtggctcacacttgtaatcccaaaactgggaggccaacgtgagaggatggcttgagcccaacagtttgaaatcagcctaggtaactaggcaagacctcatgtctatagaaaaataaaaattaaaaatgagccagtgtggtggcacatgcctgtggtcccagctactcagaaggcagagatgaaatgattatttgagctcaggaggtgaaggctgcagtgagctgtgatgattgaggccactgcactctagcctgggcaacacagcaacacaccgtgtctcaaaaaaaaaa

SEQ ID NO: 390832 - DNA, 211 bp, Homo sapiens
ctgaactaatttgttcttattttttgccactgcaaacatatatctacagagagaaaaattaatggcattttaaaggttaaaacattttgaaaaattattagcatgtaacaaagaatgcttgcatttgattagtttcaccagcatttgagagaaggaccctttagctctgtttgttgttcaagaacataagcaaccagtagctcaaatgtag

SEQ ID NO: 390833 - DNA, 331 bp, Homo sapiens
tggacacactatggatttcttatcctggctcttttctgctgctttagagacttagcttctctgtaggccaagtgggcactaggagttgcggggggtgtagtacctgctgatgggacttctgaaggtaggctttccctctgaggaacgcgtaggcctacatctgtttgaaatgctgggttggtaatgtcagagcctcatattagcacagctccatcttcttgggtccaggcggatctcactcacctacactagttctctgggggagcttttacacaagtgcccccatccccctctcttgaatatggagtttcacaattaccattttagtcta

SEQ ID NO: 390834 - DNA, 219 bp, Homo sapiens
cagatagagaggtctttctaaaaatgtaaatcagttttgtcattctgctaggaactcttctgtagtttctggctgcacttcaaaaacatcccatcttacctccaagtctgcaagttccttgagccctgcctacttttctgatttcctctcatacaactctccttcagacttattactacttaacccttccattttttttttaagataacaagccattct

SEQ ID NO: 390835 - DNA, 316 bp, Homo sapiens
aggacaaggctccatagctgtatctccagcatctaatgcctgtctggcacgtagtaatgctcagtaaacacttgttgaatgaaaaattaatttatattagaaatggaggaagggcttccagatgctaaaagacactttccttttagcaactatccctccctggatcccagaccccggccccaaaatgtcctagatctgccttcccaagctggagtggctgcagcttttttggctgctccctcctgttttctggtccctatcttcctacacacccttatcttcagcctgggaagaacctcaaagcatgagcaaaact

SEQ ID NO: 390836 - DNA, 806 bp, Homo sapiens
agtggtgttaaaagtaagacattttagttctctgacaatctcatgggctcagtaagatgaaattcaagtgggatcatgtatgtacccagctcttggtagattctagagggaagaccagaagcatctgtggttctgtctgtccttgtctttcttggatggcttggctctgttaatctgccttcccggtccttgtttgaatgtaagctgaaagctcattccgtctgcttctctctgtgcttttgctttctgccggcaggacaagcaccttaatcctctagacctgcctgtcactgtaagtagcactgccatgtggaaagggccccagctcttgcaggtggggaagtcaaagctaggcaagaatctcatggtctgatctagatgttcagggcatgccaagacccagggaaaggttgtgtgctgtgaatctcctttgtcaggacacttagggaagtactgcagattagagtcacagaaaggattaagggggtacctgccccagggagtgtggccccagccttcctttataacttgcctttgcatgggtctgtagttcaactagggcagaccagactcagaaacagctcgtaactttgatctagacaataccatggatgcgtcaccttcttacttgctttagtggaagagaaaaggtatccgtgccctttttggactcttactagaccgtgggaatccgaaaaggtttagacaatcgacaaaagggaatttggatgctcatttcttcattatagggagctttagagaggtcagctttgcgaggagatgaaaggggataagtgcctccccct

SEQ ID NO: 390837 - DNA, 273 bp, Homo sapiens
atctgagatgctctatgacctggtctctatttatctactagcctcatctctagctatttagtccaatattttatgttaaaattatgtaactgtttatcattcctgcacatatcatggatctatgccttgtttcttacggtttctatctagaacacctttctaatcgtcttttacctagttagcagccacttgagtcactgagatgacacctctgatgaggcatcatctccaggaattcattcctggagttccaggttgagtcaagtggccttc

SEQ ID NO: 390838 - DNA, 435 bp, Homo sapiens
taagtaggttgggctggggatcggttccttgatttcatgggtatcaaaagatcttggggggctaatatagatcattcccagagtagggaagccttccagacgcctccttgggaagatacataagcatttatgagcacaggcccttcctctgtgctgtgcccatgatagggatgtgtgtgtactctgaattctttcacccttgggaggctggtgtccctgttcacgctgtgggtcaggacaccgggatgcagggggtcaggtgcctggcaggtcgagtgggcggagagcaattggagctcaggtctatctgtgactttcggggctttgctgcccatggtgggacagaagggctgttccagcaggatgttcctggacatagaggattcattggctctgctcaatggttcctcctcactaccagtcacggggcttctg

SEQ ID NO: 390839 - DNA, 486 bp, Homo sapiens
tccagtaaggtgtgccacagtacagaaattgcatagaagaagagcagagcaaggacaaaggagccctgggccacaccatatttctgtcctgactgtagctgttttgctaaggagcccgtactagccttggaggaacagctttcgatgctgcaaggaaagcacagagtggggatagctgatgggagttgtttcagtggtttaggctgacttggtgattctaggtatgccttaggccagtggctgctgcttcttctgtacatgaatgtcatgaatgtctgagtagggagtgagaggttcatgtaaaccttttatgttgtaggcccagctgtgtggccatgggagggtgcttggcatgattaggatggaaaacttttttgcctacactgatcatgccagagcgatttaatatttcaataagaatttaagggatagactcatcttggagtcgtcgtcttggcctgttttctcaccagtgttttgggtgtt

SEQ ID NO: 390840 - DNA, 1925 bp, Homo sapiens
  misc_feature (2)..(2): n is a, c, g, or t
  misc_feature (696)..(696): n is a, c, g, or t
  misc_feature (848)..(848): n is a, c, g, or t
cntttctctcctccgcgccgccgccgccggtgcgcaggccggctggggactcgcctccgctcgggccttcggtttcgctccctcgctgagtcccttctccccgccaacaaaaggtgatgattcctagcggactgggcacgcctggacggcggagggtggctgggaggggcgaggtcacgctagcaacctgtggctgccaggagaaggcggctgggaagccacggaaagacccgggagcgcaggggaggtggctcagctcgcgcgcagcccctgctcttattttactattatgcgtgttgctgttcgtatccttctgggcggtgaaggggagaggcagcctcccgctccggtgaaacccgtcctgggagtcgcccataaaccctgttctccatctcgggcggctggaggggtgaggggggtgcggcgccttggtgggattggcaggtggtgacttccagggcgcagaggagaaaaatctctgctcttgggcgccaggatcaaggatacccaaacccgcggtggctctgccgcctgttcctctctcttggggtgctggggcacctgggccgcatcccttgtgaagtgtagagcagcagagaggcccggccgccggcccagcggccctcccaaacttccgaaatgccgacgggttggacgggtttccgagagctggcgagttgagaaggacaggaggtntggggtgggggaggggcctggaccgttggagtgggtcctggagaccctaagtggcctatgacaagatttggaaaggtccctggttgacgctagggagctggtggggatcctagcagcgcattttgtctgtgggccctgggccagactctagnctccctgagtgcccagatgggggtctgagattacctattggaccctctcttggcaaagacaaccatagtgtgatagtttgcttttttctcccaaatatgtgtgagttcagcctgtctgggagaatgttgatgttagaaatcaggcccagaggccaacattggcaattcctagatttaagattaaaagaaaatcagagggtctctggacctagttgtgggcaggtgggaactctcctcctacccacctgcaaggtcccaggactgggcataggcagagatctctggagtgttgcagttagagggttgtttttgtgttgttcctgtatttgttaatgaaattgatattattttgacttcctcactaaagatgcaagtatttctcagacctagggagttgagtagggagtctgggtggggtggaggctttttctatgcacattttcccttactctgtcacagctttcacagtctcagttccctccagcccaatccccagactctcagcttagtaaattcacggcttctgggagcttcagaaagttggttcgtaaaccccagatgcccattttggccctaccaccagcaacccaagcaggtggctaggcgagttcatatgtgtttagaaggaaaggacccgtctggggctaggaaggtggggaaatggggttcctccccacacctccccgggatagaccctctctcctggctcccaggatgtgtgagaggctgggaggggccctatatcatctggctgcatcttttatggttcctcattgcccttcattcggaaatgaaacgcctttgatcttttctcaggttgtaaacggaattgcccgtcattaaatatctggggccccatctgcttggtctcccagcatttttctttacagctgtttctctctctttttaccactgaatttttccaaaaggacttttattacaccaccttcacacccagccgcctcttcctcctcccttcgctgagaggcgctttggaaaatatctagatattcgtttgatcacaaactaaaggcttggaggggcacggaggagccgattggggttttgttttttcta

SEQ ID NO: 390841 - DNA, 1723 bp, Homo sapiens
  misc_feature (2)..(2): n is a, c, g, or t
  misc_feature (696)..(696): n is a, c, g, or t
  misc_feature (848)..(848): n is a, c, g, or t
cntttctctcctccgcgccgccgccgccggtgcgcaggccggctggggactcgcctccgctcgggccttcggtttcgctccctcgctgagtcccttctccccgccaacaaaaggtgatgattcctagcggactgggcacgcctggacggcggagggtggctgggaggggcgaggtcacgctagcaacctgtggctgccaggagaaggcggctgggaagccacggaaagacccgggagcgcaggggaggtggctcagctcgcgcgcagcccctgctcttattttactattatgcgtgttgctgttcgtatccttctgggcggtgaaggggagaggcagcctcccgctccggtgaaacccgtcctgggagtcgcccataaaccctgttctccatctcgggcggctggaggggtgaggggggtgcggcgccttggtgggattggcaggtggtgacttccagggcgcagaggagaaaaatctctgctcttgggcgccaggatcaaggatacccaaacccgcggtggctctgccgcctgttcctctctcttggggtgctggggcacctgggccgcatcccttgtgaagtgtagagcagcagagaggcccggccgccggcccagcggccctcccaaacttccgaaatgccgacgggttggacgggtttccgagagctggcgagttgagaaggacaggaggtntggggtgggggaggggcctggaccgttggagtgggtcctggagaccctaagtggcctatgacaagatttggaaaggtccctggttgacgctagggagctggtggggatcctagcagcgcattttgtctgtgggccctgggccagactctagnctccctgagtgcccagatgggggtctgagattacctattggaccctctcttggcaaagacaaccatagtgtgatagtttgcttttttctcccaaatatgtgtgagttcagcctgtctgggagaatgttgatgttagaaatcaggcccagaggccaacattggcaattcctagatttaagattaaaagaaaatcagagggtctctggacctagttgtgggcaggtgggaactctcctcctacccacctgcaaggtcccaggactgggcataggcagagatctctggagtgttgcagttagagggttgtttttgtgttgttcctgtatttgttaatgaaattgatattattttgacttcctcactaaagatgcaagtatttctcagacctagggagttgagtagggagtctgggtggggtggaggctttttctatgcacattttcccttactctgtcacagctttcacagtctcagttccctccagcccaatccccagactctcagcttagtaaattcacggcttctgggagcttcagaaagttggttcgtaaaccccagatgcccattttggccctaccaccagcaacccaagcaggtggctaggcgagttcatatgtgtttagaaggaaaggacccgtctggggctaggaaggtggggaaatggggttcctccccacacctccccgggatagaccctctctcctggctcccaggatgtgtgagaggctgggaggggccctatatcatctggctgcatcttttatggttcctcattgcccttcattcggaaatgaaacgcctttgatcttttctcaggttgtaaagaaaaatgctgggagaccaagcagatggggccccagatatttaatgacggg

SEQ ID NO: 390842 - DNA, 287 bp, Homo sapiens
cactccatacatgacagagctttgtgtggctggttggagaagatgaagtcagagaaggtgggagcttgagaaggactccataagttgttattggttgaaagatgaaacagacaggtaaggaggaaagcacgtggcctctggagtcagagtagactgtctccccgctgacagccagcacagaaaaagggccctcagtcccccacaaacaagaataggaactctttcattatctgtagtgaacctggaaaaatagcttgagctctaggaaaaaaacacagccagcccat

SEQ ID NO: 390843 - DNA, 306 bp, Homo sapiens
catgacatcttttagtaaggaaatagactctacaaataaagttgtgtaaaacagaaagttaggtctttgaaatccttaccactgccaatgggccttgcatttaacaaatagaatataaaactacagactaagcatagctttaagaagcctgtaactaatagctacttggtacaagaatgtgaagtcagcccaggtgaggtggctcactcctgtaattccagtattttaggaagctgaggtggctgaatggcttgagctcaggagttcgagacaaggctgggcaacatggcaaaaccctgtctctat

SEQ ID NO: 390844 - DNA, 458 bp, Homo sapiens
aaaatcaataacgcacaatgcttttcccatcatttatggacactcacagaatagcaaaaaatttgagtcacctggtgcacacatctccagctgcagtcaagcaacgccacaccctgctttcttattctcttactataaacaagtgtcctttttgtggtctagttagtgccatgttttctatatttttgtgctttgtgattttgctgtttaaaatgtccccagtttggccaggcgtggtggctctcacctgtaatcccagcactttgggaggccgaagcaggtggatcacctgagatcaggagttcgagaccagcctggccaacatggtgaaaccctgggtctactaaaaatacaaaattagccgggcgtggtggtgcatgcctttagttccagatacttgggaggtggaggcaggagattcgcttgaacctgggaggtggaggttgcagtgagcaaag

SEQ ID NO: 390845 - DNA, 320 bp, Homo sapiens
agggatgtccaatgtacgcagctccttcctgcgctgcatccaaccccgagcggagcagtggaggaagcctctgaacggaacctcgcaggcagctctgctcagagcccctcacgggcaaacacgccaacacccgcaacccggcctgtctcagggagggccctgctcacagcagcagagccacagaacctgtgaagggacaatggacactgagctggggacactggccacttctaggggacactcaggctcacaggaggccatgctgtgcttcttctccttccctccctccctttctttccttctctctcccatcccctttt

SEQ ID NO: 390846 - DNA, 703 bp, Homo sapiens
agaatatggaatacatctcaattaattttaaggtaatatataagctaacaaaaccaataaagacgtaatacatcatgacctgatagttattcaaggatgaaatattggttaataagaaaatcaatcgatgtaagatgccacagtagcagactgaaataggaaaatattaaggttatcacaataaatgcaggaaaaaattgacatgttttaatgctactttataataaatatttttgctaatttgaaatagaagacttcttcaagctgagaaggtcatctataattaaaaaaaaaaaaaacaaaaaccttacaattaatgccaggcttaatggtgtaacattaagcgcttctcatgtaagagaatgaacaaatcaagagtttcttatatcatttctgttcatcatttccttaatggccttagccagtgctataatgcaagaaaaataaataaaagatacaaataaggaaaaaagtaaaactcaatattcacaaacaacatgtgtgtaaaatacccttcagtatcagcaaaactaccaatagaactaatatgtttgtttagcaaggttataggatagagggccaaaggtaaatattaactacaattctacataaaagcaataaaaaactgaaacaaaaaattactatttacaatatcatgaaaaataaatagaaatgaatctaatgacatcatacaagactgttg

SEQ ID NO: 390847 - DNA, 322 bp, Homo sapiens
tcctcctgccttggcctcccgaattctgggattacaggcatgcgccaccacaccccgctaattttgtatttttaatagaggcagggtttctccatgttggtcaggctggtcaagatagaatagtacttttcaaaatgtggtttcttgaccagcagcagcagcagcagcgtctcctggaaatttattataaatgcagattttaaggccctggtcccatacctactgaattggaaactctagactggggtccagcaatctgtattttaacaagcatgccagatgattctgatgtacactcaaagtttgggaactgctgttaaga

SEQ ID NO: 390848 - DNA, 402 bp, Homo sapiens
ggtagaagaattcttgtgagagaaaataagaactctactgaggttaaggtcatgagatggagaaaaaggaactaattccagaattcgagactttgtgccttttgattatggatggtgaaagaaaggagggagttaagaaactttcaggtgaagtgagtgaagggattattaagcaagacaagcaatagagaaaaggaggcaggtaggagaagaagataatgatttcactgaggtgactgtgctacactctcatggtaatgtagaaaatataattctgacacatcagagggagctggaggccagaggcacccattgaggggtcaacatatggcaggtaatgggacaagactaggggcaagaccaaaacccataggaatcacatgagtgaggagaaatgatgag

SEQ ID NO: 390849 - DNA, 248 bp, Homo sapiens
gagagaaacccttcagtgctctgggcctgggcttagtgtgctctccccctggggcagggatccatttggagcaaaaacctgtgcagccaacaggggaaggttcaacacatccacgtgggtccacccccaacccccagacccacggccttgaatgtttaaccccctccatctctccaggccttcgccccaggctgtgcagggtgaggagagcctgagcagagtaggcgtcacatcccagagtctgttgg

SEQ ID NO: 390850 - DNA, 273 bp, Homo sapiens
tcctgtctaacaaagatgataggatggcttccctttcagcctttgcgtgaacttaacttctggttggaaataagatcccattgtctaaattatgtcagcgtagttcctggtagcacaagaatattaaacactttaatgtgacatccaaaattaatgagtcagttataagaactttccttgaaggatggaaaagatcataacccattttcatgtcctgggatgcttcattcagtctcatggtattaaaaaatgaacagcctttggattgggggg

SEQ ID NO: 390851 - DNA, 572 bp, Homo sapiens
catttttactctgtagaaatattgtgatgattattacaaatgcagttccgttagaggagctgaaatttgtctttgtgattttatgccagctggtagccatgaaaattcatgggcgggtggaattgctttgatcagaagtcatctcttttttctgtctccatgccttcattatcagtctctccacattcttgtctccgtgtctctcctgtcctgtgatgttttgctcttcctatatccccatagttctttcatacattttcgtcattttctcaaactttttcaattgctttctccagcacatacctacttcctgcttgaccagcctaaagaaggctatgtctggataggatcaatcataaaaattatttaattctatgccctttactttacagatgaggaaactgaggcagagaggcgaagtagcttgcccaaataaagaaataaagaccaggagaccagacgcagtggcttactgctataattccaacattttgacaggcccaggagggaggatcacttgagctcaggggtttgagaccaacctgggcaacatagcgagaccccatttctaa

SEQ ID NO: 390852 - DNA, 517 bp, Homo sapiens
actgatgtcctctccctcagcttccaaatagactgaacttagcccatactttttttatcaatttaatttttttgagacagggtcacactctgtcacccaggctggagtgcagtggtgtgctcacactcactgcagcctcgacctcctgggctcaagcgatcttcctgcctcagcctcccaagtagctaggactatatgtttgtgccaccattgatacagtttgctgacagatttatctaagattgcgactcctttcccctacacttctattactactctgctttattttaatccttagtatttataatctaacatatgatatattttgcttatttatcttatttattacctgtttctctcactagatgcagcttcaggaaggcaggtgtttttgtcttgctgcgttccctgtacttagaatactgtctggcatcagttaatatttgttgaatgaatgttgattggaccggatgtggggtgtgagcgaaagagaggagtcaaagatgaagccaaaggc

SEQ ID NO: 390853 - DNA, 525 bp, Homo sapiens
accaaccggaatattgaactaggtacgagttatttggtaaaggaagatggaactgaattctctaaataaagcctggaatttcaattttttctcatcagttgaaaagaggactaaatgatgttaattcaccagcccagagaagtggccaaaacctgtctgtgctcaaagaccctaggtaggggaagatagtcacccatgtgaaagagaagtcacaagcttgtttcatgcacatgagtgggttcagaatttacaccgtatacttaattcagggaaccttagtcaagaaattgccatttagattgttttaggacagccatctcaatgaaaacataaaaaggaccatcatgaaagagaatcatcagaatgtaatggaaatcccattttatcaatgttcaatatgccatggagtttaaatttgataagccttgttttaaagctttgtaaagtacatgacagtacacgacaagcgctctaacagcaagagtgttaggatgcccaagaattagagttaatagaagaatctca

SEQ ID NO: 390854 - DNA, 342 bp, Homo sapiens
gaggctctctgggccatgcgtgaagggtgggatgatgctgttttagaaaaagagactacaagaccgggtgcggtggctcacacctgtaatcccagccctttgggagactgaggtgggcggatcacttgaggtcaggagttcgagaccagcctggacaacatggcgaaaccccgtctctattaaaaatacaaaaattagccaggcacggtggcacgtgcctgtaatcccagctactagggaggctgaggcaggagaatcggttgaacgtgggaggagttggttgcagtgagccgagatcacgccactgcactccagcctgggcaacagagcaagactctctca

SEQ ID NO: 390855 - DNA, 540 bp, Homo sapiens
gtgaacggagccttcccctgccctgccattttaaaacttcaacagaggttccagcaggacccctctagaatctggaggcacctctcttggtacagaaggttgagaaagtcaaatttagggattgttactgtgcaccttgtcacttttttccttctattctcccacttccaccttgggagacttgttaatatacataggactcatgctcctcaacgtaccatggggttatgtcccaaaaaacccatcatgagttgaaaatatggtaagtcagaaatgcatttaacatacctaacctaccaaacatcatagctcagcctcacctaccttaaacatgcacagaacccttacattagcctacagctgggcaaaatcatttaacacaaaacctattttatttttttaaaaaagtgttgactgtatcacataatatattgaatattgtactgaaagtgaaagaatggttgcatgggtacttgatgtacggtttctactgagtgcatattgcatttgcaccatcgtaaagacaaaaaataagtcaag

SEQ ID NO: 390856 - DNA, 711 bp, Homo sapiens
ccttcagctcgtacccacttcccaggttaaaataattctcatgcctcagcctcccaagtagctgggatcacaggcatgcacacacacccagctaatttttgtatttttagtagagacagggtttcaccatgttggccaggctgctctcaaactcctggcctcaagtgatctgccaagtgctgggattacaggcgtcagcccagccaatgtgtgtgtgtgtgtgtgtgtgtgtgtgtgtgtgtgtgtgtgtgtgttgggggagggggcctctcctgccctgcttatacctgactagctacctactgtaacaaggcacttggaaactggacgttgcactttcacttgcacatttgttcttaggttgaacccatagttctataatcttaaacatctagtaaagataacaaacttatttgactagtaaaagcaggtaaaataaaatgttatgctcgtattatacttaaagctggtaactcagaagacacagctgtttgtattaaaccaacaatattgagctagtcttatttacccaagatttacccaagttatgtgaactttaaaaacattttgggttagttccattgtctttaagagtttaagtaatacagtcttccttctgtcaaggttccatgaccccctgtggaaaccaaaatctgaagatgctcaagttccacagttggccttgtacatacaaaaagttagcccactgta

SEQ ID NO: 390857 - DNA, 527 bp, Homo sapiens
gaaatattgatgttcatataatgttaatatttgcttaaatagtgattgagggctgtattttctttttatgtgatgatcctgatagtaatgttttgctaccattgtatccaactttttgattttcaattaattacctttgcaagtgactatataatctttctttgtaaaatcacttcatttatatctctcctctttcaaatcgctttgatttccccctggatctccatatgcagagtatcttaagtgtctatttgtagcagtgatttcctctttcactgtatttctgaatcttctgctgctactgggtatttctacttgggtatcccaatgtgaccttgaactataaaactgaactcctcttcttcctgccttctttcttcctcagaactccttccgcaaaaccagctgtgatttttttttccttttttcttagattaggagcctcccagacatccttgactcctttctcttactttctcatgatgtgtagtccagtcaagcaccatgcattttcagttgttcttaaa

SEQ ID NO: 390858 - DNA, 723 bp, Homo sapiens
ggtgtgcgccaccatgcctggctaatttttgtttttttagtagagacagggtttcgccatgttggccagctggtctcgaactcctgacctcaggtgatctacccacctcagcctcccaaagtgctaggattacaggcgtgagccactgcgcccaggccttatggtctgttgagcagttcttctctaattaaatgttagccttgttagaaagggatagaagttagaaaatatatatttatatatacttgaaaaattttttttacagacagggtttctctctgttgtccaggctggagtgcagtggtgtgatcatggctcactgtaccttcagactcctgggctcaagcaatcctcttgctcagtccctgagtagttgggactacaggtatgtgccaccattcccagctaagtttatttatttatttatttattttttgagatggagtctcactctgttgccaaggctggagtgcagtggcatgatcttggctcactgcaatctctgcctcccaagttcaagcaattctctgcctcagcctcctgagtagctgggattacaggggcctgccaccacccccagctaattttttgtatttttagtagagacagggtttcaccatcttggccaggctggttttgaactcctgacatcgtgatccacccaccttggcctcccaaaatgctgggattacaggcgtgagccacagcgcctggcctaaattt

SEQ ID NO: 390859 - DNA, 329 bp, Homo sapiens
tagctgggactacaggggcgccagctaatttttttgtatttttagtagagacagggtttcaccatgttggccaggacggtctcgatttcctgacctcatgatccacccgcctcagcctctgaaagtgctgggattacaggtgtgagccatcgcacccggccccttttttctcactttcgttcctgaattgcattccaaagactgaacttgtcttcttttactgccctttttatccttgtataagaggtatctttgattcagttttcattagttttctaggctccatgcttctttggcataaaactcttctagctttgttccttgccctt

SEQ ID NO: 390860 - DNA, 465 bp, Homo sapiens
gtccctacctccccatgtcactgaagtgaactccagaatatggacctagataatttagagtccctggacatgaatgataggacaatatactctagggctctgattttccatatcaccttgacaaatctccttgacaaaacatgggcttgcctcaccttctcaaccatccccaccttctcaaatacacacactacatctatatctttactagtttcacaacagcatatctattgattaagatatatttggtaaagaaaaacactcattttgagaaagatgacttcagaccattctcttcctctctctgggccttctctttgtgggcatgatgggaaatgaactacagatactctgcaaggtccctttcatctctaatcttccagaattctatgactgtttctgaagagaggaagcagtttttagaagttctgttgcaacctgtagtgactctgtggtgactcagta

SEQ ID NO: 390861 - DNA, 261 bp, Homo sapiens
gcccccatgccagccaggtcccaggaggtggtaagtcaagatggacagcctcttgcaacacataggaagatccaagacctcggctgcctcactgtgtgacctcaagcaggccccccacctctcagcctccatttcaccaactataaagtgaggagactacttgatcgagtccttcccagctccaaagccctgaatctataaaaacagcacctaatggccaggcgtggtagctcatgcctgcaatcccagcactttgggagg

SEQ ID NO: 390862 - DNA, 354 bp, Homo sapiens
gagaaggaatagaaaatgcatatatttaactggtgccaggagagaggtttgtgtacagtacaggcatacctcagcgatactgtgggttcagttccagacaaccacaataaagtgactcacttggatttttttgtttctcggtgcatataaaagttgtggttacactataccgtagtctatttaaagtgtgtaatagcgttacatctacaaaaacaacgtacatactttaatttggttaaggtatggctaaaaatgctaacgatcatctgagccttcagcaagtcataatcttcttgctggtggagggtcttgcctccatgtctgatggctgctgactgatcagggtggtggttg

SEQ ID NO: 390863 - DNA, 454 bp, Homo sapiens
ggggcagaggtcacctgggatgggtcacctggaagatctagggcagcggtcctcaacagagggtgattttgttctccatgggacatttaacaatgtctgaagatattttggattgtcataaccaggggtgggggagctactgcatctagcagataaggccagacacgttgctgaacttcctacaatgcacagggaggcccctacaacaaaggattatccagcccaaaatgacaatagtggcaaggttgagaactctgatctagaggaaagctgaagtcacacaacatcctcaaagggcttcctagagccaggctctatgaaagaatcacagatgggaggacaaacgtccctgcctgccaggacctgccaccaaaacctgaacatgggacggcctgaaccttcacatttaggccaagagtcctcagcccttgggtcagaagatgtgtgtgccttc

SEQ ID NO: 390864 - DNA, 342 bp, Homo sapiens
aggcagaattgcagatttttaaaagcagactacatttcataaataaatttatgaaattaggtagaatataatctgaagagaactaattagaatattagtgaactaaagtacattcaatgtagcattaataatttcattttctaatttttcaaattgttatacattgctcgtttctcagactagatatacattcatgttgattaaagtttgtttaaaacaggcattaaacaatgtttaaaccattttaaagatcacaggctaggtgcggtggctcacgcctgtaatctcagcaccttgggaggccaaggcaggtggattgcttgaggtcagggcactgtttgg

SEQ ID NO: 390865 - DNA, 372 bp, Homo sapiens
ggcaaggcaaagtgccctaatgcgaagcggtgaaaacaagctactactcatgcatgcatgcacagtgccagggccgcgcctaatctgacgcagcagtcagacggcctaatgcccatttgctggatggtgaggctgaggtggagggaaggccaagccaccagcctcggaagcccagcgggaggtagcctcggagccctgcctctgcgcaccttctgcgctcgctgggagctgcctgacttctgcacgccgaggctgaggtcggggaggaaacagcaggaggacagctgccgcccccttgaaccccgtgctcacccgggagggaaaggtgggggccggtgctggttctggctgtccccctcccccacttcgagt

SEQ ID NO: 390866 - DNA, 555 bp, Homo sapiens
tcttgagtattcattgtacagccttttcagaaggaaaggagaaatgtggattaatctggagcatcggttaagagagctactactttaattacagaatttgttcaattacaggattaaagtacagaattagttccagcttttgaagtttttttgtatggtgttaattggaattttctagtttttgaggtagagttatggtagaatagagagaaaagcatttttaaatgtgatttttatgagaaaattatgtttccagaatttagggatatcattataaaaagatatacttccatgcttgttttttacttacgttttttaattcttgggctttagaggatgataatgatcaataaatggtagtcctaaacttgttaccatgttcttctaggatctttttgccttttcttttttttttttttttctttagatacttcttagaagttgaagtctttttgctgttttcacttaaacttctctcttgctggctgtttctaaagaactgactctaagggaaaatttctgaaattatgtgtcttcaggattgtatctcttttg

SEQ ID NO: 390867 - DNA, 349 bp, Homo sapiens
taaatcccttttaatctagattctccctctagctccttttattccacttgtgtgtgtgtgtgtgtgttttgtttttttgtttttagtggaaaacagacctttgtcatgcaaacttttccagtctaaatagtgactaaaatgattcctatgtattcatgaaacccagagctttggtcatatacaggttcagttttgtgtgtataggtgagagagaattagtcagactaattcacaaagaatgtggtggctttacaaacatgtgaaaatcttcaacacttcctccatcaagaggttgaagaaaagtggggctgggaatgggggattctgaggagaccagtcctttcccctt

SEQ ID NO: 390868 - DNA, 266 bp, Homo sapiens
aagtttctgtattgctttggaagtctctggttaaatgaatacccttttaatagtgacctgtgattctgttttgatcaagtgttttcaaacttgacatctttgatgggtttctccagtgtcaaaatcctaaatcaggtctttttggcttaaaattaactttgggatttttcagctgcgtcccttggggagtctaaagaatgtatctctcatcttgtagcggtattaagtgattcgatttatttggtagattttatgggcgggcattg

SEQ ID NO: 390869 - DNA, 859 bp, Homo sapiens
cctcactggtaacagagcactccaaggttctaggggaggttggaccccaaagttggaagaatctgggcacctgagtcacctgatggaggagctccaactgccaaccgggggcccccatatggacgtgtcacccagtgagaagtgagccttccattgtgacaaactgcaggtatttcaaggctaatttgttaaaatctacggttaatatgctatatatgacttttgaatagtcagaggtgtgccctccacattagactgtgaggtccgttgacttgtgtggctcgtctctgacacagactcaagcccttaataggcgcctggaaacgtatgttttcgttcacacaaaaaggaagttgaccaagcccccttgatgaagcctcactggggaggtggcccatcgaaggttgtatattgtgaatggggcgaaggcagcgtcgccgtctccttcaagtctgacctccaggttggtgttcagattccccctccacaccccacagccgtggttgcccgtctggatttggtgtttgggtcagagatgacgttcgggccgggcgtatggatgatgatgtccaaggagacagttctctcctttaccccagtcacaggaaggaagaactaagcctcatggtgacttcctgggagatacgtggtaagaagccacaagacggttgggactgagtctctgcgcaccgcatcctgagcctctgcattctgcacagcggggcgggcgcaggcagcacggtgccccttaccatgctttcttcctggactttcccttgaccagtcttggcacggcaggcgagggattgagggattggggctgggaggtggggaagacagctctctccctgggcccatg

SEQ ID NO: 390870 - DNA, 208 bp, Homo sapiens
cagtggccgcagttgtggtggtggtggtcagcactggggggataggtgttgtccctggagttgaggaggggttggtggtggagccggtggccgtgatcgtagtggccgtggtggtcagtgatgggggagtaccactggtctgtgtgctagaggagggtgttgcacatagaaccagtggccacagttgtggtggtggtgtcagcactgt

SEQ ID NO: 390871 - DNA, 549 bp, Homo sapiens
ctaccgttctcactgtttcttctataaccaatctccttcccacttctgttctcttactcatgccattcttccctcagtcatttttcttccttccatacaaattccatgtctttaaaaaggaataatcctacctcctccacatagctttccaattctctgttgcccacatttgtctccctttcaatacttctctgttgtgttatgtgacacatcacatttgatatactctgtactgtgtttcaagtattgtattctcttgtttactcaagtcattatttcaggactgactacccagtagatgctttaagtcaggatttctcaaccttggcactgttgacattttgagctggataattttttgttttgggggctctcctgtacattttaagatgtttaacagcacccttggcctctatccagtagacgcctgtactgcctccccctatctgtgacaaccaaaaaggtcttcagacattgtcagatgtctactgaaggacaaaatcacctctggttgagaaccaccgcttcaactaagttatcttctctgta

SEQ ID NO: 390872 - DNA, 370 bp, Homo sapiens
cggaattgggcattttttaacaaggaaattttttgatgataatggtagtgatgacaatgataattaataatcctgtatagttattaattctggacaaaaacatggtctggccttgtgtggtcactttccttattctctccttctttcttcctcttatattttatgtctctattccttgtactaatacagaaatgcagattgggcagggggcacctgcctttgaggaagtctgatcgtgatgagagtgaggaaggtagttgccttgagctgagccttctttgcctgtagttgggcccccatattccctccctgctgcaaggctgtttgaagacagccctagtgtttactggccttctctaccccaatgagg

SEQ ID NO: 390873 - DNA, 238 bp, Homo sapiens
ctttgaaaattaaatatggaagtgtcaacaaagcatatggtggaggatctggtgctcaaagaatattagttatcttccttaaggaacttgtgagtattggtatattgggctacaatgtgcctgctacaaaaccaaaaccaaaaaccccttcatctctacttgtctctactactaatgtcagatagtagacattaatatctgacattaaagagtgagctatttagcaccccctctggta

SEQ ID NO: 390874 - DNA, 353 bp, Homo sapiens
gacagcagttgggttcggtactatccacagtttcaggtatccactgggggatcctggaatgtatccccccaggataaggggggaccactgtaccacatttatccatttatccatcgatggacatttgagttgtttccaccttttagcaaccttctgtggatttataattctttgaaaataaaatgttaaaaaatacaatcagaaatgaaatctatgaattggctcactctttcacctactgagtatgtaaactagtgtttgttgttgacctgttgacttttgtacagttcccatcacagagacgatttaagcttggtaggccatatagaacctgattttttctttcctgcttt

SEQ ID NO: 390875 - DNA, 438 bp, Homo sapiens
tgtgtgtgtgtaagagagcgagcgagagagacgccagccgttgtgatgatgttaacattctctgggtctacaccagtggccctttctgcctgcatttttattacaacatagtcctaacactgcatttcactgtcaggcacctccgtccactccactcctgcgcactcctcccggctgtgtctcctgtcttttttgggtcccttttggaaatgtgggctcctcagagtatttggagccaccttccccccaacacctccacctctaggggcctggtcctttgggagtgggcagggccctatgaaaagcacctagcacccacggaagacaatgacatcatgtggggccaagtccgatgtcctccatcacacactattgcccagcttccatgggccttgcaagtttaaggggaaaaaaaatgggaagccatttctgagaaaa

SEQ ID NO: 390876 - DNA, 758 bp, Homo sapiens
ttattttaaataatggaatcatgctaatacacattgttcatcagattacttttttatttttaaatttctactttaactaggtaaattatcataagatgtagaaagaaaagaaaggttaagactaatccccaaccattatttcccatctcttcaatgtatccagtgttaacactccacatatatgtttccatggtaccttatcttagttataacacccgtttgatcatattgtctgtattgtctgttttttgtttttgttttttttttaatcacctaagccatgaactctttgcaaagttggatggtggcttggcttggtcattacaatgtccctggtacctgacacactgactggcacacagcaagcattcagtataaaattaaggcaatcacccagatggaagaacacatagatgaagaaattaatgccattttctttgtaggaaacattccattaaaaagctaaaattgatcctgagtgttgcactatgatgcaaaatcaagaaaacagattattttatactaaagagaggagaaaattcaaatggaatacaaacgtggaaatgtgcctggagtgagtgtatgctttctgttgccactataacagcaagggacatggatccttaagtgactgtggaatataaatgaaaattctctacatgtttacatggctggctgagaaatgtactcagcacaacgttcaacagatatctattgagcggcctgtatgtaggggctctgggttgagctctatgggc

SEQ ID NO: 390877 - DNA, 385 bp, Homo sapiens
ctggacctgaagtggccaatgactgggttctcctctccagcatgggcagtcaagcaagatgagcatccacgagccgacccccaacccctccacaatgttcatgcatggatgtccacactcctggaaactcttccaggaaggggtggtccaccaatgatctagagatggagtggggttgtttttggatactcacaggtctccactacagcaagcaaagagcccccaacattttcctgcccctccccccagacgcaaaaatgcttccaagaacaactgagatactaaatcactagaccctacatacccagatagaccaagggagtgttgggttcccacactgctacatccaaagaatgcagaaaggttcccgacaaccagttgtacc

SEQ ID NO: 390878 - DNA, 595 bp, Homo sapiens
gcacactgaggcctgtgggattaagtgatttgcctaaggtcacccacatagctagtgactggccaagtaggaattcatgcccacaccctcaaactcttagccaccactctgtctggatatgacaccaccactagaaactaagaatccatcctctagatctctctctcttccccctgacatcccattggacgtattcattcaatggcctgaatttttttttttttttttgagatggagtttcgctcttctggctcaggctggagtgcaatggtgcaatctcggctcaccacaacttccacctcccaggttcaagcaattctcttgcctcagcctcacgagtagctgggattacaggcatgcgccaccatgcccggctaattttgtattcttagtagagatggggtttctccatgttggtcaggctggtctcgaactcccagcctcaggtgatccacccgcctcggccccccaaagtgctgggattacaggtgtgagccactgcgcccggccagccgaaatggtttttgaaactcatcttttgtttcccattgccactgggtgccgccattttaagacttttaatctactgtggagg

SEQ ID NO: 390879 - DNA, 529 bp, Homo sapiens
gagagattaaatatccacatatatacccagcaagtggcagagccaggattcgaaccccaggcagttaaaagtgtatgcggtttactacattctatttaatcagtcacctccaaatatcctttttgggtatttaggtttaccagtgtttcatataaaaataaatgcttaaatggaggtgaaatctttttaagtgaattttcacacatctcatattttcttacactggattcctagaagtattattgaatcaaagtatacctttattaggatctgtattaccatactgcattccacaaagggtataccattttacattctcaaaagtagtatcatctacactggtaattactctaattttaactagtttggtgggtgaaaagggacatgacattattttactttgctttttgtgaacttaaatattgtttgtgtattgatcatttgtatttcctctctttggaactgcctgttaagataaaatgcattttaaaaattagtcctgttgggagaactttgtaggatcaagaaa

SEQ ID NO: 390880 - DNA, 2910 bp, Homo sapiens
cgcttgcgcgctggggacaaccgttgctgggtgtcccagggcctgaggcaggacggtactccgctgacaccttccctttcggccttgaggttcccagcctggtggccccaggacgttccggtcgcatggcagagtgctacggacgacgcctatgaagcccttagtccttctagttgcgcttttgctatggccttcgtctgtgccggcttatccgaggtctcaatccattgcgcccaggctggtatgcagtcatgttgtatctggaattggtgggttcttggtctcactgacttcaagaatgaagccgcagaccctcgtgcaccatgagtgccgaggaggatgccaggtggctccggtgggtgactcagcagtttaagaccattgcaggagaagatggggagatcagcctgcaagaattcaaagcagctctgcatgtgaaagagtccttctttgcagagcgattctttgccctatttgactccgatagaagtggcaccatcaccctccaggagctgcaggaggcactgaccctgctcatccatggcagccccatggacaaactcaaattcctcttccaggtgtatgacatcgatggcagtggctccattgacccggatgagctgcgcactgtgctgcagtcgtgtctgcgcgagagcgccatctcgctgcctgacgagaagctggaccagctgacgctggcgctcttcgaatcggccgacgcggacggcaacggggccatcaccttcgaggagctccgggacgagctgcagcgcttccccggagtcatggagaacctgaccatcagcgctgcccactggctgacggcccccgccccccgcccacgcccgcgccggccgcgccagctgacccgcgcctactggcacaaccaccgcagccagctgttctgcctggccacctatgcaggcctccacgtgctgctcttcgggctggcggccagcgcgcaccgggacctcggcgccagcgtcatggtggccaagggctgtggccagtgcctcaacttcgactgcagcttcatcgcggtgctgatgctcagacgctgcctcacctggctgcgggccacgtggctggctcaagtcctaccactggaccagaacatccagttccaccagcttatgggctacgtggtagtggggctgtccctcgtgcacactgtggctcacactgtgaactttgtactccaggctcaggcggaggccagccctttccagttctgggagctgctgctcaccacgaggcctggcattggctgggtacacggttcggcctccccgacaggtgtcgctctgctgctgctgctcctcctcatgttcatctgctccagttcctgcatccgcaggagtggccactttgaggtgttctattggactcacctgtcctacctcctcgtgtggcttctgctcatctttcatgggcccaacttctggaagtggctgctggtgcctggaatcttgtttttcctggagaaggccatcggactggcagtgtcccgcatggcagccgtgtgcatcatggaagtcaacctcctcccctccaaggtcactcatctcctcatcaagcggccccctttttttcactatagacctggtgactacttgtatctgaacatccccaccattgctcgctatgagtggcaccccttcaccatcagcagtgctcctgagcagaaagacactatctggctgcacattcggtcccaaggccagtggacaaacaggctgtatgagtccttcaaggcatcagacccactgggccgtggttctaagaggctgtcgaggagtgtgacaatgagaaagagtcaaaggtcgtccaagggctctgagatacttttggagaaacacaaattctgtaacatcaagtgctacatcgatgggccttatgggacccccacccgcaggatctttgcctctgagcatgccgtgctcatcggggcaggcatcggcatcaccccctttgcttccattctgcagagtatcatgtacaggcaccagaaaagaaagcatacttgccccagctgccagcactcctggatcgaaggtgtccaagacaacatgaagctccataaggtggactttatctggatcaacagagaccagcggtctttcgagtggtttgtgagcctgctgactaaactggagatggaccaggccgaggaggctcaatacggccgcttcctggagctgcatatgtacatgacatctgcactgggcaagaatgacatgaaggccattggcctgcagatggcccttgacctcctggccaacaaggagaagaaagactccatcacggggctgcagacgcgcacccagcctgggcggcctgactggagcaaggtgttccagaaagtggctgctgagaagaagggcaaggtgcaggtcttcttctgtggctccccagctctggccaaggtgctgaagggccattgtgagaagttcggcttcagatttttccaagagaatttctagcctcacctctccaagctctgccccaagtccacaccatgggtctgcttcatcgcattagtataaatgcccccacagggaccagcctcagatgacccacccaataagacaaagcctagggaccccctaatcctgctcaacagagagaacaggagaccccaaggggcagatgaacttcctctagaacccaggggaagggacagtgccttgttcagtctgctgtagattctggggtttctgtgaaagtgagggaaccagaggctggtcacgggagcttgggggtggggttcgagggggcagagggcaaccactcctccaaacattttccgacggagccttcccccacatccatggtcccaaacctgcccaatcatcacagtcatttggaagcttatttctccggcatcttataaaattgttcaaacctaca

SEQ ID NO: 390881 - DNA, 2661 bp, Homo sapiens
gatctagaagacaggagaagatgaacacatctggagacccagcccagacgggccctgaaggctgtagaggcaccatgagtgccgaggaggatgccaggtggctccggtgggtgactcagcagtttaagaccattgcaggagaagatggggagatcagcctgcaagaattcaaagcagctctgcatgtgaaagagtccttctttgcagagcgattctttgccctatttgactccgatagaagtggcaccatcaccctccaggagctgcaggaggcactgaccctgctcatccatggcagccccatggacaaactcaaattcctcttccaggtgtatgacatcgatggcagtggctccattgacccggatgagctgcgcactgtgctgcagtcgtgtctgcgcgagagcgccatctcgctgcctgacgagaagctggaccagctgacgctggcgctcttcgaatcggccgacgcggacggcaacggggccatcaccttcgaggagctccgggacgagctgcagcgcttccccggagtcatggagaacctgaccatcagcgctgcccactggctgacggcccccgccccccgcccacgcccgcgccggccgcgccagctgacccgcgcctactggcacaaccaccgcagccagctgttctgcctggccacctatgcaggcctccacgtgctgctcttcgggctggcggccagcgcgcaccgggacctcggcgccagcgtcatggtggccaagggctgtggccagtgcctcaacttcgactgcagcttcatcgcggtgctgatgctcagacgctgcctcacctggctgcgggccacgtggctggctcaagtcctaccactggaccagaacatccagttccaccagcttatgggctacgtggtagtggggctgtccctcgtgcacactgtggctcacactgtgaactttgtactccaggctcaggcggaggccagccctttccagttctgggagctgctgctcaccacgaggcctggcattggctgggtacacggttcggcctccccgacaggtgtcgctctgctgctgctgctcctcctcatgttcatctgctccagttcctgcatccgcaggagtggccactttgaggtgttctattggactcacctgtcctacctcctcgtgtggcttctgctcatctttcatgggcccaacttctggaagtggctgctggtgcctggaatcttgtttttcctggagaaggccatcggactggcagtgtcccgcatggcagccgtgtgcatcatggaagtcaacctcctcccctccaaggtcactcatctcctcatcaagcggccccctttttttcactatagacctggtgactacttgtatctgaacatccccaccattgctcgctatgagtggcaccccttcaccatcagcagtgctcctgagcagaaagacactatctggctgcacattcggtcccaaggccagtggacaaacaggctgtatgagtccttcaaggcatcagacccactgggccgtggttctaagaggctgtcgaggagtgtgacaatgagaaagagtcaaaggtcgtccaagggctctgagatacttttggagaaacacaaattctgtaacatcaagtgctacatcgatgggccttatgggacccccacccgcaggatctttgcctctgagcatgccgtgctcatcggggcaggcatcggcatcaccccctttgcttccattctgcagagtatcatgtacaggcaccagaaaagaaagcatacttgccccagctgccagcactcctggatcgaaggtgtccaagacaacatgaagctccataaggtggactttatctggatcaacagagaccagcggtctttcgagtggtttgtgagcctgctgactaaactggagatggaccaggccgaggaggctcaatacggccgcttcctggagctgcatatgtacatgacatctgcactgggcaagaatgacatgaaggccattggcctgcagatggcccttgacctcctggccaacaaggagaagaaagactccatcacggggctgcagacgcgcacccagcctgggcggcctgactggagcaaggtgttccagaaagtggctgctgagaagaagggcaaggtgcaggtcttcttctgtggctccccagctctggccaaggtgctgaagggccattgtgagaagttcggcttcagatttttccaagagaatttctagcctcacctctccaagctctgccccaagtccacaccatgggtctgcttcatcgcattagtataaatgcccccacagggaccagcctcagatgacccacccaataagacaaagcctagggaccccctaatcctgctcaacagagagaacaggagaccccaaggggcagatgaacttcctctagaacccaggggaagggacagtgccttgttcagtctgctgtagattctggggtttctgtgaaagtgagggaaccagaggctggtcacgggagcttgggggtggggttcgagggggcagagggcaaccactcctccaaacattttccgacggagccttcccccacatccatggtcccaaacctgcccaatcatcacagtcatttggaagcttatttctccggcatcttataaaattgttcaaacctaca

SEQ ID NO: 390882 - DNA, 1428 bp, Homo sapiens
cgcttgcgcgctggggacaaccgttgctgggtgtcccagggcctgaggcaggacggtactccgctgacaccttccctttcggccttgaggttcccagcctggtggccccaggacgttccggtcgcatggcagagtgctacggacgacgcctatgaagcccttagtccttctagttgcgcttttgctatggccttcgtctgtgccggcttatccgagcataactgtgacacctgatgaagagcaaaacttgaatcattatatacaagttttagagaacctagtacgaagtgttccctctggggagccaggtcgtgagaaaaaatctaactctccaaaacatgtttattctatagcatcaaagggatcaaaatttaaggagctagttacacatggagacgcttcaactgagaatgatgttttaaccaatcctatcagtgaagaaactacaactttccctacaggaggcttcacaccggaaataggaaagaaaaaacacacggaaagtaccccattctggtcgatcaaaccaaacaatgtttccattgttttgcatgcagaggaaccttatattgaaaatgaagagccagagccagagccggagccagctgcaaaacaaactgaggcaccaagaatgttgccagttgttactgaatcatctacaagtccatatgttacctcatacaagtcacctgtcaccactttagataagagcactggcattgggatctctacagaatcagaagatgttcctcagctctcaggtgaaactgcgatagaaaaacccgaagagtttgggaaagcacccagagagttggaataatgatgacattttgaaaaaaattttagatattaattcacaagtgcaacaggcacttcttagtgacaccagcaacccagcatatagagaagatattgaagcctctaaagatcacctaaaacgaagccttgctctagcagcagcagcagaacataaattaaaaacaatgtataagtcccagttattgccagtaggacgaacaagtaataaaattgatgacatcgaaactgttattaacatgctgtgtaattctagatctaaactctatgaatatttagatattaaatgtgttccaccagagatgagagaaaaagctgctacagtattcaatacattaaaaaatatgtgtagatcaaggagagtcacagccttattaaaagtttattaaacaataatataaaaattttaaacctacttgatattccataacaaagctgatttaagcaaactgcattttttcacaggagaaataatcatattcgtaatttcaaaagttgtataaaaatattttctattgtagttcaaatgtgccaacatctttatgtgtcatgtgttatgaacaattttcatatgcactaaaaacctaatttaaaataaaattttggttcagg

SEQ ID NO: 390883 - DNA, 1316 bp, Homo sapiens
cggggcgtgcggcgcgagccccgggaaacatggctgctcgtcctatttcggcgtcgcggcatggccaccagctcccggagcccagttgggagaggtgccgaaggcataactgtgacacctgatgaagagcaaaacttgaatcattatatacaagttttagagaacctagtacgaagtgttccctctggggagccaggtcgtgagaaaaaatctaactctccaaaacatgtttattctatagcatcaaagggatcaaaatttaaggagctagttacacatggagacgcttcaactgagaatgatgttttaaccaatcctatcagtgaagaaactacaactttccctacaggaggcttcacaccggaaataggaaagaaaaaacacacggaaagtaccccattctggtcgatcaaaccaaacaatgtttccattgttttgcatgcagaggaaccttatattgaaaatgaagagccagagccagagccggagccagctgcaaaacaaactgaggcaccaagaatgttgccagttgttactgaatcatctacaagtccatatgttacctcatacaagtcacctgtcaccactttagataagagcactggcattgggatctctacagaatcagaagatgttcctcagctctcaggtgaaactgcgatagaaaaacccgaagagtttgggaaagcacccagagagttggaataatgatgacattttgaaaaaaattttagatattaattcacaagtgcaacaggcacttcttagtgacaccagcaacccagcatatagagaagatattgaagcctctaaagatcacctaaaacgaagccttgctctagcagcagcagcagaacataaattaaaaacaatgtataagtcccagttattgccagtaggacgaacaagtaataaaattgatgacatcgaaactgttattaacatgctgtgtaattctagatctaaactctatgaatatttagatattaaatgtgttccaccagagatgagagaaaaagctgctacagtattcaatacattaaaaaatatgtgtagatcaaggagagtcacagccttattaaaagtttattaaacaataatataaaaattttaaacctacttgatattccataacaaagctgatttaagcaaactgcattttttcacaggagaaataatcatattcgtaatttcaaaagttgtataaaaatattttctattgtagttcaaatgtgccaacatctttatgtgtcatgtgttatgaacaattttcatatgcactaaaaacctaatttaaaataaaattttggttcagg

SEQ ID NO: 390884 - DNA, 2994 bp, Homo sapiens
cgcttgcgcgctggggacaaccgttgctgggtgtcccagggcctgaggcaggacggtactccgctgacaccttccctttcggccttgaggttcccagcctggtggccccaggacgttccggtcgcatggcagagtgctacggacgacgcctatgaagcccttagtccttctagttgcgcttttgctatggccttcgtctgtgccggcttatccgaggtctcaatccattgcgcccaggctggtatgcagtcatgttgtatctggaattggtgggttcttggtctcactgacttcaagaatgaagccgcagaccctcgtgcaccatgagtgccgaggaggatgccaggtggctccggtgggtgactcagcagtttaagaccattgcaggagaagatggggagatcagcctgcaagaattcaaagcagctctgcatgtgaaagagtccttctttgcagagcgattctttgccctatttgactccgatagaagtggcaccatcaccctccaggagctgcaggaggcactgaccctgctcatccatggcagccccatggacaaactcaaattcctcttccaggtgtatgacatcgatgtgtgtgcacggcagggggcgtctgcaggtacagagtggggtgctggggcaggcccgcactgggcttcatccccactcgggacaggcagtggctccattgacccggatgagctgcgcactgtgctgcagtcgtgtctgcgcgagagcgccatctcgctgcctgacgagaagctggaccagctgacgctggcgctcttcgaatcggccgacgcggacggcaacggggccatcaccttcgaggagctccgggacgagctgcagcgcttccccggagtcatggagaacctgaccatcagcgctgcccactggctgacggcccccgccccccgcccacgcccgcgccggccgcgccagctgacccgcgcctactggcacaaccaccgcagccagctgttctgcctggccacctatgcaggcctccacgtgctgctcttcgggctggcggccagcgcgcaccgggacctcggcgccagcgtcatggtggccaagggctgtggccagtgcctcaacttcgactgcagcttcatcgcggtgctgatgctcagacgctgcctcacctggctgcgggccacgtggctggctcaagtcctaccactggaccagaacatccagttccaccagcttatgggctacgtggtagtggggctgtccctcgtgcacactgtggctcacactgtgaactttgtactccaggctcaggcggaggccagccctttccagttctgggagctgctgctcaccacgaggcctggcattggctgggtacacggttcggcctccccgacaggtgtcgctctgctgctgctgctcctcctcatgttcatctgctccagttcctgcatccgcaggagtggccactttgaggtgttctattggactcacctgtcctacctcctcgtgtggcttctgctcatctttcatgggcccaacttctggaagtggctgctggtgcctggaatcttgtttttcctggagaaggccatcggactggcagtgtcccgcatggcagccgtgtgcatcatggaagtcaacctcctcccctccaaggtcactcatctcctcatcaagcggccccctttttttcactatagacctggtgactacttgtatctgaacatccccaccattgctcgctatgagtggcaccccttcaccatcagcagtgctcctgagcagaaagacactatctggctgcacattcggtcccaaggccagtggacaaacaggctgtatgagtccttcaaggcatcagacccactgggccgtggttctaagaggctgtcgaggagtgtgacaatgagaaagagtcaaaggtcgtccaagggctctgagatacttttggagaaacacaaattctgtaacatcaagtgctacatcgatgggccttatgggacccccacccgcaggatctttgcctctgagcatgccgtgctcatcggggcaggcatcggcatcaccccctttgcttccattctgcagagtatcatgtacaggcaccagaaaagaaagcatacttgccccagctgccagcactcctggatcgaaggtgtccaagacaacatgaagctccataaggtggactttatctggatcaacagagaccagcggtctttcgagtggtttgtgagcctgctgactaaactggagatggaccaggccgaggaggctcaatacggccgcttcctggagctgcatatgtacatgacatctgcactgggcaagaatgacatgaaggccattggcctgcagatggcccttgacctcctggccaacaaggagaagaaagactccatcacggggctgcagacgcgcacccagcctgggcggcctgactggagcaaggtgttccagaaagtggctgctgagaagaagggcaaggtgcaggtcttcttctgtggctccccagctctggccaaggtgctgaagggccattgtgagaagttcggcttcagatttttccaagagaatttctagcctcacctctccaagctctgccccaagtccacaccatgggtctgcttcatcgcattagtataaatgcccccacagggaccagcctcagatgacccacccaataagacaaagcctagggaccccctaatcctgctcaacagagagaacaggagaccccaaggggcagatgaacttcctctagaacccaggggaagggacagtgccttgttcagtctgctgtagattctggggtttctgtgaaagtgagggaaccagaggctggtcacgggagcttgggggtggggttcgagggggcagagggcaaccactcctccaaacattttccgacggagccttcccccacatccatggtcccaaacctgcccaatcatcacagtcatttggaagcttatttctccggcatcttataaaattgttcaaacctaca

SEQ ID NO: 390885 - DNA, 2745 bp, Homo sapiens
gatctagaagacaggagaagatgaacacatctggagacccagcccagacgggccctgaaggctgtagaggcaccatgagtgccgaggaggatgccaggtggctccggtgggtgactcagcagtttaagaccattgcaggagaagatggggagatcagcctgcaagaattcaaagcagctctgcatgtgaaagagtccttctttgcagagcgattctttgccctatttgactccgatagaagtggcaccatcaccctccaggagctgcaggaggcactgaccctgctcatccatggcagccccatggacaaactcaaattcctcttccaggtgtatgacatcgatgtgtgtgcacggcagggggcgtctgcaggtacagagtggggtgctggggcaggcccgcactgggcttcatccccactcgggacaggcagtggctccattgacccggatgagctgcgcactgtgctgcagtcgtgtctgcgcgagagcgccatctcgctgcctgacgagaagctggaccagctgacgctggcgctcttcgaatcggccgacgcggacggcaacggggccatcaccttcgaggagctccgggacgagctgcagcgcttccccggagtcatggagaacctgaccatcagcgctgcccactggctgacggcccccgccccccgcccacgcccgcgccggccgcgccagctgacccgcgcctactggcacaaccaccgcagccagctgttctgcctggccacctatgcaggcctccacgtgctgctcttcgggctggcggccagcgcgcaccgggacctcggcgccagcgtcatggtggccaagggctgtggccagtgcctcaacttcgactgcagcttcatcgcggtgctgatgctcagacgctgcctcacctggctgcgggccacgtggctggctcaagtcctaccactggaccagaacatccagttccaccagcttatgggctacgtggtagtggggctgtccctcgtgcacactgtggctcacactgtgaactttgtactccaggctcaggcggaggccagccctttccagttctgggagctgctgctcaccacgaggcctggcattggctgggtacacggttcggcctccccgacaggtgtcgctctgctgctgctgctcctcctcatgttcatctgctccagttcctgcatccgcaggagtggccactttgaggtgttctattggactcacctgtcctacctcctcgtgtggcttctgctcatctttcatgggcccaacttctggaagtggctgctggtgcctggaatcttgtttttcctggagaaggccatcggactggcagtgtcccgcatggcagccgtgtgcatcatggaagtcaacctcctcccctccaaggtcactcatctcctcatcaagcggccccctttttttcactatagacctggtgactacttgtatctgaacatccccaccattgctcgctatgagtggcaccccttcaccatcagcagtgctcctgagcagaaagacactatctggctgcacattcggtcccaaggccagtggacaaacaggctgtatgagtccttcaaggcatcagacccactgggccgtggttctaagaggctgtcgaggagtgtgacaatgagaaagagtcaaaggtcgtccaagggctctgagatacttttggagaaacacaaattctgtaacatcaagtgctacatcgatgggccttatgggacccccacccgcaggatctttgcctctgagcatgccgtgctcatcggggcaggcatcggcatcaccccctttgcttccattctgcagagtatcatgtacaggcaccagaaaagaaagcatacttgccccagctgccagcactcctggatcgaaggtgtccaagacaacatgaagctccataaggtggactttatctggatcaacagagaccagcggtctttcgagtggtttgtgagcctgctgactaaactggagatggaccaggccgaggaggctcaatacggccgcttcctggagctgcatatgtacatgacatctgcactgggcaagaatgacatgaaggccattggcctgcagatggcccttgacctcctggccaacaaggagaagaaagactccatcacggggctgcagacgcgcacccagcctgggcggcctgactggagcaaggtgttccagaaagtggctgctgagaagaagggcaaggtgcaggtcttcttctgtggctccccagctctggccaaggtgctgaagggccattgtgagaagttcggcttcagatttttccaagagaatttctagcctcacctctccaagctctgccccaagtccacaccatgggtctgcttcatcgcattagtataaatgcccccacagggaccagcctcagatgacccacccaataagacaaagcctagggaccccctaatcctgctcaacagagagaacaggagaccccaaggggcagatgaacttcctctagaacccaggggaagggacagtgccttgttcagtctgctgtagattctggggtttctgtgaaagtgagggaaccagaggctggtcacgggagcttgggggtggggttcgagggggcagagggcaaccactcctccaaacattttccgacggagccttcccccacatccatggtcccaaacctgcccaatcatcacagtcatttggaagcttatttctccggcatcttataaaattgttcaaacctaca

SEQ ID NO: 390886 - DNA, 3037 bp, Homo sapiens
cgcttgcgcgctggggacaaccgttgctgggtgtcccagggcctgaggcaggacggtactccgctgacaccttccctttcggccttgaggttcccagcctggtggccccaggacgttccggtcgcatggcagagtgctacggacgacgcctatgaagcccttagtccttctagttgcgcttttgctatggccttcgtctgtgccggcttatccgaggtctcaatccattgcgcccaggctggtatgcagtcatgttgtatctggaattggtgggttcttggtctcactgacttcaagaatgaagccgcagaccctcgtgcaccatgagtgccgaggaggatgccaggtggctccggtgggtgactcagcagtttaagaccattgcaggagaagatggggagatcagcctgcaagaattcaaagcagctctgcatgtgaaagagtccttctttgcagagcgattctttgccctatttgactccgatagaagtggcaccatcaccctccaggagctgcaggaggcactgaccctgctcatccatggcagccccatggacaaactcaaattcctcttccaggtgtatgacatcgatgtgtgtgcacggcagggggcgtctgcaggtacagagtggggtgctggggcaggcccgcactgggcttcatccccactcgggacaggcagtggctccattgacccggatgagctgcgcactgtgctgcagtcgtgtctgcgcgagagcgccatctcgctgcctgacgagaagctggaccagctgacgctggcgctcttcgaatcggccgacgcggacggcaacggggccatcaccttcgaggagctccgggacgagctgcagcgcttccccggagtcatggagaacctgaccatcagcgctgcccactggctgacggcccccgccccccgcccacgcccgcgccggccgcgccagctgacccgcgcctactggcacaaccaccgcagccagctgttctgcctggccacctatgcaggcctccacgtgctgctcttcgggctggcggccagcgcgcaccgggacctcggcgccagcgtcatggtggccaagggctgtggccagtgcctcaacttcgactgcagcttcatcgcggtgctgatgctcagacgctgcctcacctggctgcgggccacgtggctggctcaagtcctaccactggaccagaacatccagttccaccagcttatgggctacgtggtagtggggctgtccctcgtgcacactgtggctcacactgtgaactttgtactccaggctcaggcggaggccagccctttccagttctgggagctgctgctcaccacgaggcctggcattggctgggtacacggttcggcctccccgacaggtgtcgctctgctgctgctgctcctcctcatgttcatctgctccagttcctgcatccgcaggagtggccactttgaggtgttctattggactcacctgtcctacctcctcgtgtggcttctgctcatctttcatgggcccaacttctggaagtggctgctggtgcctggaatcttgtttttcctggagaaggccatcggactggcagtgtcccgcatggcagccgtgtgcatcatggaagtcaacctcctcccctccaaggtcactcatctcctcatcaagcggccccctttttttcactatagacctggtgactacttgtatctgaacatccccaccattgctcgctatgagtggcaccccttcaccatcagcagtgctcctgagcagaaagacactatctggctgcacattcggtcccaaggccagtggacaaacaggctgtatgagtccttcaaggcatcagacccactgggccgtggttctaagaggctgtcgaggagtgtgacaatgagaaagagtcaaaggtcgtccaagggctctgagatacttttggagaaacacaaattctgtaacatcaagtgctacatcgatgggccttatgggacccccacccgcaggatctttgcctctgagcatgccgtgctcatcggggcaggcatcggcatcaccccctttgcttccattctgcagagtatcatgtacaggcaccagaaaagaaagcatacttgccccagctgccagcactcctggatcgaaggtgtccaagacaacatgaagctccataaggtggactttatctggatcaacagagaccagcggtctttcgagtggtttgtgagcctgctgactaaactggagatggaccaggccgaggaggctcaatacggccgcttcctggagctgcatatgtacatgacatctgcactgggcaagaatgacatgaaggccattggcctgcagatggcccttgacctcctggccaacaaggagaagaaagactccatcacggggctgcagacgcgcacccagcctgggcggcctgactggagcaaggtgttccagaaagtggctgctgagaagaagggcaaggtgcaggtcttcttctgtggctccccagctctggccaaggtgctgaagggccattgtgagaagttcggcttcagatttttccaagagaatttctagcctcacctctccaagctctgccccaagtccacaccatgggtctgcttcatcgcattagtataaatgcccccacagggaccagcctcagatgacccacccaataagacaaagcctagggaccccctaatcctgctcaacagagagaacaggagaccccaaggggcagatgaacttcctctagaacccaggggaagggacagtgccttgttcagtctgctgtagattctggggtttctgtgaaagtgagggaaccagaggctggtcacgggagcttgggggtggggttcgagggggcagagggcaaccactcctccaaacattttccgacggagccttcccccacatccatggtcccaaacctgcccaatcatcacagtcatttggaagcttatttctccggcatcttataaaattgttcaaacctacaaaaagtgagaagaatcatacagtgaacagtgttacctactttc

SEQ ID NO: 390887 - DNA, 1473 bp, Homo sapiens
cagcaggagacccaggctctacccgagctctgtgggaatgtgggcacgtccttcccatgctttcagcctggatgactgcgaaggtcactcctaactctgcctcctgcaccagagcgggaaatagcacaggctccttcaggcctgttctggggtctgcttccttcaccttccagaaggaaaggcattgacttggacagggctgtctgactgtctaccacgctctaagtcctgaggaagacagaggaggcctgctctcttccccgaggagcacactgtctgaaccccagagcaaagccctagggcctggggagctgtgagccaggggaggccctggcttctctgcttggagaagggctctgagatacttttggagaaacacaaattctgtaacatcaagtgctacatcgatgggccttatgggacccccacccgcaggatctttgcctctgagcatgccgtgctcatcggggcaggcatcggcatcaccccctttgcttccattctgcagagtatcatgtacaggcaccagaaaagaaagcatacttgccccagctgccagcactcctggatcgaaggtgtccaagacaacatgaagctccataaggtggactttatctggatcaacagagaccagcggtctttcgagtggtttgtgagcctgctgactaaactggagatggaccaggccgaggaggctcaatacggccgcttcctggagctgcatatgtacatgacatctgcactgggcaagaatgacatgaaggccattggcctgcagatggcccttgacctcctggccaacaaggagaagaaagactccatcacggggctgcagacgcgcacccagcctgggcggcctgactggagcaaggtgttccagaaagtggctgctgagaagaagggcaaggtgcaggtcttcttctgtggctccccagctctggccaaggtgctgaagggccattgtgagaagttcggcttcagatttttccaagagaatttctagcctcacctctccaagctctgccccaagtccacaccatgggtctgcttcatcgcattagtataaatgcccccacagggaccagcctcagatgacccacccaataagacaaagcctagggaccccctaatcctgctcaacagagagaacaggagaccccaaggggcagatgaacttcctctagaacccaggggaagggacagtgccttgttcagtctgctgtagattctggggtttctgtgaaagtgagggaaccagaggctggtcacgggagcttgggggtggggttcgagggggcagagggcaaccactcctccaaacattttccgacggagccttcccccacatccatggtcccaaacctgcccaatcatcacagtcatttggaagcttatttctccggcatcttataaaattgttcaaacctacaaaaagtgagaagaatcatacagtgaacagtgttacctactttc

SEQ ID NO: 390888 - DNA, 404 bp, Homo sapiens
cagagaacagcagcctaagtgtgactgtaatttttggcagctacagattcccaagacaactaggaagggaaaaggaacccttcaaggaagttccaggaaaaacgtctctcccaaaaagaccaccgcttcaggaaaacctgaggaagggagtgggccaacagtatcctgccactgtgaccagctgaacgaggaactccatcaaaatgagccacagctggaccaaaacagtgaggagacctccaccttcttcagtgtctccctgagcagtcagtaatttcagggcaagctgagaggtctccagaggtctaaccccagataaatagccaacagggtctagagtacattttatacccaacagggtataccccatggtgatcaaaataaaataaacctgttgtaaaatg

SEQ ID NO: 390889 - DNA, 552 bp, Homo sapiens
tttttttatttttttagtaaaaatggggtttcaccatgttggccaggctggtcttgaactcctgacatcaggcgatctgcccgcctcagcctcccaaaggctggaattatagatgtgagccaccatgcctggccagtaactgctactttaaagtaatttggggacaagacatggaaacccacaaaatgtgacatctggaagggactggaatttaagctccatgagggcagggacctcatctgttgcattattactctacctctatcacccagaacactgcctggcatcatatatatttcttgaatgaataaagagtcctaaaatcaaaagagatctctggctttaggtttccaaggattggcagatgccctccaggcaagtgtcaccttccagtgctccactggacctcctgatttaggatttttgtttctgacttcagtcacatgtcacaaaagcactgtttaaactttaatctgtcatttttgtgtggttaagaagggttcttctgaatatctaatctaccctattgctggaattttgtcaattcatatg

SEQ ID NO: 390890 - DNA, 533 bp, Homo sapiens
caggctcgtacaggtggaagcagtgaaggtcattccgtagggagggagaagtaagtagatttcatctggaaagaagcatagatgagaaatgcagctctggagagagggcagccatccacatgcagagcaaaaatctggatgcctaaagactttccaggtgtgggcctgtttggagttcttggagtggtctagtaccctttcagttaactctagtttttatgtaagctttctgttattttcagccgaaataactttgagttagacttagtacagagctctgcacagcacttgtaaaatttgaaatttagaatcatcttgtcagggatcatggctctttggaagagtagctgggattacaggtgtgtgccaccattcatgcctggctgattttttgtatttttagtagaaacagggtttcaccatgttagccgtgactggtctcgaactcccgacctcaggtgttctgtccgcatcggcctcccaaagtgccgggattacaggcttgagccaccacacccagctgttgggaagag

SEQ ID NO: 390891 - DNA, 465 bp, Homo sapiens
aaaaccagataggttatttaacaaagatcttaaattagattactgcagaagctcaactttagaatcagtggcacatagcaaggttgagcttatagacaagaccaccttcttttaagagcctgacactgaaggatgcgtgactagggtgtgagcataggagtcaaattcagcaggagacattgatcctagatcagattaaaagcaaaggggtcttagcctcagaaaagtagctgctggaacagagtacatggaaggcctgtaatttgggactgactggctaacttggtagcttttagtatggggtcaaacctaatgggacttgatattaagaatgggacttgatactgaggcttctgcctgggggattagcacagtttaaatatggcctgacacaggggtggagttgctcttgtatatgggatgtcaggagtcccagctgtgaggaactgggaattatacagactg

SEQ ID NO: 390892 - DNA, 500 bp, Homo sapiens
caatacagcagtgtcagaaataggtgtcaaaatcctatcattattggaagaaatattattagttcaaacctactgcaataatctattttctggttcatctttctgatgtgaatgaattctgcaaaataagtactgttgaaaaaagtttccaaggctacagattactgtggaagagaatactaatttcccccctaagttaattttctcctttttcctttaatattagattcccaagttttagctgagcacaagtcctctgtaaatacagattttgttggctaacctcccttgcagtcaggcatggccaagtaactaagttctggccccacaggaggctgtgtcccctcgggctggagccacaggtagctcgtggcagatccccaggccagaacccccggactttagagggacatcacctactgctacttctaagtcagttctattattagatacagaaaccaagtgctccttaattaatataaacacttcatctctgaaaa

SEQ ID NO: 390893 - DNA, 187 bp, Homo sapiens
gattgtttttattttagagtaaggcactaaaaaaactgtttgggagttctgagggagagaagcttatagacatgtggcttctagcgggaggctgattaaacccgcttttttcccttgggggaccattaaatattagtacagttaatgcgggtcatttctgtgggctgctcagtttctgaagggaagt

SEQ ID NO: 390894 - DNA, 391 bp, Homo sapiens
taaggatccccggtagtcgctcttggggacagagtctggacggggaagctgcagagactcgggcagctgtggccagctgattccagctgcagaagggaagccgtgtccccagcatctcagtgcacgctccgggagaagaacaagtggcagaaagagctggagttggcctttgaagagttgtttaatataaacagaaagctgaaaaaacacctgtgcttgtacctggcactgaagcccaggatggaccagagacctggggaagggcatgccttctcagagatgcaagagtgtggcgctgggaccccaagagggaagaaaatggcagacccagagatgctgcctgccggggaacccaggagcccagcagaggaggaggcgcagcaggcagcgt

SEQ ID NO: 390895 - DNA, 429 bp, Homo sapiens
agcctggaagccatgctgagtccttcctttccctcctcctgtcctccgatcagccaccaagctgtgtccactgtcctcacacccaccggaacactgactgcaggcagggaggggctctgcctgcttcccaacgtgtcttccccatgcccaacagcggctggcacatggcggccctcagcaagtattgtttggactacgatattgatgagttgcctgggactctgtctgctcctctccactccttcccctgtctctcttgggaccctggccattgccagcctgacttccagtgctctctccttccagactacaagcaggatctctttaaaatgcacgagcagttctgccacccccttccttcaggttcttcgtggctcctcctggcacagggtcgagccctgactcctccgaggcctctctcatctgggc

SEQ ID NO: 390896 - DNA, 881 bp, Homo sapiens
gaacagcttttgataccatttcatgttctttatttgtatgtagaaaggttgatggagaatttccaggcgcggtggctcatacctgtaatcttactttgggaggctgaggtggaaggatcgcttgagcccaggagtttcagaccagctggggcaacatagtgggaccccatttctacaaaaaataaataattagccaggagtggtggtgtgcacctgtagtccaagctactcaggaggctgaggtgggaggatcacttgagccgaggcggttgaggctgtagtgagctgtgatcatgccattgcgttccagcctgggctacagagcaaaaccccgtctctcaggaaaaaaagaaacattgatggagaattaatatgaggagtttatggtgataatcttattggaaaaggggtaggtaatttgtattgtagctgttttgcataactagcacacagttttgacttacatttgtgcttattggaggtggcttaggacttagttaatggagataaagggaattgggcctgaagactcctcatgccatttcttgctatcatcacaatgtatataagccataatttatttaaccagtcctctgtttttggacaggtggttttcatgtgtttttgtttgtttgtttgtttacatagtaatattatattctatacttttttgcactttttattatagaaattttcaaacatttatagaatggcattctactgttttgtttcatgtcttttgtgtacctcattaatttttttctgaaatatttttaaatggttctaagcataataggattttacttgtaaaagcattattatgtatctccaaaaaataaggacttaaacaaaaaccacattaccattattgattcaacaaa

SEQ ID NO: 390897 - DNA, 702 bp, Homo sapiens
actaggctgtgattctgtagttcttgtcaagttccttgctatgtatcaaagacacattaaaaaaaaaacttttattttcggttcaggggtatatgtggtttgttatataagtaaacttgtttcccaggggtttgttgtacagattatttgatcacccaggtactaatacctagtacctagtattttttctgatcctctccctcctcccacccttcaccctcaagtaggccccagtgtctgctgttcccctttgtgtccatgagttctcatcatttagctcctacttataactgagaacatgtagtatttggttttctgttcctgcactagtttgctaaggataatggcctccagctccatccatgttcctgcaaaagacatgatctcgttctttttttatggctgcatagtatttcatggtgtgtgtgtaccacattttctttatccagtctgtcattgatgggcatttaagcagattccatgtctttgatgttaagagacacatttttaattgaatctaagagtagtaataaaatcaaacaaaatatcaattaatggcaggtgggaactcttttttttccccacagaaaaacaattctgaagtcttaacctctttatgaaactcaaatctgactgggtatggtggctcatgcctgtaatcctagctgctccgaaggctgaagctggaggatcacttgagcc

SEQ ID NO: 390898 - DNA, 334 bp, Homo sapiens
ggccagctttaagcactcttaaatatattataccacagtttgggaagctctataatctcctttattaaactttttgctatacctttggaaacattcatttaacttaacaattaaacacttaatccattctgaaagtcagcctgcaaagcagaaatgatttttggggtgttatttggtgtaaagagtttttttttttttaggatatcatacttaattctggcatgacctctttagtgtcttttaaaaaactctcattttataactttgggcatttctagaaaagcaacatttttctcacagttttctaatgcaaaatacacagaggggtaggtgg

SEQ ID NO: 390899 - DNA, 321 bp, Homo sapiens
ggcaacatggcaaaaaccagtctctacagaaaaatacaaaaattagctgggcgtagtggtgcatgtctgtagtcccagctactcaggaggcggaggcaggaggatcacttgagcccaggaggatagcttgacccagcctggaggatcatttgagccctggaggcagaggctgcagtgagctgagatcatgccactgcactccagcctgggtaacagagtgagaccctgtcttaaaaataagtaaataaataaatttgatctttcacactagaattttaagttccccaaaggctcgggcattgtgcctcatttttttgtcag

SEQ ID NO: 390900 - DNA, 116 bp, Homo sapiens
ctaggtctgtaaccctttactctaacgagctgacacagtgcagcaagtacagcctgctcataggagcccaggaagagcaggaattaagcactgacgcccagccctgcacaagcctc

SEQ ID NO: 390901 - DNA, 557 bp, Homo sapiens
ctcggctctaccgtgtctcactaagaggggaagcaaaaagctaagaaacgtttatgagtgtgttcacagtccaggacacaggcccactaataagactgtgatttaatttatgatgatagaatgcttcctctcctcaacactctacaaccaaactaacggggccccagtataatgacagtggattacagctgaaagaaccaaaagttacagactctatctgagaaaaacttcttagggaaggcaaaagaaaactgggaagctaaaaacaaacacactagaggaaacgggagccatgggcacctaacagctacagaaatcatgaaatataggcccaactcctagccatattaacataaatcctaacactaaaggcctattcagctcctatgacccaagacaaaatgtctggctttcaacaaaaagtgcaagggcacacaaaaaagagagataaaacattgtctgaaaagacaaagcgagcatcagaatcagactcaggtatgacattgatgttggaattactagaggatttacaataagtgtgattaatgtgtggatgg

SEQ ID NO: 390902 - DNA, 335 bp, Homo sapiens
gtttctgcttcttgaaataaatcgcccaagagccatggccttcagaatcatccttggcagaatgacagatgccatcaatgtgtgtttgggtgctacttctggacttactcttagataaagttctggatatttgtgcccaagaagaagagtaaaggatggtggtcaacattattcaccagatgagatagattgttcatatgtgcctaagcttaaatttgtattagtttcatagagatttggtaaaaccaagcagggaaatgtttagacacaagttagaacccgcagttctgtaacaagaggtttagaccagggacccttctaaatccccagaatgt

SEQ ID NO: 390903 - DNA, 541 bp, Homo sapiens
aaatatgtctgagtgaataatgcacagactagggacagtacaatttacacaccaatgccatatgtcatcagaaactgtggacacagatttgctcattaagcagatagtgcaaatatgcatatatttaccatggccactgcacaggcggccgtaatctgattgaagcaaaaaaggaaagtccctcaacctgtcaactttcagttttgaggactggattgttatatttccagtggaatgattctcctgttaattttggaaatcatggccaaagcccacagatgagaagggaatcccagggtgtaatcaaacattacacacttttaaaacagaggtaagttctggaaaattataacaaaatactgtttttaaaaagcacagttttgggctgggcacggtggctcatgcctgtaatcccagcactttgggaggccacggcaggtggattacgaggtcaggagtttgagaccagcctggccaacatggtgaaaccccatctctactaaaaatacaaaaaattagccaggcgtggtggcacacacct

SEQ ID NO: 390904 - DNA, 847 bp, Homo sapiens
gttttgagacagactttcactctcgttgcccaggctggagtgcaatggcacgatctcagctcactgcaacctccacctcccgggttcaagcgattctcctacctcagcctcccgagtagctgggattacaggcatgcaccaccacgcccggctaattttgtatttttagtagagacggggtttctccatgttggtcaggctgatctcgaactctcaacctcaggtgatccacccacctcggcctcccaaagtgctgggattacaggcatgagccaccatgcccagccaaaatgccctccttttaaagctgaaatctgccttcttacaactcctgcccccattctactctctgtattccaaaagagcaaatctacctccaatcttcttcttttcccatgactgcccttagggtgtttctctcccttgacttttctccggacgatgccttcccgttgcctttcccctttgccatgatcttgaggttcctcaccaccactctgatcatcctccactgggaactctaatttttaaggtcagctttgcaatgtgatactctgagaagagctgcttctcactgaaaatacatgcataagggctaggtccttatctatttgtttacctctgcatgtaccataactagtatagtggctgtcacacacacaaagggtgctcaacaaatgtttgtttgatcccagttgctcccatatctgcagcatatcaatagtatattttacattgaccctaggaagtttaagcatttttcctctccattttatagatgggcaaaggaatcctgtaaaaaggcagtgatcattgactaatcaagtcttccagccccagtctttga

SEQ ID NO: 390905 - DNA, 460 bp, Homo sapiens
aaagaaggaactaactgggtaaagtttaacagaggaaggaaatttcaagatactaaaagctcatcaggtaaacaattttctatctcaagaacaaatgataccagtgcacaggaatgacagaaagaataacaagatactaaattggctataatcagagacctgaaagtcaaatgccaaagccacaaagagtggaattcaagccagagccctaaagaaaaaatagcgtaacgagagagagccagcaaaaagcaaaatgaaaaagacgcaactcttgtcatagcacacacatgcaccgaaacaaaacaaaacaaaatgcaggaaaaacagtaaaaaattatctagctgtaaaaattacttggctgtacagcctcaattgtttgctccctgatttagaaattatcatatttgccaaaagtttgaatggaaatatacttttacttagcaaaacttccattattaa

SEQ ID NO: 390906 - DNA, 422 bp, Homo sapiens
actctgtcctgtgggtctgtccactgacctctcctctcttccccgatattccatgcttctctctccttctaggactggctttctgaaacatctggtggcctctcttctgtccccagtctattactcttgcctgtggctccatccacccttctcccttggtctgcctgtccccctcactctccaagcttggctgttagtaacaataatgacgatgatcataacaatgacaatcaccgcccacacaatgtgctaccttcatgccaagaactctactaaccactttgtccttattaactgtttcctcctcccagcaccgctagaaggtagacgctattagcatgtccattagccaaggacacacaggcagcaagtggagggtgaacttgaacttcaagctccagaatcctgctccttcctgacct

SEQ ID NO: 390907 - DNA, 463 bp, Homo sapiens
agaaatctcaacatattatatgatggcgtcaagcttgtggggaaatatattaggctagtgcaaaagtaattacttgagcagtttaaacaagcaataaataggtatgccaattcttttccttaacataatgtctacacgtcaaaaacctaatgtacatgtactcatctcaataaaatttctcatagtaaaatgactttgctatctagtgtcaccaagcaaggtaacccctacatcatctcacctaaatagtttactctgctaggtaaacatgatacaatgcaacctcttacccatctgcccataagggaaattagaaatctcaacgcgtgatacttcctgtgaaaaagtaaatctgatgcacagaggggcttggaaatcacttttccaacctactttgcacaaaatgatgatttctaatttcccttatgggcagatgggtaagaggttgcatggtatcagtgtt

SEQ ID NO: 390908 - DNA, 472 bp, Homo sapiens
agaaatctcaacatattatatgatggcgtcaagcttgtggggaaatatattaggctagtgcaaaagtaattacttgagcagtttaaacaagcaataaataggtatgccaattcttttccttaacataatgtctacacgtcaaaaacctaatgtacatgtactcatctcaataaaatttctcatagtaaaatgactttgctatctagtgtcaccaagcaaggtaacccctacatcatctcacctaaatagtttactctgctaggtaaacatgatacaatgcaacctcttacccatctgcccataagggaaattagaaatcatcatttgtgcaaagtaggttggaaaagtgatttccaagcctgctgtgcatcagatttatttttttacagacaactttcaggtctcttacacagagattctcaaattcagctgactcaggaatcccaacccccataattctgatgcagccagc

SEQ ID NO: 390909 - DNA, 856 bp, Homo sapiens
ctactttgaaggtttaatatataataatatttaggttgagtcactttggaagccaggattaaatcattttatgaaatatctgttgtaagtatctacaatttggtaccttttagagaaatttacggaataatagtaaattttgaagcaggatgccatcagtctccttgtattgaattttataagctgaacctaagatatttttttatgtgtcatgacagaaatgtgaggtttggtagccaagtattataatgaggtgtcactactcaccatcttggctctcagtcctaccactaacccttattttaccgcacacatgaagtacctcacaggaccaggtcatagccgacatctgattgctccacctctttgaagacttcttcgtaatgtacagagccgtctgcaccgtgtgcagagcgcattccgaccttgtgtcctcctcatttcactagcatggtctcattccttgctcagctctgtttgtgtcgcgagcactctggtaaagcatgcttctgcagatggactgggcttcttccactggacagtgagaggagcagcattaggatgtgaatgagtaatgccagatttgaacatagcactgtatgaaagattcattactaaagctttttgaaaatgatctgtgatttggagtattcatagagagtcagctgaaggtatttgatactcttaagtctaaaagttccgaaaattcagaagaattagttttaccagtggaagaagccagtatcattcttaaagctcaaaagatataatacaatgtttttaaaactaagcaagataaaaaatttggaactaaaattgaaaaaaatgtctccatgcggtaatttatctaaaggcc

SEQ ID NO: 390910 - DNA, 312 bp, Homo sapiens
ccacttggacaattgccgtgaaacctccatttctgccaagctcgtttactgcgtttttgtggacttacgtgcagcttctgtgagcttcagtttaatcaacttgaaaattgagggggttgcactttgcgctcagaaattttacgtgcatttttgctttcctgatttcttgatctcctctattttcttagcttcaaaacttttccattttcctagagtcaggatgttcctgggtgaatcatgtgtccctctaccatggactggatgaatggttttaaggtagacataggatttcaagatcctctagggtaggtc

SEQ ID NO: 390911 - DNA, 357 bp, Homo sapiens
cgcctctccactgcccctgcaaagaaaaagtcctccatccttgccctgccacaactactggacatcttcaacctttccaccacccaagactctgttatttaccccacagaatctgtttccatcaatggctatgaaaaaacagagagtgatttaatctgttcgctttttttttaaggccatcaactgtcctgagtcatcacactaagtgtctgtcattctaattggatgcagaggtgtttttacaataagcctgggcagctttatgtcaaatcaatgaacaatttccaaccaccatttgtaaacaataataaatcaaggactctcgaaacggaacccccaaggtataaacgttcccct

SEQ ID NO: 390912 - DNA, 294 bp, Homo sapiens
agggaagaaatgaagttcaagaagagtgaggcaatcccggaaacggattgccgcactaaacagcaataaaggaagtggagacactgatggaaacacaaccaaatatatggaggacacattccagaaaatcccagtgattggctcaagaaggagcacatgactcacagacattagctgcagactttctggaacaaagcccaagaaagctatcagaagaaacattctccctggctaacattatgtcgccagctgctaccacggtggaagtcagcccaaagacagggccacataaca

SEQ ID NO: 390913 - DNA, 457 bp, Homo sapiens
gagtgcaatggcgcgatctaggctcactgcaacctctgcctcccaggttcaagcgattctcctgcctcagcctccggagtagctgggattataggcacctaccaccacacccagctaatttttgtatttttagtagagacggggtttcaccatgttggccaggctggtcttggactccggacctcaggtgatccacccgcctcagcctcccaaagtgctgggattacaggcgtgagccactgtgcctggccttttttccctaatttttatcctgcctaccacctcccatcatctccacgaccaagtcccctagccgctcgcaaaccctccctctacactgcccgcaggtgtagctgccgcttccctcgaccaccctctccaactggcaccaccctgtcccttctcacacacgtggagtccttcagcaagacctgttgcttctacctcccaaatacat

SEQ ID NO: 390914 - DNA, 244 bp, Homo sapiens
tctgtaatacacttaacaatttggcagcgatagattttgaggtgagttataggcttaacagggtccttgccattagataacatatttaagaggagaggcaagttaagcacacataaagtgagtgacaactcttaatcacacgcattggatacagatcattagcacctggctcggtgccccgtgccttctgggctacctccccttacattggatatacagtcatgttaatattatcctctgagaa

SEQ ID NO: 390915 - DNA, 188 bp, Homo sapiens
tgtcccctacccctccctttggtaaagaacagtacaacaccaaaatccacagataatccttgaatctctgtggcagctccagttctaaactcctccttcacaatcatggtttaaatggctgttaacaagtcataacaaagatctcttttgctccagggtagaatagccatatcctttctctttcccca

SEQ ID NO: 390916 - DNA, 367 bp, Homo sapiens
gcgggagttgtaaatggagggccatctattatgtgtgactggtattgtataagttactaagacgttgttgagctaatgttagtcctacaaaggccatctagtccccaggcaagaaggagttctgcttggggaaagggctgttaacatctttgtttaaactataaactaaattcctctcaaagacagttcagccgacacccaggaatgaacaaggatggcttgagattagaagcaagatggagttgattcagttagagctcttccgctatctcagccataattttgcaaaggtggtttcgaataatccacctggaaattctctggccctacctcaaaagtgcatccagagtctcaccccttctcactg

SEQ ID NO: 390917 - DNA, 275 bp, Homo sapiens
cacgcacacacacaccctgactgcacccacccatggccacacgttcaggcacaatctggggacatatctctccttacgccacacgcccatgtaggacacatctgtgcacacagtagagacccacagtgacacccactagtaggcacacacacaccatgcacagccccagccatgggacggctgccagccccacccatctgttgccacacaaacgagcccccaacaccctgtcccatctgggtgcacgaagccagctccccgcggtcacacactgt

SEQ ID NO: 390918 - DNA, 504 bp, Homo sapiens
ctgattttttctcttgtcttggaatttgccaccagtatgcacagccaaggacaaagagatgctctcagttctccccagcctggataactaaaagaaaagaaggaggatccctctagttgtgggttgtcagcctcagagaggaaacctggcagagttggagctgcaggctcccaggtatcactcatagaaactgcaggaaggggagatggcatctttttcccaggttggatgtctactttgaaatgagctcactgctctgctcccagtgcctgtttgaacaagggcaaagagcatggggaaaggtggcaagggtctctgggggccctctcactcccattgtccagcatgtattccatagtcagtagtggcctggtcacgtgtttcctcttccaggaaacaactgtgggagagtgttgatttggggagtcagcccggtcaaaggcatgaccttttccccaggaaccttggtctcctccagccaaagggcagaggtcattggctgaa

SEQ ID NO: 390919 - DNA, 116 bp, Homo sapiens
acccatatatgctcaccacctaatatttgctttagttttaattgaatttttaaaacaatgaacatttagcgttgctttaaaagaccaaatgcctcttctcttcatctcccttagtg

SEQ ID NO: 390920 - DNA, 378 bp, Homo sapiens
tcattcagactgaaagagtgtaagtagaaaattttgatcttcttattaagattaaactccaaatgagcaaacttgcttctgcttaaagcaaactccttgacaattcttccagactgggctgaggagggtatgtgaaaagtatgagacatgtctctgctgtcagagaaattaggaaaggattgttgacaacatacataaaactatcaaaaattgaaaactatgcaagatagtatacaactaaatggcatattggctttaagtgttgtaggagttcaggttgattattttagtctaagcctccttttgagggcagctgggaattgagattccttttttttctgatgcccttactgtttgtctcattgaattagagcttgt

SEQ ID NO: 390921 - DNA, 349 bp, Homo sapiens
agcatgtagtgagacctgatccctacttaaaaaaacaaacaagggccgggtgcggtggctcagcctcccaaagtgttaggattacaggcatgtactaccgtgtctggccacccatatgattttcaagacaaagttcatccctgggacctgcaggccttctcttgggccacaagaagtggaatcaatctgccctcacctccttcctgggctgtgggatatttcattgccaagaaacgtgtctgggtgcacatcctacccaggctttgccgtaccccggagatatcacacagggaagccagattcagagatggtgggattcattcccttaatctccttaatcagagctgcg

SEQ ID NO: 390922 - DNA, 206 bp, Homo sapiens
aaatgccctgcactctctagaacttgacatacatattatgagtaatacacatgaaagaactttgtgaacttaaggagtttgcttagagaagaaataaggcagcagatatggaaagagttctctccttagagttcaaactcctggactaaacttaggctgtgccctccacaaggtatggccttggccagcctaggggaatctctgaa

SEQ ID NO: 390923 - DNA, 222 bp, Homo sapiens
aacagcctaagaaagaatgtgtcacttctgtgcccaagatctcgtgggctggctggccccacaggtgtggcatctgaaagagctcagttctaggccagcttgaggctgcatgttgtgggctacctgtcaatctagttctatgaagatgcctattgtcctgctaattactgtagagtgatggggctgcttgtttaaagcataggttattgccctcacatccag

SEQ ID NO: 390924 - DNA, 403 bp, Homo sapiens
ctgaggaggcagaggacggcccggagtctcgtagcgcaccgccctggtcccacaccccccgcagccctaggaggatcggtgtgctgagcttgtggccaggagctccccgagccactttcgcgcgagcagcagaaaacctgagccgcggcccggcgagtgtcggcggcgctctggggaggagaggctgggaaggggctgcgagagatgctacttaagaacgtgaggctgagaggcggacttggtcagatctgcctgcgtgacaagctcaggacaggacgcttctgcccttgcattactgttgtaaaagtttccacccagtccctggtcgcactgcgttcccatcccggcagatgtgaactcaaaaacttcctccgctgtgcagtttcaattggcagacacaccc

SEQ ID NO: 390925 - DNA, 135 bp, Homo sapiens
tgcggttggcctgattctttgcagtgcacattctccagccagtctctctcctgactctgcctttccctgctgcctgccaggtgcagcctcagcaactgctgctgtcacaggacaagtaggacaagcaatccatgt

SEQ ID NO: 390926 - DNA, 430 bp, Homo sapiens
atggatgttggatgtgaggggaggagtagtcaagtacgaaatcaaggattatggccggggcaactataatagcatagtagccatgaactaaaatggggaaagctgtatatggaagagcctaggaattccgccttgggcatgttcagtttgcaaactctaccaactaaattataactaaagatatggagtaggtagataatattcaagttgagtttgagagagaggtctggcttggaggttgtcaacacagaaacagcaaagccataaaatcagctaagaacatcaggaagtcagctgtaggtggaaaagaacaaggactgaactcaagggcacttcactgataaaagggcagagagatacagaaaaatctgtagaggagactgaaaggatatgcagattccagaactcttgccctgaatcaatctagcaa

SEQ ID NO: 390927 - DNA, 329 bp, Homo sapiens
gtctggaacacagatttactcaagatctgtacataaacccttctctgaattaagatactgtgttacttctttatggctttactaattatattgctagcagcaatagttagccattgctaagcttaaaatatatattgatatactttgttttcctgatatacttcagacctgtttgttcgtgtacttgtgttgaaatcaattgtttttaatcaatggctttgtgacctcaagttcacttgtgacaagtatgtgtcctctgtttgcatgttgacttctaagacttacctgaagtaaatgtgggcactctctctctcttcaggacaactcac

SEQ ID NO: 390928 - DNA, 241 bp, Homo sapiens
gctcattggtatggggcatcagtctgagaaacctcagcaggccaagggcaccactgcattcagtgtaatacagtaactggagttcataaaaatgatgactctgggtcaatgagagaaaaattacaacaccttcagtaaactctgtttaaacatgaaatgtaaattttagaaaaatattcatccagccgggcatggtggctcacacctataatcccagcactttgggaggccaaggcgggca

SEQ ID NO: 390929 - DNA, 282 bp, Homo sapiens
ttatccgttcagtgacccatcaagcaaattaacacagccgtatttttaaagcatgctccaacaataattactttaaaacatgagaggtgtcttatataggtactatgaggaagaccaggtcatatgtggactgtctccttggccatggacaaggcaagggtgagaatcacaaatcaaaaaccacaagtttcacaaagaaacatcagagtaaataaatctagggcatggcggtacaggatgggtgggttccagtgcagcatgcatggaccagtcactgaaccc

SEQ ID NO: 390930 - DNA, 338 bp, Homo sapiens
ctgaggttcacggaggacaggcaacttgccacgctggcacgtggtcatggggtggggatgtggccgactctaaagctttctctgtctgtagagttgccctttgtgtcatgccctggggtccaggtttgcagcttaaggtgctcactccccagggtaggctaggggaagagcagagataggtgctggggactgggcctccaggtgtaccccaccaccaaagtcctgggtgaaaaccagcaggaagtcttcaggtgtctctgttccctgagggacattctgtccctcaatcgtggcgggactctgggctagtggctgcagggcattcataaacaagccca

SEQ ID NO: 390931 - DNA, 348 bp, Homo sapiens
cactttgaccacttcttactgagtgctggaaatattgccagttagtatactaaggctctgttaagatgagggattttttttccacattggatttatgatgtgtcttaatgtgataggttttgcttgttttgaccatatttttgtgcctctctgttgggttaacaagtccagctttgacatacttcctgtagtcatcgtttcttaagggttgagtaattttatgccttatctgggacctcatgatatcatttatttgttaacggtatttggaaaaaaattaatttgagatgccaaatggtattatttttcctctgatgagatagaatcagttgttgttgttgctatgat

SEQ ID NO: 390932 - DNA, 567 bp, Homo sapiens
atgtgccaaacgtctagtgagaaaaacatgaagctgggggtgacgggtggtatcaataataattatacagcttttagagtttacagcacactttttgtttgtaattagtaatgcttctgaaggtgtttaaaaattttgctaatactagaaaccctctattaatgagcttgataaaattttaaggatgaatagttgttcctgaaagaaatttttgtaaggagtacaaaatgccactgattttaagtccttggagagactgtcttactagagagagcaatgctttcatgttccgttttcaatgttatccatgatgaaggttttcacgctactagttttatagcatgaacaagctgtaacactagaaacaaagatgttatttctcctctcttatccaacctccactcaactaaaatgttttttaagagaatatgtgaaaaggtttacactatcccagaaatggacaataaccaattaatggttactttttaagcacagttttgtgatttttttccaccaaaatgcgtgggtttgtttataatgtgataaatggttgtggtttggctataa

SEQ ID NO: 390933 - DNA, 990 bp, Homo sapiens
gaataggaatttcttcatttaggtcagcgagatgtgctgacaagatgaccacaaatgcaggaatgttggagtggttaatatgtagatgagaaatcatgaaagagtggaatagcaatgcaagtttctggggctacttcagtagggctatttgggactgattgagggggcaaaaattaaagccagaaagttcagtggagcaaatgtcctagtggccacagagaaacaaagatttccaaagtgagatgctaagtgagaaacagcaactgaggagagaagtgatgtttccaggatcacaatgggcataaggagaattgttcttttagactctaggtgagcttgtagtaatccaaggactggtgatttaggccactgagttctggctttgagtacatctctaattcctaaaccttcactaagagggaggtgaagggagtcaggtgtgccacatgtctgctactgaaaaatgcctagatgggaaaggagtttgaaatattgtcctaaaatgaagtttctgagttagatggaccgaatttcaccatgtgttcactgttattactgtgtaaaatcaagagatttaaatgagattacgattattaattagctttctgagatattgaaacctaagaacctggccgggtgcggtggctcacgcctgtaatctcagcactttgggaggctgaggtgagcggatcacctgaggtcaggagttcgagaccagcctggctaacatggtgaaactctgtctctaccaaaaatataaaaaaaaaaaaaaaaaaaattgttgtgcggcggcctggcgcctggagaaaggtttcacaccccatcggtgtgggcgccggggcccaaggtggttcttcgacacttgccaagagtggtcccaaagaaacggggcagaacggggtggggtttcacaataaaaaccgcggggcaccgggggtctggagactcaggggttggggcaaccggctaaaaaggtcacgagcgtaagcg

SEQ ID NO: 390934 - DNA, 278 bp, Homo sapiens
attggctcctgtccttgttggtgtagccctcagcacagcaaagaaatctttgtgctgactggcctgcagactgggagctttcaaaggaagcccatagctcctccccttcctcccctctgatcctactaacgggcttatttgcatagctgtcttggtaacagaaaagaatgtaaaagaagaagcacttcagaagcacttctcttactcctaatcctttctagaactacttcccctcttcttgtagctactaacacctgttcctctgacctgcacaaaag

SEQ ID NO: 390935 - DNA, 411 bp, Homo sapiens
tgccactgtatgaatccgcttaaaaaattattttgtagttcaaaaacgctctgcatttgctaactgtcttaacttggtgtcactcatttgttactttgttggcttctccccataaattatcttccacattttcattgacaaggaaatagggattggaacatgtgttacaatcaccaagaagagagggcaaaatcatttccttcagggtggaggcagccgctctcaccggctcaaagtggcttcccctttgtgattctgtgtgggaggcagaagaggctgttggtccaaatgcaagattcaggctggacaggtggacacgtgtccttaggcccatttccatatccatccattcagtaaatatgtattgactgcccatcactttataccagccactgttcttggcagtaacca

SEQ ID NO: 390936 - DNA, 762 bp, Homo sapiens
aatggtggtgggcgcctgtaatcccaactacttgggaagctgaggcaggagaatcgcttgaacccagaaggcagaggttgcagtgagctaagatcacaccattgtattccagcctaggcaacagagcgagactctgtctcaaaaacaaaacaaaacaaaacaaagctgaagtatacacaagtagtagttgaggataaagcaaagcaacatgccctttcagatcagaaagacttcagttcaaaaccacacttccactctggactggctctgtgctcttaagcaagtaacttaatctcacaaagtctgtttgctcatctgtaaaactgcaatgataatacaatttgactaaataacatatttcagagggcccaaccctgtgacaattttaaataaatactgttaactcattcactaaatattttttccaaaaaaatttttaactaccatagaaactatttaatcaaaactcttctgagggccaggtgcagtagctcacacctgtaatctcaacactttgggaggatgaggcaagaggatcacctgaagccaggatcactcaagaccagcctgggcaacaaagcaaaaccccatctctacaaaaaatacaaaacaaaaattaatcaactatgctggcgcacactttgttgtcccagctactggggaggctgaagcaggaggatcacttgagctcaggatttcaaggctgtagtgagctataatcacgccactctacttccagtctgggtgacaccatgacatgcc

SEQ ID NO: 390937 - DNA, 2637 bp, Homo sapiens
ccagctcaacccttctttaatgtcatccagggagggggccagggatggaggggaggggttgaggagcgagaggcagttatttttgggtgggattcaccacttttcccatgaagaggggagacttggtattttgttcaatcattaagaagacaaagggtttgttgaacttgacctcgggggggatagacatgggtatggcctctaaaaacatggccccagcagcttcagtccctttctcgtcgatggtcagcacagccttatgcacggccttggagagcttcaggggtgcctcctctgtgaccccggagaggtcagccccattgctgaagaccttagtgatgcccagttgacccaggacgctcttcagatcataggttccagtaatggacagtttgggtaaatgtaagctggcagaccttctgtcttcattttccaggaacttggtgatgatatcgtgggtgagttcattttccaggtgctgtagtttcccctcatcaggcaggaagaagatggcggtggcattgcccaggtatttcatcagcagcacccagctggacagcttcttacagtgctggatgttaaacatgcctaaacgcttcatcataggcaccttcacggtggtcacctggtccacgtggaagtcctcttcctcggtgtccttgacttcaaagggtctctcccatttgcctttaaagaagatgtaattcaccagagcaaaaactgtgtctctgtcaagctccttgaccaaatccacaattttcccttgagtacccttctccacgtaatcgttgatctgtttcttggcctcttcggtgtccccgaagttgacagtgaaggcttctgagtggtacaactttttaacatcctccaaaaacttatccactagcttcaggccctcgctgaggaacaggccattgccggtggtcagctggagctggctgtctggctggttgagggtacggaggagttcctggaagccttcatggatctgagcctccggaatctccgtgaggttgaaattcaggccctccaggatttcatcgtgagtgtcagccttggtccccagggagagcattgcaaaggctgtagcgatgctcactggggagaagaagatattggtgctgttggactggtgtgccagctggcggtataggctgaaggcgaactcagccaggttgggggtgatcttgttgaaggttgggtgatcctgatcatggtgggatgtatctgtcttctgggcagcatctccctggggatcctcagccagggagacagggaccaggcagcacaggcctgccagcaggaggatgccccacgagacagaagacggcattgtcgattcactgtcccaggtcagtggtggtgcctgaagctgaggacaggatggcaggagcgcccatggctgctgctgtacagcctgctgaggtgactgttgaagttggtgaggacctccacatgcaccaggttcgtgaccgggagatgcctgaagctttggagtttaacctttctgccaatccagaggcaagcacaatattccagaggaactctcaaacagatgctttggagtttaactcttctgccaatccagaggcaagcacaatattccagaggaactctcaaacagatgttgtagaaataagaagaagcaactgtacaaaccatgtatctactgagcgtttcagtcaacaatacagctcgtgttcgacaatattccttgatgacagcacagccatccagcattatcttacaatgacaataatatctgtgaccttggagatacctcatcatatcacacaaagagatgcagatagatctttgagcatacctgatgaacagttacactcatttgcggtttccaccgtgcacattatgaagaaaagaaatggaggtgggagtttaaataactattcctcctccattccaccgactcccagcaccagccaggaggaccctcagttcagtgttcctcccactgccaacacacccacccccgtttgcaagcggtccatgcgctggtccaacctgtttacatctgagaaagggagtgacccagacaaagagaggaaagccccggagaatcatgctgacaccatcgggagcggcagagccatccccattaaacagggcatgctcttaaagcgaagtggaaaatggctgaagacatggaaaaagaaatacgtcaccctgtgttccaatggcgtgctcacctattattcaagcttaggtgattatatgaagaatattcataaaaaagagattgaccttcggacatctaccatcaaagtcccaggaaagtggccatccctagccacatcagcctgtgcacccatctccagctctaaaagcaatggcctatccaaggacatggacaccgggctgggtgactccatatgcttcagccccggtatctccagcaccaccagccccaagctcaacccgcccccctctccatcatgccaataaaaagaaacacctaaagaagaaaagcaccaacaactttatgattgtgtctgccactggccaaacgtggcactttgaagccacgacgtatgaggagcgggatgcctgggtccaagccatccagagccagatcctggccagcctgcagtcatgcaagagcagtaaaagcaagtccca

SEQ ID NO: 390938 - DNA, 2485 bp, Homo sapiens
ccagctcaacccttctttaatgtcatccagggagggggccagggatggaggggaggggttgaggagcgagaggcagttatttttgggtgggattcaccacttttcccatgaagaggggagacttggtattttgttcaatcattaagaagacaaagggtttgttgaacttgacctcgggggggatagacatgggtatggcctctaaaaacatggccccagcagcttcagtccctttctcgtcgatggtcagcacagccttatgcacggccttggagagcttcaggggtgcctcctctgtgaccccggagaggtcagccccattgctgaagaccttagtgatgcccagttgacccaggacgctcttcagatcataggttccagtaatggacagtttgggtaaatgtaagctggcagaccttctgtcttcattttccaggaacttggtgatgatatcgtgggtgagttcattttccaggtgctgtagtttcccctcatcaggcaggaagaagatggcggtggcattgcccaggtatttcatcagcagcacccagctggacagcttcttacagtgctggatgttaaacatgcctaaacgcttcatcataggcaccttcacggtggtcacctggtccacgtggaagtcctcttcctcggtgtccttgacttcaaagggtctctcccatttgcctttaaagaagatgtaattcaccagagcaaaaactgtgtctctgtcaagctccttgaccaaatccacaattttcccttgagtacccttctccacgtaatcgttgatctgtttcttggcctcttcggtgtccccgaagttgacagtgaaggcttctgagtggtacaactttttaacatcctccaaaaacttatccactagcttcaggccctcgctgaggaacaggccattgccggtggtcagctggagctggctgtctggctggttgagggtacggaggagttcctggaagccttcatggatctgagcctccggaatctccgtgaggttgaaattcaggccctccaggatttcatcgtgagtgtcagccttggtccccagggagagcattgcaaaggctgtagcgatgctcactggggagaagaagatattggtgctgttggactggtgtgccagctggcggtataggctgaaggcgaactcagccaggttgggggtgatcttgttgaaggttgggtgatcctgatcatggtgggatgtatctgtcttctgggcagcatctccctggggatcctcagccagggagacagggaccaggcagcacaggcctgccagcaggaggatgccccacgagacagaagacggcattgtcgattcactgtcccaggtcagtggtggtgcctgaagctgaggacaggatggcaggagcgcccatggctgctgctgtacagcctgctgaggtgactgttgaagttggtgaggacctccacatgcaccaggttcgtgaccgggagatgcctgaagctttggagtttaacctttctgccaatccagaggcaagcacaatattccagaggaactctcaaacagatgctttggagtttaactcttctgccaatccagaggcaagcacaatattccagaggaactctcaaacagatgttgtagaaataagaagaagcaactgtacaaaccatgtatctactgagcgtttcagtcaacaatacagctcgtgttcgacaatattccttgatgacagcacagccatccagcattatcttacaatgacaataatatctgtgaccttggagatacctcatcatatcacacaaagagatgcagatagatctttgagcatacctgatgaacagttacactcatttgcggtttccaccgtgcacattatgaagaaaagaaatggaggtgggagtttaaataactattcctcctccattccaccgactcccagcaccagccaggaggaccctcagttcagtgttcctcccactgccaacacacccacccccgtttgcaagcggtccatgcgctggtccaacctgtttacatctgagaaagggagtgacccagacaaagagaggaaagccccggagaatcatgctgaggcaggagaatggcgtgaacccaggaggcggagcttgcaatgagctgagattgcaccactgcactccagcctgggcgaccaagcgagactccatctcaaaaaaaaaaattagctgggcgtggtggcgggcacctgtagtcccagctacttgggaggctgaggcaggataatggcatgaactcaggaggcaaagcttgcagtgagcagagattgtgccactgcactctggcctgggcaacagagcaagactcggtctcaaaaaaaagaaaaagagggttacagatcattgcacatggaaaatattcccagcagtaaccacttccattaatgtgatctacagcttttaaaaaggagcatctcagaataagatggtggtacaatttgcttattgagaaagg

SEQ ID NO: 390939 - DNA, 917 bp, Homo sapiens
agactctagcaggatccccatttccagcaaggacaataatatctgtgaccttagagatacctcatcatatcacacaaagagatgcagatagatctttgagcatacctgatgaacagttacactcatttgcggtttccaccgtgcacattatgaagaaaagaaatggaggtgggagtttaaataactattcctcctccattccaccgactcccagcaccagccaggaggaccctcagttcagtgttcctcccactgccaacacacccacccccgtttgcaagcggtccatgcgctggtccaacctgtttacatctgagaaagggagtgacccagacaaagagaggaaagccccggagaatcatgctgacaccatcgggagcggcagagccatccccattaaacagggcatgctcttaaagcgaagtggaaaatggctgaagacatggaaaaagaaatacgtcaccctgtgttccaatggcgtgctcacctattattcaagcttaggtgattatatgaagaatattcataaaaaagagattgaccttcggacatctaccatcaaagtcccaggaaagtggccatccctagccacatcagcctgtgcacccatctccagctctaaaagcaatggcctatccaaggacatggacaccgggctgggtgactccatatgcttcagccccggtatctccagcaccaccagccccaagctcaacccgcccccctctccatcatgccaataaaaagaaacacctaaagaagaaaagcaccaacaactttatgattgtgtctgccactggccaaacgtggcactttgaagccacgacgtatgaggagcgggatgcctgggtccaagccatccagagccagatcctggccagcctgcagtcatgcaagagcagtaaaagcaagtccca

SEQ ID NO: 390940 - DNA, 326 bp, Homo sapiens
ggctagtgaacacttgaaatgtggcttgtgttactgagaactgaattttaaattttacttaatacaaaattaagcagccacatgtggctagtggctaccatgctagacatcgcagtattagaacataaaaaaattctataagtaactagaatactggtagtcctagacgtttcttgcattctgaaagccatagaactgaagttgttatgtatggttatttctactttttaaaaaaagcaaattcttgctggtctatataatagaatgacttattttcttacgtggtaagaacagaaatcctacaaggaactgggagctaggctggc

SEQ ID NO: 390941 - DNA, 339 bp, Homo sapiens
tgctgttatttcattgaagctaagatataactgattataagaaacataagtttatgtatcactaagaaaaaatgctggcaactgaactacgatatgccattgtttataaaagccatccaattttggatatgttaaaatgagaactgcactctagcctgggagacagagtgagaccttgtctcaaaaaaaagtgaaaataggtgcatctcagaactgatcaaatataatattgtaactatgatgaaaacatttgactcaaatcaccttaggaactgggatttgaaattcactcataaatatttaaactcaatattttcattactaaattgtagctgatgg

SEQ ID NO: 390942 - DNA, 262 bp, Homo sapiens
agtctccctggaaccaagcagccaaggcaggctaatggtgaaggcccaggcacagtaatggtcccctggagatggagtcctgctctgtcatccatgctggagtgcagtggcgtgatctcagctcactgcaacctccgcctcctgggttcaagtgattctcctgcctcagcctcccaagtagctgggattacaagtgtgcaccatcacaccctgctgatttttgtatttttagtagagacagggtttcaccatgttggccagg

SEQ ID NO: 390943 - DNA, 454 bp, Homo sapiens
acagtattagggtgggagtgtcccaattttccaggtaccgtctgtcatggctttccttggctaggaaagggaattccctgaccccttgcacttcccaggtgaggcaatggccctgcccctgctcccatgggctgcaacccactgtctgacaagctcccagtgagaagaaccccagtacctcagttggaaatgcagaaatcacccatcttctgcatcattcatgctgggagctgtagactggagctgttcctattcggccatcttggaacctcctcactttgctcattttagtgtttagaaacacagtccaaatcagaaaagctcaacaagccctgctattatgcaagagcaaaaatattgagaaggaaaacaaaatggtgaataaataaaagcctaaagaaaactagagaggaggaaatgtgtgtttttcccatctgcccttatggaggaaaaa

SEQ ID NO: 390944 - DNA, 322 bp, Homo sapiens
tgatcaataaatatgtgatgaacagaaagcatgaatgaaggaagcccaaagaattaaacagaatttccaatgttattcagcttaagtaggggaatggacactagaagctaggtgctctcaatcttgtgtgctttacattccagaggtttctccagcctccttcctcacctgttcctcaagaattatcttgttctgaaaaatatcaacataatttaaaatctctaactacagtataaatgttcccttcaaaatctcatattgggctgggtacggtgctttatgcctgtaatcccagcactttgggattgccgaggtgggatga

SEQ ID NO: 390945 - DNA, 893 bp, Homo sapiens
  misc_feature (709)..(709): n is a, c, g, or t
gcaggagaatcactcgaacctgggaggcagaggttacagtgagccgagatcattgcactgcaatccagcctggcgatagtgagaattccgactcaccaaaaaaaaaaaaaaaaaaaatcatacatagtaaaatggtagcattttttgaatatgagtggaagctacatgagtgttttaaatatttcataattttaaaatcactgggtgcaaatgactatatgaataaaagtgtccaataaactgtactcttaaaaactaacaaatatatgggatatattagatacttgatggatttatatttggcataagtaaggttatattcacttttcatccatcattgcatatatgtatcaagtatgtgtgtactggcagtatttatttagcccactcaggtagaatttattcttcccatataattacagggtattatcatcaactaaattaaatcagaaaatgaatgagaaagcacctcaaagtaccaggtctatacagccattctctagatcaaacttacttacaaacacacacacaacatgtacatagttttatttatttgtttatttttctcacagatgagattaacatgggctttggagtcataaagactgaatttgaatctaattgctatcatatcatatctcctatatagatggactcttgggaaagttaaataaatttctaataatattacccttgtagttagacaatnataccaacttcttcttaaggttcttatgaagataaatttgtaaaatagccgaacattttctgacaagtagtaattattgaataaacattgacctccttccccatgtgtttctaacctcctttgttagtaaagttttttttttttttttttttgtcagcctgggcaacagagcgaggtccctctc

SEQ ID NO: 390946 - DNA, 505 bp, Homo sapiens
gcaggagaatcactcgaacctgggaggcagaggttacagtgagccgagatcattgcactgcaatccagcctggcgatagtgagaattccgactcaccaaaaaaaaaaaaaaaaaaaatcatacatagtaaaatggtagcattttttgaatatgagtggaagctacatgagtgttttaaatatttcataattttaaaatcactgggtgcaaatgactatatgaataaaagtgtccaataaactgtactcttaaaaactaacaaatatatgggatatattagatacttgatggatttatatttggcataagtaaggttatattcacttttcatccatcattgcatatatgtatcaagtatgtgtgtactggcagtatttatttagcccactcaggtagaatttattcttcccatataattacagggtattatcatcaactaaattaaagaggccaaagagcagcaccctgaatgtcagtgaccaaagtagtgtccataaaaggatcc

SEQ ID NO: 390947 - DNA, 508 bp, Homo sapiens
tgctggcctcaagcaatcctcctgcctcagcctcccaaaatattgggattacaggtgtgagccatcatacctgatggactatgttatatatttaaagcatattccatttctaaagatttgttctatagttgtacaagtgcacaaagacatgcacaaaaatgtttacaatattatttgtaatagaacactgggaaaacctaaatatccatcagtagaggattggttaatttgtgataggtgcatccatccacacaatgaaatgctttataaaaaaagatgtatgcggatagagaaaaatctttgagtaatatatgaaaaaataatgtacagtgaccctacctgtgtaagatgtatgtattatgtgtgcttgtgtgtttgtgtacatgtagaaaaaaattagagtatatgaaaggaagtgttactttaagtttaccaatgtggtagctttattacaagttgctttcagatttatattgcatagctaataggataccttgggattaaaaag

SEQ ID NO: 390948 - DNA, 348 bp, Homo sapiens
atgtaactttcacttttgatgaacatttattttgtaacattgttttgactgaatttccctgatttctagtaaggttaatcatctttttatgtatctgtacttcttttgttaactacttaataaattttgtcattttctaaaggacaatgtatctttttcttctgaatctttaacaattctttatagtcgatgttaatattatacaagccataattttctgcaaattcatcacttatttatcttttactacataaagtatttaaatatttatttagtcaaagataaataagtgattgttccccgctcaagtgatgttccccgctaagtgatgtcccgctaagtgattga

SEQ ID NO: 390949 - DNA, 889 bp, Homo sapiens
actgtaggggtggagtttccccgtaatctcccatcattccagcatttgacatccacaaacattatttagagcgtgaaatggagagtcctaaacagctttcggatctcaagactttaaatgagctgctcgtgtttatttccccgttcttgctgtggggttttgggcagtgcgtggaagacagttgcctcctacctggtgggcagacgagtgggaaatggtgtttggttgtttcttttttttttttttttttttttgggggagagggagagctctctccactctctgtgtctcccccagagggtgtggatgtcgcaagggcctcccaccttgggcctccacgtgcaacctcccaacctcccgcgggatcccccgcggcctatagagcctctcccgaagtgtggctgtgggattggcaatttgtgtgcggccaaccaacgcaaagaggtataattttgggggttttttagagatagaaaagatgggggagtcccgggccaagtgtgtggcgtccgagcgcgggggtcctgagaaaactctctgtgcaccttggggatgtgtactcccgcctggcctttggaaccttccccaaaagggtgttggggcaatttgtgccggggggtgtgatcgcccccggtgtgccccaaggtgtggggtgttctggccgtttaaatcggcagtgtgcgcacgcttgagggagcgggggggaccccaatgtgggggccagtgatgtgacccccactattctcaagggggaaaacttgcgctgtgtaaagaaagaagcgttcccagatctaaagaaatctcgggggtgggggacacaacaacggcacaaagcggcactatcaacttttttatttttcccccctttctgtgggctcctcctataaag

SEQ ID NO: 390950 - DNA, 790 bp, Homo sapiens
aattagtctagtgggataccaggccctgagagacccctacgatcccaggacactgatgtggggtaactaacacccactggaagtctacgctgagttcacaggctatgtatgacctgacatgcattttgacctgccctgtgttttgatatttgaatgagttgctgatgtttacaagccgaagctggccgggcgtggtggctcgcgcctgtaatcccagcactttgggaggtcgaggcaggaggatcgcttcaggtcaggagttccagaccagtctggccaacatggcgaaacctcgtctctactaaaaaaaaaaaaaaaaaaaaaaatacaaaaattagccgggcgtggtggcacgcccctgtaatcccaggactcgggaggctgagcacaattatcagatccgtaaacccccagaaactctgggctagaacttcataagggcacaaaacggggattggcacctgatcaccgtcctttatcccaccactagcaatttaagccttcctgaagaacagcaagaacttcgtgaaatggtggtccacagtttaccaagccagtgcgctacattgggcacacagccacggaaacgaacctctaaacggcagctccgacggctatccgggtggaacacccacacgctggagagacgaccacacccagagccccagttcaccctggcaggaagccacacacatgaaccacaccgacagcactggacggaaacctgggccacgggggacagggaccgaagcgctagaacgctctaggtcggaaagaaccccggacccgc

SEQ ID NO: 390951 - DNA, 321 bp, Homo sapiens
gcttaagtcttagagcctggtgatgatgagatgtgtggggtgagaaagacgggggagaaaagggtgacaagatttctgtgctggataactggataaatagtggatccactgggataggaggtggaaagtaaagctggtttgggagctcagtatacagttaaggatctagaaatcaaatagctttagtcttgaagctttaggtcctaaggctatatatacatggaattcaagctatagtactgctaaagacacctaaatctttagctccctgctaaactccagaacctcctatcaagctgctttctggatgtgtctccttta

SEQ ID NO: 390952 - DNA, 390 bp, Homo sapiens
ctattaagatttttctgagtcatttttttaataacctttcatttctagatgagcaacacaagaaaaggcaatgcagtcatttagataaaacacaaactgcctgccagggatcctgggtttgttccaattctcctcttaggcaaatcttttatctccctttgatatagaccagggttctaggttctatagtgcactaaactaatgaaaagaggttgtctttttctcaaatgttgtgacatagaatttagatttgaaattatagaattacagacagtaaagcatcctatattatgtaatccaactttttaagcaaagtaggaattccaattcagaattcctttctgtctcattcagcctctatgcaaatgcatccagacatatgaaattcac

SEQ ID NO: 390953 - DNA, 310 bp, Homo sapiens
aagttacataggttcctaaaattcatccccatatggtacctatttaaatcgtagataagttttaattgaattttagaaatgaaacctgtcatggagatcctgttgcaagctcaaagagctacattaaatgggtttagaaaaacagcacctctaatatctctgatgtggaggttccatttattagagattagtaggttttctctccccggtcacagaatttattggataatatagtggtttcatttttgacattctttgaaagattatgtttttatatatagtaaatggtcatgccttttcttactagata

SEQ ID NO: 390954 - DNA, 743 bp, Homo sapiens
ggctctggaagaacctgcagctgggggtgggcaggagcaagggcggcgggggcgggcgcgctgggggtccagagcgccgcactgcggacaccccgtcgccctccccgccacccccggtgggcacagggaatgcaccggccagggggagtggtgcaggcagcaggtggagcggcttcaagaagcggaagcaagtgctggaccgagtcttctcctcctcgcagcccaacctgtgctgctcgtcgccggagcccctggagcccggcggcgccggcagagccgagcaggggtccacgctacgccgccggatccgcgagcatttgctccccgccgtaaaggggcccgcggcggcctcgggagcagcgggagggacgcctcctggcggacgctcccccgactcagctccttcctcttcctccgcctcatcctccctgtcctcctcgccccagcctcccccgaggggggaccgcgcccgagatgagggtgcacggcgtcagggccccggggcgcacttgtgccaccagaagagctcctctctgccgggcaccgcctgcctggagcagctgctggagccgccgcctcctcccgcagagccggcgcggagtcccgcggagtctcgggccccggagacgggcgaggagcacggcagcagccagaaaataattaaacactgctggaaaccagtaatgcagaagtgcccttggctgatcccggactgtaccaggctggacattacatttacgaac

SEQ ID NO: 390955 - DNA, 334 bp, Homo sapiens
tgggaggccgaggtgggcggatcacctgaggtcaggagtttgagaccatcctgaccaacatggtgaaaaccagtctctactaaaaatacaaaaattagctggcctgtgatggcttgtgcctttagtcccagctactgaggaggctgaggtgggaaatcgcttgaccctgggaggtggagattgcagtgagcccacatcgcaccattgcactccagtctgggccacagagggagagcctgtctcaagaaaagaaaagccccgtagtttatcataatgtctgtactgggatatggctgatgctatgcatttctgtaaagtagctttaaaatatttt

SEQ ID NO: 390956 - DNA, 433 bp, Homo sapiens
acccacagcagactcttgcactctgttttctgattgcctgagttgggacccagcaggggtttcagacacgtaatctcggtcacactaaagtccagccttatgacgttttataattggccagaccttgaaacttgcctgtggaaaggcccaggggatttttaacatcggggatgaaggttgaggtttataaacctctttttaaaataaggaaacctggaaatggaggattaaaatgtaaaataattctgttcttttataaagaataagtgctataacaagagtttgaatcaggcccaaaacactacagacattctagaaatacaaaacagaaatatatacatatttggaaatgttgtaagagaggtcaaccgatgtgtgaagggggcaatttagatactgaatgttcgtaaacccaagtgagaaaatgagaaag

SEQ ID NO: 390957 - DNA, 1182 bp, Homo sapiens
  misc_feature (171)..(171): n is a, c, g, or t
  misc_feature (175)..(175): n is a, c, g, or t
  misc_feature (189)..(189): n is a, c, g, or t
  misc_feature (194)..(194): n is a, c, g, or t
  misc_feature (197)..(197): n is a, c, g, or t
  misc_feature (204)..(205): n is a, c, g, or t
  misc_feature (209)..(209): n is a, c, g, or t
  misc_feature (212)..(212): n is a, c, g, or t
  misc_feature (219)..(219): n is a, c, g, or t
  misc_feature (223)..(224): n is a, c, g, or t
tactcgtgtgttacagtgtgcccccagatgttctcccaattgcgtggcgttcactgcagctgtaacggtccctgcgtgcatttatgcgctctttggaccctgtgaacacaccgggatactggtaatcttgccccctatggagtacttatggcgctcccctgtgtttatttntttnggtataaacccttnataancantttaacnnacanaanagttcanagannaagatcagaaagaatacttgcttcatatgtcccaaaagagaaaaataaaggggacaatgccaacatgctcaacaataaaggcttctttttcttatttttgtaataccaaatacaagcaaaggatacacatacttaaaacagagctcaggagcagacacgcagtcctggaaacccttcaataaaagcaaagcaggagtttgttttttcttgtctatgcagatacatacagagactgggatatgtaaaaattaagtatcacaaaagaccatcacacgattctaccaatgcatgttgcatctgtaattcacgaacatggtcaacaaaatcatgttcacttcaaccccatttcatttaaattaaagaaaaaaaccttttaaataaagtggttacattcaaactttaacttccttagtaccatgctgcagatttcagcactgttaaggtattgcaagaatgcccaaccctctggtgtctgatcatgtatctagcaacattgcagtatgaagaaaagagatgccccggtctcagcccatggactagttaatacagtgaagcaggttcctgtcttttacccttcctgctcagaacataaaagattaaggactaaaatcaaggaagactgggagttttagagctggcaaaatgaagtctaaaagataaatcaaggcaaacaattactgagaacttggctgttgcttaacctggcaagtctaaaagcctttctttaaccttgtaggaattagatgcataaggtttgctgcaacatgttcatggtaaacaaactaagtagagctcttatttacaaatcttgtaacaaatacttctggaggaaaaagagaaaagaatcactaagtccagaagacaagcttaattgccagacgtatacaacacacatcacacgtaacaccacacatattcggggtttatactgtattttagggctagctgagtactatac

SEQ ID NO: 390958 - DNA, 786 bp, Homo sapiens
  misc_feature (15)..(15): n is a, c, g, or t
tggcatagctgttcnagaggatcccggtgttccctttgtctatgcagatacatacagagactgggatatgtaaaaattaagtatcacaaaagaccatcacacgattctaccaatgcatgttgcatctgtaattcacgaacatggtcaacaaaatcatgttcacttcaaccccatttcatttaaattaaagaaaaaaaccttttaaataaagtggttacattcaaactttaacttccttagtaccatgctgcagatttcagcactgttaaggtattgcaagaatgcccaaccctctggtgtctgatcatgtatctagcaacattgcagtatgaagaaaagagatgccccggtctcagcccatggactagttaatacagtgaagcaggttcctgtcttttacccttcctgctcagaacataaaagattaaggactaaaatcaaggaagactgggagttttagagctggcaaaatgaagtctaaaagataaatcaaggcaaacaattactgagaacttggctgttgcttaacctggcaagtctaaaagcctttctttaaccttgtaggaattagatgcataaggtttgctgcaacatgttcatggtaaacaaactaagtagagctcttatttacaaatcttgtaacaaatacttctggaggaaaaagagaaaagaatcactaagtccagaagacaagcttaattgccagacgtatacaacacacatcacacgtaacaccacacatattcggggtttatactgtattttagggctagctgagtactatac

SEQ ID NO: 390959 - DNA, 637 bp, Homo sapiens
gggctgcaggaattcggcacgagggaaagaattcacaggaagatagtgaggactcagaagacaaagatgtgaagaccaagaaggatgattctcactcagcagaggatagtgaagatgaaaaagaagatcataaaaatgtgcgccaacaacggcaggcggcatctaaagcagcttctaaacagagagagatgctcatggaagatgtgggcagtgaggaagaacaagaagaggaggatgaggcaccattccaggagaaagattccggcagcgatgaagatttcctaatggaagatgatgacgatagtgactatggcagttcgaaaaagaaaaacaaaaagatggttaagaagtccaaacctgaaagaaaagaaaagaaaatgcccaaacccagactaaaggctacagtgacgccaagtccagtgaaaggcaaagggaaagtgggtcgccccacagcttcaaaggcatcaaaggaaaagactccttctcccaaagaagaagatgaggaaccggaaagcccgccagaaaagaaaacatctacaagccccccacccgagaaatctggggatgaagggtctgaagatgaagccccttctggggaggattaaaagtgatgatggtctggggagagattttatta

SEQ ID NO: 390960 - DNA, 694 bp, Homo sapiens
ggacatcatccgatccaaagatatgcatgatgactcagaaagcacaaaggggaccacaaaagtctgtccgctggcatgccatctcgtcacagtccgtcataaaacacttttaaataaagtggttacattcaaactttaacttccttagtaccatgctgcagatttcagcactgttaaggtattgcaagaatgcccaaccctctggtgtctgatcatgtatctagcaacattgcagtatgaagaaaagagatgccccggtctcagcccatggactagttaatacagtgaagcaggttcctgtcttttacccttcctgctcagaacataaaagattaaggactaaaatcaaggaagactgggagttttagagctggcaaaatgaagtctaaaagataaatcaaggcaaacaattactgagaacttggctgttgcttaacctggcaagtctaaaagcctttctttaaccttgtaggaattagatgcataaggtttgctgcaacatgttcatggtaaacaaactaagtagagctcttatttacaaatcttgtaacaaatacttctggaggaaaaagagaaaagaatcactaagtccagaagacaagcttaattgccagacgtatacaacacacatcacacgtaacaccacacatattcggggtttatactgtattttagggctagctgagtactatac

SEQ ID NO: 390961 - DNA, 326 bp, Homo sapiens
  misc_feature (39)..(39): n is a, c, g, or t
accgagtcgagaagccaaagaccaggaccccccccgacncccagcgctcggcgccccactttccctttgcctttcactggacttggcgtcactgtaacctttagtctgggtttgggcaaagggaaagtgggtcgccccacagcttcaaaggcatcaaaggaaaagactccttctcccaaagaagaagatgaggaaccggaaagcccgccagaaaagaaaacatctacaagccccccacccgagaaatctggggatgaagggtctgaagatgaagccccttctggggaggattaaaagtgatgatggtctggggagagattttatta

SEQ ID NO: 390962 - DNA, 476 bp, Homo sapiens
atgaccagagacacagtgtgtcagtgtaaagaaggcaccttccggaatgaaaactccccagagatgtgccggaagtgtagcaggtgccctagtggggaagtccaagtcagtaattgtacgtcctgggatgatatccagtgtgttgaagaatttggtgccaatgccacttacttcccatcctgtccttgactaggaatatgttaaatgctgctcccatacaattcagttagctcttgtctttttatttggtccaacccctgctttactgctcatgctgcttaaagcaggagggactagagaaacaaggcattttaggaggcctgtgtgcagttgaaaaccgacttttacacgccttataaaagcagtcaggagatagatccgtaggtttgatccttcacatctaataccaggcgctaatgggaacaaggtttaaagggtcctggtatgctaataaattgaaaaattagtgaaattta

SEQ ID NO: 390963 - DNA, 5712 bp, Homo sapiens
cggctggtttgattcatccattttgaagagacgggggagcggggggctcgtctgttccaggagccctgaaccaaagagcagcggagtttgagaagccagcagctcggggttcggcagcagcggtcccatcggctgaagttcggggggggtggggcgccgagcgcgcggggtggggggggtcctggtctttggcttctcgactcggtcctgtttcgacagcgaacatgtcgcggcctgtcagaaataggaaggttgttgattactcacagtttcaggaatctgatgatgcagatgaagattatggaagagattcgggccctcccactaagaaaattcgatcatctccccgagaagctaaaaataagaggcgatctggaaagaattcacaggaagatagtgaggactcagaagacaaagatgtgaagaccaagaaggatgattctcactcagcagaggatagtgaagatgaaaaagaagatcataaaaatgtgcgccaacaacggcaggcggcatctaaagcagcttctaaacagagagagatgctcatggaagatgtgggcagtgaggaagaacaagaagaggaggatgaggcaccattccaggagaaagattccggcagcgatgaagatttcctaatggaagatgatgacgatagtgactatggcagttcgaaaaagaaaaacaaaaagatggttaagaagtccaaacctgaaagaaaagaaaagaaaatgcccaaacccagactaaaggctacagtgacgccaagtccagtgaaaggcaaagggaaagtgggtcgccccacagcttcaaaggcatcaaaggaaaagactccttctcccaaagaagaagatgaggaaccggaaagcccgccagaaaagaaaacatctacaagccccccacccgagaaatctggggatgaagggtctgaagatgaagccccttctggggaggattaaaagtgatgatggtctggggagagattttattaaaaaaaaaaagaaaaaaaaagaaaaaagagggaggaaaaaaaagaacctacttaagatagaacatggttttggctatggcttgactcatgggctttcagtgcttttttccatttgttgaaagtaacatttctctctctctctcttttttttttttttttttttaaagcaaaccattgtatgtgtaagtgtttaagttacctttttgtctattggtctctttgccagccctcccctttcccaatgaaagccatgtcaaattaatcactggattgactgcttcatctttttatttttaatgaaaggtgtaccacggttgtaaagcaataagatttgagatgaacactattgaaacttcgctttttgctaaaaaatagcaagttgaatagtaatcaaaaaacatagaaagattttagttcaaaatgattgctcctttctctacctggacttttaaaaaatcaattgtcatctaatatgagtttatttgtctatagacacaagtatcaatgtctaaaaaaaatcatgactttaaacttccaccgatgaggcaggtaggagataaagatgaattctgaactgttactaaaagtactcattttttaccttgtagggagggtgggcaatggggttacctgaccttatttgagggtatgggctttcttttttatttcatcacttgttatctcaaagagactcggagccagtgatccttttatcctgctacagtctttagggagctaaaaaaaaaaaaaaagcaggggctgccaaaactcttgatttcatatttccttctctaaatatatatgtatcctgttttttggataaaattttaccaagaatccaaaaaaaaaaaaaccctagaatttaatcaacaagatcagtctacaggtcacagtggatttcttttcaaactgacaatgtttaggttttaagcaaataaagttccagttaatgtgaaactcagtcacaaagagttgagatttttcctttatgaaatagaattgacattcttttatgctataaatgtgcattcaggtcccattaaccatgctctgcttttatttggggatagaacattttctttttcatatcccgatcttcccatttcttcatagaaatgtgataagaagtacatccctgtgatcctgctgcttcgtagagcaccactgcacaccctaccccgagtgccaaccacctctgctataggacactattttcctggccctattcttcacttacttcccatcctgtccttgactaggaatatgttaaatgctgctcccatacaattcagttagctcttgtctttttatttggtccaacccctgctttactgctcatgctgcttaaagcaggagggactagagaaacaaggcattttaggaggcctgtgtgcagttgaaaaccgacttttacacgccttataaaagcagtcaggagatagatccgtaggtttgatccttcacatctaataccaggcgctaatgggaacaaggtttaaagggtcctggtatgctaataaattgaaaaattagtgaaatttaaacttctgcctttttttcctgccttttaatctagatttgcttcctcaatatcctactttgtggtttactaggaacatgcttactctgatctttttttaaaaaacacacagtggcagagtcatttcactattgcactgtgtgttaaagaatgaataaggagttttcagttacatggccaaaaatacaggacttgaacataaatagcagttggatcattctctttcatgacggttaaattcagaggtgtgaactttgtaatgagggtgttaaagattaatctatttgcctaaatgggtttgttcaggtatccatttttaacaaagaagtttgtgttcatatagtaaaagacctatcagtgtttccaccatgcacttctattttttaggagtttataattttaagtcttacattcctagtaacatttgggcttttcttaggttatgtttcgtgaagatttggggggagggctcttttaaaacttcggcctcagttgtttaacagtctctttaatatattaatctgcactaacatctctgtgatatatgcacatattttagaggtaatcatgtcttctagattacttgtgtgcatttgattgggcttcttgtttagggtcccttttaaaattaattcattagattgaaaaatgtattctatatttctgatagactggacagaaggatctgtgtccccaagtgagacaggctctgaataacctttgttttctccactttttattgatgatttaaaacactctagtcttcccctcaaatcatgcatgcaaataggaggacagtggtggtgactcaactggatacaggtgctcaatagtcaggcttgatagtgatgtcaggacgcattacaagctgtaagccgatactgactggccattggcaccatccttgactaaccttcctctttttctctagtgtgcctatggtgaaatggcaatagcattcactgtcgtattttgcagtgctcaggaagtgggacgttaactttgaaggtgcttgtttgtattagctctgctaggtttacctctacaacgtagatttcagcagctatgctgactgacactacattctagttcttaagattttttttccagatccccccttccccagctagacatacgtagcatactttcatcttattcagtctttctgtaacctgctgctgcttttagtcctcctcacctcagatcggaatcaatggagtgggcccagaggatacattttaattccagtaatggtaggtagatttgtcctgctttctaaaacatctcctcatttcatatttccactccatattgattccataagggaaaattaatgggtgtttcctcctttagggaggtaatgcaaagagtgtggacatcttctaatcttgaggaacagtagttgatttcccttgaaggagcttacatattgactgttttcacaataacctgtttgccccagttcaatcctcattttaatacttaatttggtactggctcaaatagcattttcttacagataacaaatcaagagtgaaatttgaggttatactccagtaaagtttttaacacttgtgaatatggtcagctagactaaacttgactcttttttttaatggcttttttatctgtgaacattcagataagtggattttcaagtactggttggggatgggaatcgtgcttttctttaaacttcagtttacgagatgctttgagagcgttaggcaaaagcagaaataaatatcaggagcaacggggaaagctttataaaagatcatggtggccactgttgcagctttgaagaatgagtgctggcttgaacagttctttgcctgcatcattggtagctgcactgaaaggaaaaaactttcaccttaagaatttgaaaaggaagaaacctgggctctggtcttcatggcatttagactgagatgcttaaacagaacagaagtaatacgcatttcctgccataggatagggaaaatgtaacaagctggttgctcttgaggttagaaaattgtctgtttctctgtggatgaagctggatttacttgaaaatggagagttggcttattgtttgaatattgggacatcaagctatctatagccaagtttcagtcgcaaccagttttccctttgtctggggtaaattcgatacaaaatgattctttttgaatcctgaatccataaattacacttttttttttcaaattcacaaaattcacagtggtgctgactgtgtaataaccactattgggaaacatcccgtaaacctgcctgttgccatgccaatggagtgactgaactggtgacatctgtttgagcatgctttgtgtggctggtagaatgccaccgttgtgcatacactttgtacatcaggggtgaagggagggttttctagattattgggggagggtaaaattgggattttttggtatgcagatacatacagagactgggatatgtaaaaattaagtatcacaaaagaccatcacacgattctaccaatgcatgttgcatctgtaattcacgaacatggtcaacaaaatcatgttcacttcaaccccatttcatttaaattaaagaaaaaaaccttttaaataaagtggttacattcaaactttaacttccttagtaccatgctgcagatttcagcactgttaaggtattgcaagaatgcccaaccctctggtgtctgatcatgtatctagcaacattgcagtatgaagaaaagagatgccccggtctcagcccatggactagttaatacagtgaagcaggttcctgtcttttacccttcctgctcagaacataaaagattaaggactaaaatcaaggaagactgggagttttagagctggcaaaatgaagtctaaaagataaatcaaggcaaacaattactgagaacttggctgttgcttaacctggcaagtctaaaagcctttctttaaccttgtaggaattagatgcataaggtttgctgcaacatgttcatggtaaacaaactaagtagagctcttatttacaaatcttgtaacaaatacttctggaggaaaaagagaaaagaatcactaagtccagaagacaagcttaattgccagacgtatacaacacacatcacacgtaacaccacacatattcggggtttatactgtattttagggctagctgagtactatac

SEQ ID NO: 390964 - DNA, 5745 bp, Homo sapiens
  misc_feature (5462)..(5462): n is a, c, g, or t
  misc_feature (5479)..(5479): n is a, c, g, or t
  misc_feature (5500)..(5500): n is a, c, g, or t
cggctggtttgattcatccattttgaagagacgggggagcggggggctcgtctgttccaggagccctgaaccaaagagcagcggagtttgagaagccagcagctcggggttcggcagcagcggtcccatcggctgaagttcggggggggtggggcgccgagcgcgcggggtggggggggtcctggtctttggcttctcgactcggtcctgtttcgacagcgaacatgtcgcggcctgtcagaaataggaaggttgttgattactcacagtttcaggaatctgatgatgcagatgaagattatggaagagattcgggccctcccactaagaaaattcgatcatctccccgagaagctaaaaataagaggcgatctggaaagaattcacaggaagatagtgaggactcagaagacaaagatgtgaagaccaagaaggatgattctcactcagcagaggatagtgaagatgaaaaagaagatcataaaaatgtgcgccaacaacggcaggcggcatctaaagcagcttctaaacagagagagatgctcatggaagatgtgggcagtgaggaagaacaagaagaggaggatgaggcaccattccaggagaaagattccggcagcgatgaagatttcctaatggaagatgatgacgatagtgactatggcagttcgaaaaagaaaaacaaaaagatggttaagaagtccaaacctgaaagaaaagaaaagaaaatgcccaaacccagactaaaggctacagtgacgccaagtccagtgaaaggcaaagggaaagtgggtcgccccacagcttcaaaggcatcaaaggaaaagactccttctcccaaagaagaagatgaggaaccggaaagcccgccagaaaagaaaacatctacaagccccccacccgagaaatctggggatgaagggtctgaagatgaagccccttctggggaggattaaaagtgatgatggtctggggagagattttattaaaaaaaaaaagaaaaaaaaagaaaaaagagggaggaaaaaaaagaacctacttaagatagaacatggttttggctatggcttgactcatgggctttcagtgcttttttccatttgttgaaagtaacatttctctctctctctcttttttttttttttttttttaaagcaaaccattgtatgtgtaagtgtttaagttacctttttgtctattggtctctttgccagccctcccctttcccaatgaaagccatgtcaaattaatcactggattgactgcttcatctttttatttttaatgaaaggtgtaccacggttgtaaagcaataagatttgagatgaacactattgaaacttcgctttttgctaaaaaatagcaagttgaatagtaatcaaaaaacatagaaagattttagttcaaaatgattgctcctttctctacctggacttttaaaaaatcaattgtcatctaatatgagtttatttgtctatagacacaagtatcaatgtctaaaaaaaatcatgactttaaacttccaccgatgaggcaggtaggagataaagatgaattctgaactgttactaaaagtactcattttttaccttgtagggagggtgggcaatggggttacctgaccttatttgagggtatgggctttcttttttatttcatcacttgttatctcaaagagactcggagccagtgatccttttatcctgctacagtctttagggagctaaaaaaaaaaaaaaagcaggggctgccaaaactcttgatttcatatttccttctctaaatatatatgtatcctgttttttggataaaattttaccaagaatccaaaaaaaaaaaaaccctagaatttaatcaacaagatcagtctacaggtcacagtggatttcttttcaaactgacaatgtttaggttttaagcaaataaagttccagttaatgtgaaactcagtcacaaagagttgagatttttcctttatgaaatagaattgacattcttttatgctataaatgtgcattcaggtcccattaaccatgctctgcttttatttggggatagaacattttctttttcatatcccgatcttcccatttcttcatagaaatgtgataagaagtacatccctgtgatcctgctgcttcgtagagcaccactgcacaccctaccccgagtgccaaccacctctgctataggacactattttcctggccctattcttcacttacttcccatcctgtccttgactaggaatatgttaaatgctgctcccatacaattcagttagctcttgtctttttatttggtccaacccctgctttactgctcatgctgcttaaagcaggagggactagagaaacaaggcattttaggaggcctgtgtgcagttgaaaaccgacttttacacgccttataaaagcagtcaggagatagatccgtaggtttgatccttcacatctaataccaggcgctaatgggaacaaggtttaaagggtcctggtatgctaataaattgaaaaattagtgaaatttaaacttctgcctttttttcctgccttttaatctagatttgcttcctcaatatcctactttgtggtttactaggaacatgcttactctgatctttttttaaaaaacacacagtggcagagtcatttcactattgcactgtgtgttaaagaatgaataaggagttttcagttacatggccaaaaatacaggacttgaacataaatagcagttggatcattctctttcatgacggttaaattcagaggtgtgaactttgtaatgagggtgttaaagattaatctatttgcctaaatgggtttgttcaggtatccatttttaacaaagaagtttgtgttcatatagtaaaagacctatcagtgtttccaccatgcacttctattttttaggagtttataattttaagtcttacattcctagtaacatttgggcttttcttaggttatgtttcgtgaagatttggggggagggctcttttaaaacttcggcctcagttgtttaacagtctctttaatatattaatctgcactaacatctctgtgatatatgcacatattttagaggtaatcatgtcttctagattacttgtgtgcatttgattgggcttcttgtttagggtcccttttaaaattaattcattagattgaaaaatgtattctatatttctgatagactggacagaaggatctgtgtccccaagtgagacaggctctgaataacctttgttttctccactttttattgatgatttaaaacactctagtcttcccctcaaatcatgcatgcaaataggaggacagtggtggtgactcaactggatacaggtgctcaatagtcaggcttgatagtgatgtcaggacgcattacaagctgtaagccgatactgactggccattggcaccatccttgactaaccttcctctttttctctagtgtgcctatggtgaaatggcaatagcattcactgtcgtattttgcagtgctcaggaagtgggacgttaactttgaaggtgcttgtttgtattagctctgctaggtttacctctacaacgtagatttcagcagctatgctgactgacactacattctagttcttaagattttttttccagatccccccttccccagctagacatacgtagcatactttcatcttattcagtctttctgtaacctgctgctgcttttagtcctcctcacctcagatcggaatcaatggagtgggcccagaggatacattttaattccagtaatggtaggtagatttgtcctgctttctaaaacatctcctcatttcatatttccactccatattgattccataagggaaaattaatgggtgtttcctcctttagggaggtaatgcaaagagtgtggacatcttctaatcttgaggaacagtagttgatttcccttgaaggagcttacatattgactgttttcacaataacctgtttgccccagttcaatcctcattttaatacttaatttggtactggctcaaatagcattttcttacagataacaaatcaagagtgaaatttgaggttatactccagtaaagtttttaacacttgtgaatatggtcagctagactaaacttgactcttttttttaatggcttttttatctgtgaacattcagataagtggattttcaagtactggttggggatgggaatcgtgcttttctttaaacttcagtttacgagatgctttgagagcgttaggcaaaagcagaaataaatatcaggagcaacggggaaagctttataaaagatcatggtggccactgttgcagctttgaagaatgagtgctggcttgaacagttctttgcctgcatcattggtagctgcactgaaaggaaaaaactttcaccttaagaatttgaaaaggaagaaacctgggctctggtcttcatggcatttagactgagatgcttaaacagaacagaagtaatacgcatttcctgccataggatagggaaaatgtaacaagctggttgctcttgaggttagaaaattgtctgtttctctgtggatgaagctggatttacttgaaaatggagagttggcttattgtttgaatattgggacatcaagctatctatagccaagtttcagtcgcaaccagttttccctttgtctggggtaaattcgatacaaaatgattctttttgaatcctgaatccataaattacacttttttttttcaaattcacaaaattcacagtggtgctgactgtgtaataaccactattgggaaacatcccgtaaacctgcctgttgccatgccaatggagtgactgaactggtgacatctgtttgagcatgctttgtgtggctggtagaatgccaccgttgtgcatacactttgtacatcaggggtgaagggagggttttctagattattgggggagggtaaaattgggattttttggttgttccttttttgatggggtgtgggggtatagtactcagcttatgccctaaaataacatgtataaaaacccctgaagtattgtgtgggtgtgtacgtgtgagtgtgtgttggtatacgtctggcaattaaagcttggtcttctggaacttagtgaattcttttctctttttcctccagaagtattggttacaagatttgtaaataagagctctacttagtttgtttaccatgaacatgttgcagcaaaccttatgcatctaattcctacaaggttaaagaaaggcttttagacttgccaggttaagcaacagccaagttctcagtaattgtttgcttgatttatcttttagacttcatttggcagctctaaaactcccagtcttccttgattttagtccttaatcttttatgttctgagcaggaagggtaaacagacaggaacctggttcactggtattaactagtcccatgggctgagaccggggcaatctctnttcttcatactggcaangttgctagatactgatcgaancaggttggggttctgagtacctaacagggtggatctggggtggacaggagttaggtgggtgaccctttttagaggggtcctataaagaaggggggaggaccgatttgtgcgcgcgggtaatgacctggaagcggtggggggggaaaaatcacctcgttctgaaaaacttcgttgggtcggggtgcgcttgttgttttgtgaaaaaaagcgcctctgttgtgtggctatatatgtctagatgtggc

SEQ ID NO: 390965 - DNA, 5670 bp, Homo sapiens
cggctggtttgattcatccattttgaagagacgggggagcggggggctcgtctgttccaggagccctgaaccaaagagcagcggagtttgagaagccagcagctcggggttcggcagcagcggtcccatcggctgaagttcggggggggtggggcgccgagcgcgcggggtggggggggtcctggtctttggcttctcgactcggtcctgtttcgacagcgaacatgtcgcggcctgtcagaaataggaaggttgttgattactcacagtttcaggaatctgatgatgcagatgaagattatggaagagattcgggccctcccactaagaaaattcgatcatctccccgagaagctaaaaataagaggcgatctggaaagaattcacaggaagatagtgaggactcagaagacaaagatgtgaagaccaagaaggatgattctcactcagcagaggatagtgaagatgaaaaagaagatcataaaaatgtgcgccaacaacggcaggcggcatctaaagcagcttctaaacagagagagatgctcatggaagatgtgggcagtgaggaagaacaagaagaggaggatgaggcaccattccaggagaaagattccggcagcgatgaagatttcctaatggaagatgatgacgatagtgactatggcagttcgaaaaagaaaaacaaaaagatggttaagaagtccaaacctgaaagaaaagaaaagaaaatgcccaaacccagactaaaggctacagtgacgccaagtccagtgaaaggcaaagggaaagtgggtcgccccacagcttcaaaggcatcaaaggaaaagactccttctcccaaagaagaagatgaggaaccggaaagcccgccagaaaagaaaacatctacaagccccccacccgagaaatctggggatgaagggtctgaagatgaagccccttctggggaggattaaaagtgatgatggtctggggagagattttattaaaaaaaaaaagaaaaaaaaagaaaaaagagggaggaaaaaaaagaacctacttaagatagaacatggttttggctatggcttgactcatgggctttcagtgcttttttccatttgttgaaagtaacatttctctctctctctcttttttttttttttttttttaaagcaaaccattgtatgtgtaagtgtttaagttacctttttgtctattggtctctttgccagccctcccctttcccaatgaaagccatgtcaaattaatcactggattgactgcttcatctttttatttttaatgaaaggtgtaccacggttgtaaagcaataagatttgagatgaacactattgaaacttcgctttttgctaaaaaatagcaagttgaatagtaatcaaaaaacatagaaagattttagttcaaaatgattgctcctttctctacctggacttttaaaaaatcaattgtcatctaatatgagtttatttgtctatagacacaagtatcaatgtctaaaaaaaatcatgactttaaacttccaccgatgaggcaggtaggagataaagatgaattctgaactgttactaaaagtactcattttttaccttgtagggagggtgggcaatggggttacctgaccttatttgagggtatgggctttcttttttatttcatcacttgttatctcaaagagactcggagccagtgatccttttatcctgctacagtctttagggagctaaaaaaaaaaaaaaagcaggggctgccaaaactcttgatttcatatttccttctctaaatatatatgtatcctgttttttggataaaattttaccaagaatccaaaaaaaaaaaaaccctagaatttaatcaacaagatcagtctacaggtcacagtggatttcttttcaaactgacaatgtttaggttttaagcaaataaagttccagttaatgtgaaactcagtcacaaagagttgagatttttcctttatgaaatagaattgacattcttttatgctataaatgtgcattcaggtcccattaaccatgctctgcttttatttggggatagaacattttctttttcatatcccgatcttcccatttcttcatagaaatgtgataagaagtacatccctgtgatcctgctgcttcgtagagcaccactgcacaccctaccccgagtgccaaccacctctgctataggacactattttcctggccctattcttcacttacttcccatcctgtccttgactaggaatatgttaaatgctgctcccatacaattcagttagctcttgtctttttatttggtccaacccctgctttactgctcatgctgcttaaagcaggagggactagagaaacaaggcattttaggaggcctgtgtgcagttgaaaaccgacttttacacgccttataaaagcagtcaggagatagatccgtaggtttgatccttcacatctaataccaggcgctaatgggaacaaggtttaaagggtcctggtatgctaataaattgaaaaattagtgaaatttaaacttctgcctttttttcctgccttttaatctagatttgcttcctcaatatcctactttgtggtttactaggaacatgcttactctgatctttttttaaaaaacacacagtggcagagtcatttcactattgcactgtgtgttaaagaatgaataaggagttttcagttacatggccaaaaatacaggacttgaacataaatagcagttggatcattctctttcatgacggttaaattcagaggtgtgaactttgtaatgagggtgttaaagattaatctatttgcctaaatgggtttgttcaggtatccatttttaacaaagaagtttgtgttcatatagtaaaagacctatcagtgtttccaccatgcacttctattttttaggagtttataattttaagtcttacattcctagtaacatttgggcttttcttaggttatgtttcgtgaagatttggggggagggctcttttaaaacttcggcctcagttgtttaacagtctctttaatatattaatctgcactaacatctctgtgatatatgcacatattttagaggtaatcatgtcttctagattacttgtgtgcatttgattgggcttcttgtttagggtcccttttaaaattaattcattagattgaaaaatgtattctatatttctgatagactggacagaaggatctgtgtccccaagtgagacaggctctgaataacctttgttttctccactttttattgatgatttaaaacactctaggtgactcaactggatacaggtgctcaatagtcaggcttgatagtgatgtcaggacgcattacaagctgtaagccgatactgactggccattggcaccatccttgactaaccttcctctttttctctagtgtgcctatggtgaaatggcaatagcattcactgtcgtattttgcagtgctcaggaagtgggacgttaactttgaaggtgcttgtttgtattagctctgctaggtttacctctacaacgtagatttcagcagctatgctgactgacactacattctagttcttaagattttttttccagatccccccttccccagctagacatacgtagcatactttcatcttattcagtctttctgtaacctgctgctgcttttagtcctcctcacctcagatcggaatcaatggagtgggcccagaggatacattttaattccagtaatggtaggtagatttgtcctgctttctaaaacatctcctcatttcatatttccactccatattgattccataagggaaaattaatgggtgtttcctcctttagggaggtaatgcaaagagtgtggacatcttctaatcttgaggaacagtagttgatttcccttgaaggagcttacatattgactgttttcacaataacctgtttgccccagttcaatcctcattttaatacttaatttggtactggctcaaatagcattttcttacagataacaaatcaagagtgaaatttgaggttatactccagtaaagtttttaacacttgtgaatatggtcagctagactaaacttgactcttttttttaatggcttttttatctgtgaacattcagataagtggattttcaagtactggttggggatgggaatcgtgcttttctttaaacttcagtttacgagatgctttgagagcgttaggcaaaagcagaaataaatatcaggagcaacggggaaagctttataaaagatcatggtggccactgttgcagctttgaagaatgagtgctggcttgaacagttctttgcctgcatcattggtagctgcactgaaaggaaaaaactttcaccttaagaatttgaaaaggaagaaacctgggctctggtcttcatggcatttagactgagatgcttaaacagaacagaagtaatacgcatttcctgccataggatagggaaaatgtaacaagctggttgctcttgaggttagaaaattgtctgtttctctgtggatgaagctggatttacttgaaaatggagagttggcttattgtttgaatattgggacatcaagctatctatagccaagtttcagtcgcaaccagttttccctttgtctggggtaaattcgatacaaaatgattctttttgaatcctgaatccataaattacacttttttttttcaaattcacaaaattcacagtggtgctgactgtgtaataaccactattgggaaacatcccgtaaacctgcctgttgccatgccaatggagtgactgaactggtgacatctgtttgagcatgctttgtgtggctggtagaatgccaccgttgtgcatacactttgtacatcaggggtgaagggagggttttctagattattgggggagggtaaaattgggattttttggtatgcagatacatacagagactgggatatgtaaaaattaagtatcacaaaagaccatcacacgattctaccaatgcatgttgcatctgtaattcacgaacatggtcaacaaaatcatgttcacttcaaccccatttcatttaaattaaagaaaaaaaccttttaaataaagtggttacattcaaactttaacttccttagtaccatgctgcagatttcagcactgttaaggtattgcaagaatgcccaaccctctggtgtctgatcatgtatctagcaacattgcagtatgaagaaaagagatgccccggtctcagcccatggactagttaatacagtgaagcaggttcctgtcttttacccttcctgctcagaacataaaagattaaggactaaaatcaaggaagactgggagttttagagctggcaaaatgaagtctaaaagataaatcaaggcaaacaattactgagaacttggctgttgcttaacctggcaagtctaaaagcctttctttaaccttgtaggaattagatgcataaggtttgctgcaacatgttcatggtaaacaaactaagtagagctcttatttacaaatcttgtaacaaatacttctggaggaaaaagagaaaagaatcactaagtccagaagacaagcttaattgccagacgtatacaacacacatcacacgtaacaccacacatattcggggtttatactgtattttagggctagctgagtactatac

SEQ ID NO: 390966 - DNA, 5682 bp, Homo sapiens
gtacggtttgcgagaagacgacagaaggggaggatgaggcaccattccaggagaaagattccggcagcgatgaagatttcctaatggaagatgatgacgatagtgactatggcagttcgaaaaagaaaaacaaaaagatggttaagaagtcctggtctttggcttctcgactcggtcctgtttcgacagcgaacatgtcgcggcctgtcagaaataggaaggttgttgattactcacagtttcaggaatctgatgatgcagatgaagattatggaagagattcgggccctcccactaagaaaattcgatcatctccccgagaagctaaaaataagaggcgatctggaaagaattcacaggaagatagtgaggactcagaagacaaagatgtgaagaccaagaaggatgattctcactcagcagaggatagtgaagatgaaaaagaagatcataaaaatgtgcgccaacaacggcaggcggcatctaaagcagcttctaaacagagagagatgctcatggaagatgtgggcagtgaggaagaacaagaagaggaggatgaggcaccattccaggagaaagattccggcagcgatgaagatttcctaatggaagatgatgacgatagtgactatggcagttcgaaaaagaaaaacaaaaagatggttaagaagtccaaacctgaaagaaaagaaaagaaaatgcccaaacccagactaaaggctacagtgacgccaagtccagtgaaaggcaaagggaaagtgggtcgccccacagcttcaaaggcatcaaaggaaaagactccttctcccaaagaagaagatgaggaaccggaaagcccgccagaaaagaaaacatctacaagccccccacccgagaaatctggggatgaagggtctgaagatgaagccccttctggggaggattaaaagtgatgatggtctggggagagattttattaaaaaaaaaaagaaaaaaaaagaaaaaagagggaggaaaaaaaagaacctacttaagatagaacatggttttggctatggcttgactcatgggctttcagtgcttttttccatttgttgaaagtaacatttctctctctctctcttttttttttttttttttttaaagcaaaccattgtatgtgtaagtgtttaagttacctttttgtctattggtctctttgccagccctcccctttcccaatgaaagccatgtcaaattaatcactggattgactgcttcatctttttatttttaatgaaaggtgtaccacggttgtaaagcaataagatttgagatgaacactattgaaacttcgctttttgctaaaaaatagcaagttgaatagtaatcaaaaaacatagaaagattttagttcaaaatgattgctcctttctctacctggacttttaaaaaatcaattgtcatctaatatgagtttatttgtctatagacacaagtatcaatgtctaaaaaaaatcatgactttaaacttccaccgatgaggcaggtaggagataaagatgaattctgaactgttactaaaagtactcattttttaccttgtagggagggtgggcaatggggttacctgaccttatttgagggtatgggctttcttttttatttcatcacttgttatctcaaagagactcggagccagtgatccttttatcctgctacagtctttagggagctaaaaaaaaaaaaaaagcaggggctgccaaaactcttgatttcatatttccttctctaaatatatatgtatcctgttttttggataaaattttaccaagaatccaaaaaaaaaaaaaccctagaatttaatcaacaagatcagtctacaggtcacagtggatttcttttcaaactgacaatgtttaggttttaagcaaataaagttccagttaatgtgaaactcagtcacaaagagttgagatttttcctttatgaaatagaattgacattcttttatgctataaatgtgcattcaggtcccattaaccatgctctgcttttatttggggatagaacattttctttttcatatcccgatcttcccatttcttcatagaaatgtgataagaagtacatccctgtgatcctgctgcttcgtagagcaccactgcacaccctaccccgagtgccaaccacctctgctataggacactattttcctggccctattcttcacttacttcccatcctgtccttgactaggaatatgttaaatgctgctcccatacaattcagttagctcttgtctttttatttggtccaacccctgctttactgctcatgctgcttaaagcaggagggactagagaaacaaggcattttaggaggcctgtgtgcagttgaaaaccgacttttacacgccttataaaagcagtcaggagatagatccgtaggtttgatccttcacatctaataccaggcgctaatgggaacaaggtttaaagggtcctggtatgctaataaattgaaaaattagtgaaatttaaacttctgcctttttttcctgccttttaatctagatttgcttcctcaatatcctactttgtggtttactaggaacatgcttactctgatctttttttaaaaaacacacagtggcagagtcatttcactattgcactgtgtgttaaagaatgaataaggagttttcagttacatggccaaaaatacaggacttgaacataaatagcagttggatcattctctttcatgacggttaaattcagaggtgtgaactttgtaatgagggtgttaaagattaatctatttgcctaaatgggtttgttcaggtatccatttttaacaaagaagtttgtgttcatatagtaaaagacctatcagtgtttccaccatgcacttctattttttaggagtttataattttaagtcttacattcctagtaacatttgggcttttcttaggttatgtttcgtgaagatttggggggagggctcttttaaaacttcggcctcagttgtttaacagtctctttaatatattaatctgcactaacatctctgtgatatatgcacatattttagaggtaatcatgtcttctagattacttgtgtgcatttgattgggcttcttgtttagggtcccttttaaaattaattcattagattgaaaaatgtattctatatttctgatagactggacagaaggatctgtgtccccaagtgagacaggctctgaataacctttgttttctccactttttattgatgatttaaaacactctagtcttcccctcaaatcatgcatgcaaataggaggacagtggtggtgactcaactggatacaggtgctcaatagtcaggcttgatagtgatgtcaggacgcattacaagctgtaagccgatactgactggccattggcaccatccttgactaaccttcctctttttctctagtgtgcctatggtgaaatggcaatagcattcactgtcgtattttgcagtgctcaggaagtgggacgttaactttgaaggtgcttgtttgtattagctctgctaggtttacctctacaacgtagatttcagcagctatgctgactgacactacattctagttcttaagattttttttccagatccccccttccccagctagacatacgtagcatactttcatcttattcagtctttctgtaacctgctgctgcttttagtcctcctcacctcagatcggaatcaatggagtgggcccagaggatacattttaattccagtaatggtaggtagatttgtcctgctttctaaaacatctcctcatttcatatttccactccatattgattccataagggaaaattaatgggtgtttcctcctttagggaggtaatgcaaagagtgtggacatcttctaatcttgaggaacagtagttgatttcccttgaaggagcttacatattgactgttttcacaataacctgtttgccccagttcaatcctcattttaatacttaatttggtactggctcaaatagcattttcttacagataacaaatcaagagtgaaatttgaggttatactccagtaaagtttttaacacttgtgaatatggtcagctagactaaacttgactcttttttttaatggcttttttatctgtgaacattcagataagtggattttcaagtactggttggggatgggaatcgtgcttttctttaaacttcagtttacgagatgctttgagagcgttaggcaaaagcagaaataaatatcaggagcaacggggaaagctttataaaagatcatggtggccactgttgcagctttgaagaatgagtgctggcttgaacagttctttgcctgcatcattggtagctgcactgaaaggaaaaaactttcaccttaagaatttgaaaaggaagaaacctgggctctggtcttcatggcatttagactgagatgcttaaacagaacagaagtaatacgcatttcctgccataggatagggaaaatgtaacaagctggttgctcttgaggttagaaaattgtctgtttctctgtggatgaagctggatttacttgaaaatggagagttggcttattgtttgaatattgggacatcaagctatctatagccaagtttcagtcgcaaccagttttccctttgtctggggtaaattcgatacaaaatgattctttttgaatcctgaatccataaattacacttttttttttcaaattcacaaaattcacagtggtgctgactgtgtaataaccactattgggaaacatcccgtaaacctgcctgttgccatgccaatggagtgactgaactggtgacatctgtttgagcatgctttgtgtggctggtagaatgccaccgttgtgcatacactttgtacatcaggggtgaagggagggttttctagattattgggggagggtaaaattgggattttttggtatgcagatacatacagagactgggatatgtaaaaattaagtatcacaaaagaccatcacacgattctaccaatgcatgttgcatctgtaattcacgaacatggtcaacaaaatcatgttcacttcaaccccatttcatttaaattaaagaaaaaaaccttttaaataaagtggttacattcaaactttaacttccttagtaccatgctgcagatttcagcactgttaaggtattgcaagaatgcccaaccctctggtgtctgatcatgtatctagcaacattgcagtatgaagaaaagagatgccccggtctcagcccatggactagttaatacagtgaagcaggttcctgtcttttacccttcctgctcagaacataaaagattaaggactaaaatcaaggaagactgggagttttagagctggcaaaatgaagtctaaaagataaatcaaggcaaacaattactgagaacttggctgttgcttaacctggcaagtctaaaagcctttctttaaccttgtaggaattagatgcataaggtttgctgcaacatgttcatggtaaacaaactaagtagagctcttatttacaaatcttgtaacaaatacttctggaggaaaaagagaaaagaatcactaagtccagaagacaagcttaattgccagacgtatacaacacacatcacacgtaacaccacacatattcggggtttatactgtattttagggctagctgagtactatac

SEQ ID NO: 390967 - DNA, 5285 bp, Homo sapiens
cggctggtttgattcatccattttgaagagacgggggagcggggggctcgtctgttccaggagccctgaaccaaagagcagcggagtttgagaagccagcagctcggggttcggcagcagcggtcccatcggctgaagttcggggggggtggggcgccgagcgcgcggggtggggggggtcctggtctttggcttctcgactcggtcctgtttcgacagcgaacatgtcgcggcctgtcagaaataggaaggttgttgattactcacagtttcaggaatctgatgatgcagatgaagattatggaagagattcgggccctcccactaagaaaattcgatcatctccccgagaagctaaaaataagaggcgatctggaaagaattcacaggaagatagtgaggactcagaagacaaagatgtgaagaccaagaaggatgattctcactcagcagaggatagtgaagatgaaaaagaagatcataaaaatgtgcgccaacaacggcaggcggcatctaaagcagcttctaaacagagagagatgctcatggaagatgtgggcagtgaggaagaacaagaagaggaggatgaggcaccattccaggagaaagattccggcagcgatgaagatttcctaatggaagatgatgacgatagtgactatggcagttcgaaaaagaaaaacaaaaagatggttaagaagtccaaacctgaaagaaaagaaaagaaaatgcccaaacccagactaaaggctacagtgacgccaagtccagtgaaaggcaaagggaaagtgggtcgccccacagcttcaaaggcatcaaaggaaaagactccttctcccaaagaagaagatgaggaaccggaaagcccgccagaaaagaaaacatctacaagccccccacccgagaaatctggggatgaagggtctgaagatgaagccccttctggggaggattaaaagtgatgatggtctggggagagattttattaaaaaaaaaaagaaaaaaaaagaaaaaagagggaggaaaaaaaagaacctacttaagatagaacatggttttggctatggcttgactcatgggctttcagtgcttttttccatttgttgaaagtaacatttctctctctctctcttttttttttttttttttttaaagcaaaccattgtatgtgtaagtgtttaagttacctttttgtctattggtctctttgccagccctcccctttcccaatgaaagccatgtcaaattaatcactggattgactgcttcatctttttatttttaatgaaaggtgtaccacggttgtaaagcaataagatttgagatgaacactattgaaacttcgctttttgctaaaaaatagcaagttgaatagtaatcaaaaaacatagaaagattttagttcaaaatgattgctcctttctctacctggacttttaaaaaatcaattgtcatctaatatgagtttatttgtctatagacacaagtatcaatgtctaaaaaaaatcatgactttaaacttccaccgatgaggcaggtaggagataaagatgaattctgaactgttactaaaagtactcattttttaccttgtagggagggtgggcaatggggttacctgaccttatttgagggtatgggctttcttttttatttcatcacttgttatctcaaagagactcggagccagtgatccttttatcctgctacagtctttagggagctaaaaaaaaaaaaaaagcaggggctgccaaaactcttgatttcatatttccttctctaaatatatatgtatcctgttttttggataaaattttaccaagaatccaaaaaaaaaaaaaccctagaatttaatcaacaagatcagtctacaggtcacagtggatttcttttcaaactgacaatgtttaggttttaagcaaataaagttccagttaatgtgaaactcagtcacaaagagttgagatttttcctttatgaaatagaattgacattcttttatgctataaatgtgcattcaggtcccattaaccatgctctgcttttatttggggatagaacattttctttttcatatcccgatcttcccatttcttcatagaaatgtgataagaagtacatccctgtgatcctgctgcttcgtagagcaccactgcacaccctaccccgagtgccaaccacctctgctataggacactattttcctggccctattcttcacttacttcccatcctgtccttgactaggaatatgttaaatgctgctcccatacaattcagttagctcttgtctttttatttggtccaacccctgctttactgctcatgctgcttaaagcaggagggactagagaaacaaggcattttaggaggcctgtgtgcagttgaaaaccgacttttacacgccttataaaagcagtcaggagatagatccgtaggtttgatccttcacatctaataccaggcgctaatgggaacaaggtttaaagggtcctggtatgctaataaattgaaaaattagtgaaatttaaacttctgcctttttttcctgccttttaatctagatttgcttcctcaatatcctactttgtggtttactaggaacatgcttactctgatctttttttaaaaaacacacagtggcagagtcatttcactattgcactgtgtgttaaagaatgaataaggagttttcagttacatggccaaaaatacaggacttgaacataaatagcagttggatcattctctttcatgacggttaaattcagaggtgtgaactttgtaatgagggtgttaaagattaatctatttgcctaaatgggtttgttcaggtatccatttttaacaaagaagtttgtgttcatatagtaaaagacctatcagtgtttccaccatgcacttctattttttaggagtttataattttaagtcttacattcctagtaacatttgggcttttcttaggttatgtttcgtgaagatttggggggagggctcttttaaaacttcggcctcagttgtttaacagtctctttaatatattaatctgcactaacatctctgtgatatatgcacatattttagaggtaatcatgtcttctagattacttgtgtgcatttgattgggcttcttgtttagggtcccttttaaaattaattcattagattgaaaaatgtattctatatttctgatagactggacagaaggatctgtgtccccaagtgagacaggctctgaataacctttgttttctccactttttattgatgatttaaaacactctagtcttcccctcaaatcatgcatgcaaataggaggacagtggtggtgactcaactggatacaggtgctcaatagtcaggcttgatagtgatgtcaggacgcattacaagctgtaagccgatactgactggccattggcaccatccttgactaaccttcctctttttctctagtgtgcctatggtgaaatggcaatagcattcactgtcgtattttgcagtgctcaggaagtgggacgttaactttgaaggtgcttgtttgtattagctctgctaggtttacctctacaacgtagatttcagcagctatgctgactgacactacattctagttcttaagattttttttccagatccccccttccccagctagacatacgtagcatactttcatcttattcagtctttctgtaacctgctgctgcttttagtcctcctcacctcagatcggaatcaatggagtgggcccagaggatacattttaattccagtaatggtaggtagatttgtcctgctttctaaaacatctcctcatttcatatttccactccatattgattccataagggaaaattaatgggtgtttcctcctttagggaggtaatgcaaagagtgtggacatcttctaatcttgaggaacagtagttgatttcccttgaaggagcttacatattgactgttttcacaataacctgtttgccccagttcaatcctcattttaatacttaatttggtactggctcaaatagcattttcttacagataacaaatcaagagtgaaatttgaggttatactccagtaaagtttttaacacttgtgaatatggtcagctagactaaacttgactcttttttttaatggcttttttatctgtgaacattcagataagtggattttcaagtactggttggggatgggaatcgtgcttttctttaaacttcagtttacgagatgctttgagagcgttaggcaaaagcagaaataaatatcaggagcaacggggaaagctttataaaagatcatggtggccactgttgcagctttgaagaatgagtgctggcttgaacagttctttgcctgcatcattggtagctgcactgaaaggaaaaaactttcaccttaagaatttgaaaaggaagaaacctgggctctggtcttcatggcatttagactgagatgcttaaacagaacagaagtaatacgcatttcctgccataggatagggaaaatgtaacaagctggttgctcttgaggttagaaaattgtctgtttctctgtggatgaagctggatttacttgaaaatggagagttggcttattgtttgaatattgggacatcaagctatctatagccaagtttcagtcgcaaccagttttccctttgtctggggtaaattcgatacaaaatgattctttttgaatcctgaatccataaattacacttttttttttcaaattcacaaaattcacagtggtgctgactgtgtaataaccactattgggaaacatcccgtaaacctgcctgttgccatgccaatggagtgactgaactggtgacatctgtttgagcatgctttgtgtggctggtagaatgccaccgttgtgcatacactttgtacatcaggggtgaagggagggttttctagattattgggggagggtaaaattgggattttttggttgttccttttttgatggggtgtgggggtatagtactcagcttatgccctaaaataacatgtataaaaacccctgaagtattgtgtgggtgtgtacgtgtgagtgtgtgttggtatacgtctggcaattaaagcttggtcttctggaacttagtgaattcttttctctttttcctccagaagtattggttacaagatttgtaaataagagctctacttagtttgtttaccatgaacatgttgcagagcacagccaagttcttagaattggtggcttggttaatctttaaacttattttgccctttctcccagtttcttg

SEQ ID NO: 390968 - DNA, 5747 bp, Homo sapiens
  misc_feature (5464)..(5464): n is a, c, g, or t
  misc_feature (5481)..(5481): n is a, c, g, or t
  misc_feature (5502)..(5502): n is a, c, g, or t
cggctggtttgattcatccattttgaagagacgggggagcggggggctcgtctgttccaggagccctgaaccaaagagcagcggagtttgagaagccagcagctcggggttcggcagcagcggtcccatcggctgaagttcggggggggtggggcgccgagcgcgcggggtggggggggtcctggtctttggcttctcgactcggtcctgtttcgacagcgaacatgtcgcggcctgtcagaaataggaaggttgttgattactcacagtttcaggaatctgatgatgcagatgaagattatggaagagattcgggccctcccactaagaaaattcgatcatctccccgagaagctaaaaataagaggcgatctggaaagaattcacaggaagatagtgaggactcagaagacaaagatgtgaagaccaagaaggatgattctcactcagcagaggatagtgaagatgaaaaagaagatcataaaaatgtgcgccaacaacggcaggcggcatctaaagcagcttctaaacagagagagatgctcatggaagatgtgggcagtgaggaagaacaagaagaggaggatgaggcaccattccaggagaaagattccggcagcgatgaagatttcctaatggaagatgatgacgatagtgactatggcagttcgaaaaagaaaaacaaaaagatggttaagaagtccaaacctgaaagaaaagaaaagaaaatgcccaaacccagactaaaggctacagtgacgccaagtccagtgaaaggcaaagggaaagtgggtcgccccacagcttcaaaggcatcaaaggaaaagactccttctcccaaagaagaagatgaggaaccggaaagcccgccagaaaagaaaacatctacaagccccccacccgagaaatctggggatgaagggtctgaagatgaagccccttctggggaggattaaaagtgatgatggtctggggagagattttattaaaaaaaaaaagaaaaaaaaagaaaaaagagggaggaaaaaaaagaacctacttaagatagaacatggttttggctatggcttgactcatgggctttcagtgcttttttccatttgttgaaagtaacatttctctctctctctcttttttttttttttttttttaaagcaaaccattgtatgtgtaagtgtttaagttacctttttgtctattggtctctttgccagccctcccctttcccaatgaaagccatgtcaaattaatcactggattgactgcttcatctttttatttttaatgaaaggtgtaccacggttgtaaagcaataagatttgagatgaacactattgaaacttcgctttttgctaaaaaatagcaagttgaatagtaatcaaaaaacatagaaagattttagttcaaaatgattgctcctttctctacctggacttttaaaaaatcaattgtcatctaatatgagtttatttgtctatagacacaagtatcaatgtctaaaaaaaatcatgactttaaacttccaccgatgaggcaggtaggagataaagatgaattctgaactgttactaaaagtactcattttttaccttgtagggagggtgggcaatggggttacctgaccttatttgagggtatgggctttcttttttatttcatcacttgttatctcaaagagactcggagccagtgatccttttatcctgctacagtctttagggagctaaaaaaaaaaaaaaagcaggggctgccaaaactcttgatttcatatttccttctctaaatatatatgtatcctgttttttggataaaattttaccaagaatccaaaaaaaaaaaaaccctagaatttaatcaacaagatcagtctacaggtcacagtggatttcttttcaaactgacaatgtttaggttttaagcaaataaagttccagttaatgtgaaactcagtcacaaagagttgagatttttcctttatgaaatagaattgacattcttttatgctataaatgtgcattcaggtcccattaaccatgctctgcttttatttggggatagaacattttctttttcatatcccgatcttcccatttcttcatagaaatgtgataagaagtacatccctgtgatcctgctgcttcgtagagcaccactgcacaccctaccccgagtgccaaccacctctgctataggacactattttcctggccctattcttcacttacttcccatcctgtccttgactaggaatatgttaaatgctgctcccatacaattcagttagctcttgtctttttatttggtccaacccctgctttactgctcatgctgcttaaagcaggagggactagagaaacaaggcattttaggaggcctgtgtgcagttgaaaaccgacttttacacgccttataaaagcagtcaggagatagatccgtaggtttgatccttcacatctaataccaggcgctaatgggaacaaggtttaaagggtcctggtatgctaataaattgaaaaattagtgaaatttaaacttctgcctttttttcctgccttttaatctagatttgcttcctcaatatcctactttgtggtttactaggaacatgcttactctgatctttttttaaaaaacacacagtggcagagtcatttcactattgcactgtgtgttaaagaatgaataaggagttttcagttacatggccaaaaatacaggacttgaacataaatagcagttggatcattctctttcatgacggttaaattcagaggtgtgaactttgtaatgagggtgttaaagattaatctatttgcctaaatgggtttgttcaggtatccatttttaacaaagaagtttgtgttcatatagtaaaagacctatcagtgtttccaccatgcacttctattttttaggagtttataattttaagtcttacattcctagtaacatttgggcttttcttaggttatgtttcgtgaagatttggggggagggctcttttaaaacttcggcctcagttgtttaacagtctctttaatatattaatctgcactaacatctctgtgatatatgcacatattttagaggtaatcatgtcttctagattacttgtgtgcatttgattgggcttcttgtttagggtcccttttaaaattaattcattagattgaaaaatgtattctatatttctgatagactggacagaaggatctgtgtccccaagtgagacaggctctgaataacctttgttttctccactttttattgatgatttaaaacactctagtcttcccctcaaatcatgcatgcaaataggaggacagtggtggtgactcaactggatacaggtgctcaatagtcaggcttgatagtgatgtcaggacgcattacaagctgtaagccgatactgactggccattggcaccatccttgactaaccttcctctttttctctagtgtgcctatggtgaaatggcaatagcattcactgtcgtattttgcagtgctcaggaagtgggacgttaactttgaaggtgcttgtttgtattagctctgctaggtttacctctacaacgtagatttcagcagctatgctgactgacactacattctagttcttaagattttttttccagatccccccttccccagctagacatacgtagcatactttcatcttattcagtctttctgtaacctgctgctgcttttagtcctcctcacctcagatcggaatcaatggagtgggcccagaggatacattttaattccagtaatggtaggtagatttgtcctgctttctaaaacatctcctcatttcatatttccactccatattgattccataagggaaaattaatgggtgtttcctcctttagggaggtaatgcaaagagtgtggacatcttctaatcttgaggaacagtagttgatttcccttgaaggagcttacatattgactgttttcacaataacctgtttgccccagttcaatcctcattttaatacttaatttggtactggctcaaatagcattttcttacagataacaaatcaagagtgaaatttgaggttatactccagtaaagtttttaacacttgtgaatatggtcagctagactaaacttgactcttttttttaatggcttttttatctgtgaacattcagataagtggattttcaagtactggttggggatgggaatcgtgcttttctttaaacttcagtttacgagatgctttgagagcgttaggcaaaagcagaaataaatatcaggagcaacggggaaagctttataaaagatcatggtggccactgttgcagctttgaagaatgagtgctggcttgaacagttctttgcctgcatcattggtagctgcactgaaaggaaaaaactttcaccttaagaatttgaaaaggaagaaacctgggctctggtcttcatggcatttagactgagatgcttaaacagaacagaagtaatacgcatttcctgccataggatagggaaaatgtaacaagctggttgctcttgaggttagaaaattgtctgtttctctgtggatgaagctggatttacttgaaaatggagagttggcttattgtttgaatattgggacatcaagctatctatagccaagtttcagtcgcaaccagttttccctttgtctggggtaaattcgatacaaaatgattctttttgaatcctgaatccataaattacacttttttttttcaaattcacaaaattcacagtggtgctgactgtgtaataaccactattgggaaacatcccgtaaacctgcctgttgccatgccaatggagtgactgaactggtgacatctgtttgagcatgctttgtgtggctggtagaatgccaccgttgtgcatacactttgtacatcaggggtgaagggagggttttctagattattgggggagggtaaaattgggattttttggttgttccttttttgatggggtgtgggggtatagtactcagcttatgccctaaaataacatgtataaaaacccctgaagtattgtgtgggtgtgtacgtgtgagtgtgtgttggtatacgtctggcaattaaagcttggtcttctggaacttagtgaattcttttctcttttgcatcccaggaagttcttgggtaccacgatggtaaataaagagctctattagttgtctaccctgcaccttgttgcgcaaaccttatgcatctaattcctacaaggttaaagaaaggcttttagacttgccaggttaagcaacagccaagttctcagtaattgtttgcttgatttatcttttagacttcatttggcagctctaaaactcccagtcttccttgattttagtccttaatcttttatgttctgagcaggaagggtaaacagacaggaacctggttcactggtattaactagtcccatgggctgagaccggggcaatctctnttcttcatactggcaangttgctagatactgatcgaancaggttggggttctgagtacctaacagggtggatctggggtggacaggagttaggtgggtgaccctttttagaggggtcctataaagaaggggggaggaccgatttgtgcgcgcgggtaatgacctggaagcggtggggggggaaaaatcacctcgttctgaaaaacttcgttgggtcggggtgcgcttgttgttttgtgaaaaaaagcgcctctgttgtgtggctatatatgtctagatgtggc

SEQ ID NO: 390969 - DNA, 5113 bp, Homo sapiens
  misc_feature (4985)..(4985): n is a, c, g, or t
cggctggtttgattcatccattttgaagagacgggggagcggggggctcgtctgttccaggagccctgaaccaaagagcagcggagtttgagaagccagcagctcggggttcggcagcagcggtcccatcggctgaagttcggggggggtggggcgccgagcgcgcggggtggggggggtcctggtctttggcttctcgactcggtcctgtttcgacagcgaacatgtcgcggcctgtcagaaataggaaggttgttgattactcacagtttcaggaatctgatgatgcagatgaagattatggaagagattcgggccctcccactaagaaaattcgatcatctccccgagaagctaaaaataagaggcgatctggaaagaattcacaggaagatagtgaggactcagaagacaaagatgtgaagaccaagaaggatgattctcactcagcagaggatagtgaagatgaaaaagaagatcataaaaatgtgcgccaacaacggcaggcggcatctaaagcagcttctaaacagagagagatgctcatggaagatgtgggcagtgaggaagaacaagaagaggaggatgaggcaccattccaggagaaagattccggcagcgatgaagatttcctaatggaagatgatgacgatagtgactatggcagttcgaaaaagaaaaacaaaaagatggttaagaagtccaaacctgaaagaaaagaaaagaaaatgcccaaacccagactaaaggctacagtgacgccaagtccagtgaaaggcaaagggaaagtgggtcgccccacagcttcaaaggcatcaaaggaaaagactccttctcccaaagaagaagatgaggaaccggaaagcccgccagaaaagaaaacatctacaagccccccacccgagaaatctggggatgaagggtctgaagatgaagccccttctggggaggattaaaagtgatgatggtctggggagagattttattaaaaaaaaaaagaaaaaaaaagaaaaaagagggaggaaaaaaaagaacctacttaagatagaacatggttttggctatggcttgactcatgggctttcagtgcttttttccatttgttgaaagtaacatttctctctctctctcttttttttttttttttttttaaagcaaaccattgtatgtgtaagtgtttaagttacctttttgtctattggtctctttgccagccctcccctttcccaatgaaagccatgtcaaattaatcactggattgactgcttcatctttttatttttaatgaaaggtgtaccacggttgtaaagcaataagatttgagatgaacactattgaaacttcgctttttgctaaaaaatagcaagttgaatagtaatcaaaaaacatagaaagattttagttcaaaatgattgctcctttctctacctggacttttaaaaaatcaattgtcatctaatatgagtttatttgtctatagacacaagtatcaatgtctaaaaaaaatcatgactttaaacttccaccgatgaggcaggtaggagataaagatgaattctgaactgttactaaaagtactcattttttaccttgtagggagggtgggcaatggggttacctgaccttatttgagggtatgggctttcttttttatttcatcacttgttatctcaaagagactcggagccagtgatccttttatcctgctacagtctttagggagctaaaaaaaaaaaaaaagcaggggctgccaaaactcttgatttcatatttccttctctaaatatatatgtatcctgttttttggataaaattttaccaagaatccaaaaaaaaaaaaaccctagaatttaatcaacaagatcagtctacaggtcacagtggatttcttttcaaactgacaatgtttaggttttaagcaaataaagttccagttaatgtgaaactcagtcacaaagagttgagatttttcctttatgaaatagaattgacattcttttatgctataaatgtgcattcaggtcccattaaccatgctctgcttttatttggggatagaacattttctttttcatatcccgatcttcccatttcttcatagaaatgtgataagaagtacatccctgtgatcctgctgcttcgtagagcaccactgcacaccctaccccgagtgccaaccacctctgctataggacactattttcctggccctattcttcacttacttcccatcctgtccttgactaggaatatgttaaatgctgctcccatacaattcagttagctcttgtctttttatttggtccaacccctgctttactgctcatgctgcttaaagcaggagggactagagaaacaaggcattttaggaggcctgtgtgcagttgaaaaccgacttttacacgccttataaaagcagtcaggagatagatccgtaggtttgatccttcacatctaataccaggcgctaatgggaacaaggtttaaagggtcctggtatgctaataaattgaaaaattagtgaaatttaaacttctgcctttttttcctgccttttaatctagatttgcttcctcaatatcctactttgtggtttactaggaacatgcttactctgatctttttttaaaaaacacacagtggcagagtcatttcactattgcactgtgtgttaaagaatgaataaggagttttcagttacatggccaaaaatacaggacttgaacataaatagcagttggatcattctctttcatgacggttaaattcagaggtgtgaactttgtaatgagggtgttaaagattaatctatttgcctaaatgggtttgttcaggtatccatttttaacaaagaagtttgtgttcatatagtaaaagacctatcagtgtttccaccatgcacttctattttttaggagtttataattttaagtcttacattcctagtaacatttgggcttttcttaggttatgtttcgtgaagatttggggggagggctcttttaaaacttcggcctcagttgtttaacagtctctttaatatattaatctgcactaacatctctgtgatatatgcacatattttagaggtaatcatgtcttctagattacttgtgtgcatttgattgggcttcttgtttagggtcccttttaaaattaattcattagattgaaaaatgtattctatatttctgatagactggacagaaggatctgtgtccccaagtgagacaggctctgaataacctttgttttctccactttttattgatgatttaaaacactctagtcttcccctcaaatcatgcatgcaaataggaggacagtggtggtgactcaactggatacaggtgctcaatagtcaggcttgatagtgatgtcaggacgcattacaagctgtaagccgatactgactggccattggcaccatccttgactaaccttcctctttttctctagtgtgcctatggtgaaatggcaatagcattcactgtcgtattttgcagtgctcaggaagtgggacgttaactttgaaggtgcttgtttgtattagctctgctaggtttacctctacaacgtagatttcagcagctatgctgactgacactacattctagttcttaagattttttttccagatccccccttccccagctagacatacgtagcatactttcatcttattcagtctttctgtaacctgctgctgcttttagtcctcctcacctcagatcggaatcaatggagtgggcccagaggatacattttaattccagtaatggtaggtagatttgtcctgctttctaaaacatctcctcatttcatatttccactccatattgattccataagggaaaattaatgggtgtttcctcctttagggaggtaatgcaaagagtgtggacatcttctaatcttgaggaacagtagttgatttcccttgaaggagcttacatattgactgttttcacaataacctgtttgccccagttcaatcctcattttaatacttaatttggtactggctcaaatagcattttcttacagataacaaatcaagagtgaaatttgaggttatactccagtaaagtttttaacacttgtgaatatggtcagctagactaaacttgactcttttttttaatggcttttttatctgtgaacattcagataagtggattttcaagtactggttggggatgggaatcgtgcttttctttaaacttcagtttacgagatgctttgagagcgttaggcaaaagcagaaataaatatcaggagcaacggggaaagctttataaaagatcatggtggccactgttgcagctttgaagaatgagtgctggcttgaacagttctttgcctgcatcattggtagctgcactgaaaggaaaaaactttcaccttaagaatttgaaaaggaagaaacctgggctctggtcttcatggcatttagactgagatgcttaaacagaacagaagtaatacgcatttcctgccataggatagggaaaatgtaacaagctggttgctcttgaggttagaaaattgtctgtttctctgtggatgaagctggatttacttgaaaatggagagttggcttattgtttgaatattgggacatcaagctatctatagccaagtttcagtcgcaaccagttttccctttgtctggggtaaattcgatacaaaatgattctttttgaatcctgaatccataaattacacttttttttttcaaattcacaaaattcacagtggtgctgactgtgtaataaccactattgggaaacatcccgtaaacctgcctgttgccatgccaatggagtgactgaactggtgacatctgtttgagcatgctttgtgtggctggtagaatgccaccgttgtgcatacactttgtacatcaggggtgaagggagggttttctagattattgggggagggtaaaattgggattttttggggggcccttttgggggggngggggtaagaaaacaagtatttccctaaataaattgttaaaccctgtaatttgtggggttgacggtacaaggtgtgtaacatcggacaaaagttgatcgaaaacaacttctttccacaaatttacatc

SEQ ID NO: 390970 - DNA, 5337 bp, Homo sapiens
cggctggtttgattcatccattttgaagagacgggggagcggggggctcgtctgttccaggagccctgaaccaaagagcagcggagtttgagaagccagcagctcggggttcggcagcagcggtcccatcggctgaagttcggggggggtggggcgccgagcgcgcggggtggggggggtcctggtctttggcttctcgactcggtcctgtttcgacagcgaacatgtcgcggcctgtcagaaataggaaggttgttgattactcacagtttcaggaatctgatgatgcagatgaagattatggaagagattcgggccctcccactaagaaaattcgatcatctccccgagaagctaaaaataagaggcgatctggaaagaattcacaggaagatagtgaggactcagaagacaaagatgtgaagaccaagaaggatgattctcactcagcagaggatagtgaagatgaaaaagaagatcataaaaatgtgcgccaacaacggcaggcggcatctaaagcagcttctaaacagagagagatgctcatggaagatgtgggcagtgaggaagaacaagaagaggaggatgaggcaccattccaggagaaagattccggcagcgatgaagatttcctaatggaagatgatgacgatagtgactatggcagttcgaaaaagaaaaacaaaaagatggttaagaagtccaaacctgaaagaaaagaaaagaaaatgcccaaacccagactaaaggctacagtgacgccaagtccagtgaaaggcaaagggaaagtgggtcgccccacagcttcaaaggcatcaaaggaaaagactccttctcccaaagaagaagatgaggaaccggaaagcccgccagaaaagaaaacatctacaagccccccacccgagaaatctggggatgaagggtctgaagatgaagccccttctggggaggattaaaagtgatgatggtctggggagagattttattaaaaaaaaaaagaaaaaaaaagaaaaaagagggaggaaaaaaaagaacctacttaagatagaacatggttttggctatggcttgactcatgggctttcagtgcttttttccatttgttgaaagtaacatttctctctctctctcttttttttttttttttttttaaagcaaaccattgtatgtgtaagtgtttaagttacctttttgtctattggtctctttgccagccctcccctttcccaatgaaagccatgtcaaattaatcactggattgactgcttcatctttttatttttaatgaaaggtgtaccacggttgtaaagcaataagatttgagatgaacactattgaaacttcgctttttgctaaaaaatagcaagttgaatagtaatcaaaaaacatagaaagattttagttcaaaatgattgctcctttctctacctggacttttaaaaaatcaattgtcatctaatatgagtttatttgtctatagacacaagtatcaatgtctaaaaaaaatcatgactttaaacttccaccgatgaggcaggtaggagataaagatgaattctgaactgttactaaaagtactcattttttaccttgtagggagggtgggcaatggggttacctgaccttatttgagggtatgggctttcttttttatttcatcacttgttatctcaaagagactcggagccagtgatccttttatcctgctacagtctttagggagctaaaaaaaaaaaaaaagcaggggctgccaaaactcttgatttcatatttccttctctaaatatatatgtatcctgttttttggataaaattttaccaagaatccaaaaaaaaaaaaaccctagaatttaatcaacaagatcagtctacaggtcacagtggatttcttttcaaactgacaatgtttaggttttaagcaaataaagttccagttaatgtgaaactcagtcacaaagagttgagatttttcctttatgaaatagaattgacattcttttatgctataaatgtgcattcaggtcccattaaccatgctctgcttttatttggggatagaacattttctttttcatatcccgatcttcccatttcttcatagaaatgtgataagaagtacatccctgtgatcctgctgcttcgtagagcaccactgcacaccctaccccgagtgccaaccacctctgctataggacactattttcctggccctattcttcacttacttcccatcctgtccttgactaggaatatgttaaatgctgctcccatacaattcagttagctcttgtctttttatttggtccaacccctgctttactgctcatgctgcttaaagcaggagggactagagaaacaaggcattttaggaggcctgtgtgcagttgaaaaccgacttttacacgccttataaaagcagtcaggagatagatccgtaggtttgatccttcacatctaataccaggcgctaatgggaacaaggtttaaagggtcctggtatgctaataaattgaaaaattagtgaaatttaaacttctgcctttttttcctgccttttaatctagatttgcttcctcaatatcctactttgtggtttactaggaacatgcttactctgatctttttttaaaaaacacacagtggcagagtcatttcactattgcactgtgtgttaaagaatgaataaggagttttcagttacatggccaaaaatacaggacttgaacataaatagcagttggatcattctctttcatgacggttaaattcagaggtgtgaactttgtaatgagggtgttaaagattaatctatttgcctaaatgggtttgttcaggtatccatttttaacaaagaagtttgtgttcatatagtaaaagacctatcagtgtttccaccatgcacttctattttttaggagtttataattttaagtcttacattcctagtaacatttgggcttttcttaggttatgtttcgtgaagatttggggggagggctcttttaaaacttcggcctcagttgtttaacagtctctttaatatattaatctgcactaacatctctgtgatatatgcacatattttagaggtaatcatgtcttctagattacttgtgtgcatttgattgggcttcttgtttagggtcccttttaaaattaattcattagattgaaaaatgtattctatatttctgatagactggacagaaggatctgtgtccccaagtgagacaggctctgaataacctttgttttctccactttttattgatgatttaaaacactctagtcttcccctcaaatcatgcatgcaaataggaggacagtggtggtgactcaactggatacaggtgctcaatagtcaggcttgatagtgatgtcaggacgcattacaagctgtaagccgatactgactggccattggcaccatccttgactaaccttcctctttttctctagtgtgcctatggtgaaatggcaatagcattcactgtcgtattttgcagtgctcaggaagtgggacgttaactttgaaggtgcttgtttgtattagctctgctaggtttacctctacaacgtagatttcagcagctatgctgactgacactacattctagttcttaagattttttttccagatccccccttccccagctagacatacgtagcatactttcatcttattcagtctttctgtaacctgctgctgcttttagtcctcctcacctcagatcggaatcaatggagtgggcccagaggatacattttaattccagtaatggtaggtagatttgtcctgctttctaaaacatctcctcatttcatatttccactccatattgattccataagggaaaattaatgggtgtttcctcctttagggaggtaatgcaaagagtgtggacatcttctaatcttgaggaacagtagttgatttcccttgaaggagcttacatattgactgttttcacaataacctgtttgccccagttcaatcctcattttaatacttaatttggtactggctcaaatagcattttcttacagataacaaatcaagagtgaaatttgaggttatactccagtaaagtttttaacacttgtgaatatggtcagctagactaaacttgactcttttttttaatggcttttttatctgtgaacattcagataagtggattttcaagtactggttggggatgggaatcgtgcttttctttaaacttcagtttacgagatgctttgagagcgttaggcaaaagcagaaataaatatcaggagcaacggggaaagctttataaaagatcatggtggccactgttgcagctttgaagaatgagtgctggcttgaacagttctttgcctgcatcattggtagctgcactgaaaggaaaaaactttcaccttaagaatttgaaaaggaagaaacctgggctctggtcttcatggcatttagactgagatgcttaaacagaacagaagtaatacgcatttcctgccataggatagggaaaatgtaacaagctggttgctcttgaggttagaaaattgtctgtttctctgtggatgaagctggatttacttgaaaatggagagttggcttattgtttgaatattgggacatcaagctatctatagccaagtttcagtcgcaaccagttttccctttgtctggggtaaattcgatacaaaatgattctttttgaatcctgaatccataaattacacttttttttttcaaattcacaaaattcacagtggtgctgactgtgtaataaccactattgggaaacatcccgtaaacctgcctgttgccatgccaatggagtgactgaactggtgacatctgtttgagcatgctttgtgtggctggtagaatgccaccgttgtgcatacactttgtacatcaggggtgaagggagggttttctagattattgggggagggtaaaattgggattttttggttgttccttttttgatggggtgtgggggtatagtactcagcttatgccctaaaataacatgtataaaaacccctgaagtattgtgtgggtgtgtacgtgtgagtgtgtgttggtatacgtctggcaattaaagcttggtcttctggaacttagtgaattcttttctcttttgcccaggctggattgcagtggtgcgaccttggctcactgaaacctccgcctcccgggttcaagcaattctcctgcctcagcctcacaagtagctgggactacaggcatgcgccaacatgctctgctattatatattttatttcccagtagagacaggtttcaccctgttggcaggctgtcttgactcttggctcattgat

SEQ ID NO: 390971 - DNA, 5367 bp, Homo sapiens
  misc_feature (36)..(36): n is a, c, g, or t
  misc_feature (38)..(38): n is a, c, g, or t
tagcaggagcttatcgctgggggggaactggaaagnantcacaggaagatagtgaggactcagaagacaaagatgtgaagaccaagaaggatgattctcactcagcagaggatagtgaagatgaaaaagaagatcataaaaatgtgcgccaacaacggcaggcggcatctaaagcagcttctaaacagagagagatgctcatggaagatgtgggcagtgaggaagaacaagaagaggaggatgaggcaccattccaggagaaagattccggcagcgatgaagatttcctaatggaagatgatgacgatagtgactatggcagttcgaaaaagaaaaacaaaaagatggttaagaagtccaaacctgaaagaaaagaaaagaaaatgcccaaacccagactaaaggctacagtgacgccaagtccagtgaaaggcaaagggaaagtgggtcgccccacagcttcaaaggcatcaaaggaaaagactccttctcccaaagaagaagatgaggaaccggaaagcccgccagaaaagaaaacatctacaagccccccacccgagaaatctggggatgaagggtctgaagatgaagccccttctggggaggattaaaagtgatgatggtctggggagagattttattaaaaaaaaaaagaaaaaaaaagaaaaaagagggaggaaaaaaaagaacctacttaagatagaacatggttttggctatggcttgactcatgggctttcagtgcttttttccatttgttgaaagtaacatttctctctctctctcttttttttttttttttttttaaagcaaaccattgtatgtgtaagtgtttaagttacctttttgtctattggtctctttgccagccctcccctttcccaatgaaagccatgtcaaattaatcactggattgactgcttcatctttttatttttaatgaaaggtgtaccacggttgtaaagcaataagatttgagatgaacactattgaaacttcgctttttgctaaaaaatagcaagttgaatagtaatcaaaaaacatagaaagattttagttcaaaatgattgctcctttctctacctggacttttaaaaaatcaattgtcatctaatatgagtttatttgtctatagacacaagtatcaatgtctaaaaaaaatcatgactttaaacttccaccgatgaggcaggtaggagataaagatgaattctgaactgttactaaaagtactcattttttaccttgtagggagggtgggcaatggggttacctgaccttatttgagggtatgggctttcttttttatttcatcacttgttatctcaaagagactcggagccagtgatccttttatcctgctacagtctttagggagctaaaaaaaaaaaaaaagcaggggctgccaaaactcttgatttcatatttccttctctaaatatatatgtatcctgttttttggataaaattttaccaagaatccaaaaaaaaaaaaaccctagaatttaatcaacaagatcagtctacaggtcacagtggatttcttttcaaactgacaatgtttaggttttaagcaaataaagttccagttaatgtgaaactcagtcacaaagagttgagatttttcctttatgaaatagaattgacattcttttatgctataaatgtgcattcaggtcccattaaccatgctctgcttttatttggggatagaacattttctttttcatatcccgatcttcccatttcttcatagaaatgtgataagaagtacatccctgtgatcctgctgcttcgtagagcaccactgcacaccctaccccgagtgccaaccacctctgctataggacactattttcctggccctattcttcacttacttcccatcctgtccttgactaggaatatgttaaatgctgctcccatacaattcagttagctcttgtctttttatttggtccaacccctgctttactgctcatgctgcttaaagcaggagggactagagaaacaaggcattttaggaggcctgtgtgcagttgaaaaccgacttttacacgccttataaaagcagtcaggagatagatccgtaggtttgatccttcacatctaataccaggcgctaatgggaacaaggtttaaagggtcctggtatgctaataaattgaaaaattagtgaaatttaaacttctgcctttttttcctgccttttaatctagatttgcttcctcaatatcctactttgtggtttactaggaacatgcttactctgatctttttttaaaaaacacacagtggcagagtcatttcactattgcactgtgtgttaaagaatgaataaggagttttcagttacatggccaaaaatacaggacttgaacataaatagcagttggatcattctctttcatgacggttaaattcagaggtgtgaactttgtaatgagggtgttaaagattaatctatttgcctaaatgggtttgttcaggtatccatttttaacaaagaagtttgtgttcatatagtaaaagacctatcagtgtttccaccatgcacttctattttttaggagtttataattttaagtcttacattcctagtaacatttgggcttttcttaggttatgtttcgtgaagatttggggggagggctcttttaaaacttcggcctcagttgtttaacagtctctttaatatattaatctgcactaacatctctgtgatatatgcacatattttagaggtaatcatgtcttctagattacttgtgtgcatttgattgggcttcttgtttagggtcccttttaaaattaattcattagattgaaaaatgtattctatatttctgatagactggacagaaggatctgtgtccccaagtgagacaggctctgaataacctttgttttctccactttttattgatgatttaaaacactctagtcttcccctcaaatcatgcatgcaaataggaggacagtggtggtgactcaactggatacaggtgctcaatagtcaggcttgatagtgatgtcaggacgcattacaagctgtaagccgatactgactggccattggcaccatccttgactaaccttcctctttttctctagtgtgcctatggtgaaatggcaatagcattcactgtcgtattttgcagtgctcaggaagtgggacgttaactttgaaggtgcttgtttgtattagctctgctaggtttacctctacaacgtagatttcagcagctatgctgactgacactacattctagttcttaagattttttttccagatccccccttccccagctagacatacgtagcatactttcatcttattcagtctttctgtaacctgctgctgcttttagtcctcctcacctcagatcggaatcaatggagtgggcccagaggatacattttaattccagtaatggtaggtagatttgtcctgctttctaaaacatctcctcatttcatatttccactccatattgattccataagggaaaattaatgggtgtttcctcctttagggaggtaatgcaaagagtgtggacatcttctaatcttgaggaacagtagttgatttcccttgaaggagcttacatattgactgttttcacaataacctgtttgccccagttcaatcctcattttaatacttaatttggtactggctcaaatagcattttcttacagataacaaatcaagagtgaaatttgaggttatactccagtaaagtttttaacacttgtgaatatggtcagctagactaaacttgactcttttttttaatggcttttttatctgtgaacattcagataagtggattttcaagtactggttggggatgggaatcgtgcttttctttaaacttcagtttacgagatgctttgagagcgttaggcaaaagcagaaataaatatcaggagcaacggggaaagctttataaaagatcatggtggccactgttgcagctttgaagaatgagtgctggcttgaacagttctttgcctgcatcattggtagctgcactgaaaggaaaaaactttcaccttaagaatttgaaaaggaagaaacctgggctctggtcttcatggcatttagactgagatgcttaaacagaacagaagtaatacgcatttcctgccataggatagggaaaatgtaacaagctggttgctcttgaggttagaaaattgtctgtttctctgtggatgaagctggatttacttgaaaatggagagttggcttattgtttgaatattgggacatcaagctatctatagccaagtttcagtcgcaaccagttttccctttgtctggggtaaattcgatacaaaatgattctttttgaatcctgaatccataaattacacttttttttttcaaattcacaaaattcacagtggtgctgactgtgtaataaccactattgggaaacatcccgtaaacctgcctgttgccatgccaatggagtgactgaactggtgacatctgtttgagcatgctttgtgtggctggtagaatgccaccgttgtgcatacactttgtacatcaggggtgaagggagggttttctagattattgggggagggtaaaattgggattttttggtatgcagatacatacagagactgggatatgtaaaaattaagtatcacaaaagaccatcacacgattctaccaatgcatgttgcatctgtaattcacgaacatggtcaacaaaatcatgttcacttcaaccccatttcatttaaattaaagaaaaaaaccttttaaataaagtggttacattcaaactttaacttccttagtaccatgctgcagatttcagcactgttaaggtattgcaagaatgcccaaccctctggtgtctgatcatgtatctagcaacattgcagtatgaagaaaagagatgccccggtctcagcccatggactagttaatacagtgaagcaggttcctgtcttttacccttcctgctcagaacataaaagattaaggactaaaatcaaggaagactgggagttttagagctggcaaaatgaagtctaaaagataaatcaaggcaaacaattactgagaacttggctgttgcttaacctggcaagtctaaaagcctttctttaaccttgtaggaattagatgcataaggtttgctgcaacatgttcatggtaaacaaactaagtagagctcttatttacaaatcttgtaacaaatacttctggaggaaaaagagaaaagaatcactaagtccagaagacaagcttaattgccagacgtatacaacacacatcacacgtaacaccacacatattcggggtttatactgtattttagggctagctgagtactatac

SEQ ID NO: 390972 - DNA, 5504 bp, Homo sapiens
tgcgtgtgcaggtgactctagagctcccccgctatttacaactatctagaaggtgattaaaagaccttgaaatccatgacgcaggaatgaatagcgtcatgtagagcctagttacgcatttactaaacgcagacgaaaatggaaagattaattgggagtggtaggatgaaacaattcacaggaagatcgtgaggactcagaagacaaagatgtgaagaccaagaaggatgattctcactcagcagaggatagtgaagatgaaaaagaagatcataaaaatgtgcgccaacaacggcaggcggcatctaaagcagcttctaaacagagagagatgctcatggaagatgtgggcagtgaggaagaacaagaagaggaggatgaggcaccattccaggagaaagattccggcagcgatgaagatttcctaatggaagatgatgacgatagtgactatggcagttcgaaaaagaaaaacaaaaagatggttaagaagtccaaacctgaaagaaaagaaaagaaaatgcccaaacccagactaaaggctacagtgacgccaagtccagtgaaaggcaaagggaaagtgggtcgccccacagcttcaaaggcatcaaaggaaaagactccttctcccaaagaagaagatgaggaaccggaaagcccgccagaaaagaaaacatctacaagccccccacccgagaaatctggggatgaagggtctgaagatgaagccccttctggggaggattaaaagtgatgatggtctggggagagattttattaaaaaaaaaaagaaaaaaaaagaaaaaagagggaggaaaaaaaagaacctacttaagatagaacatggttttggctatggcttgactcatgggctttcagtgcttttttccatttgttgaaagtaacatttctctctctctctcttttttttttttttttttttaaagcaaaccattgtatgtgtaagtgtttaagttacctttttgtctattggtctctttgccagccctcccctttcccaatgaaagccatgtcaaattaatcactggattgactgcttcatctttttatttttaatgaaaggtgtaccacggttgtaaagcaataagatttgagatgaacactattgaaacttcgctttttgctaaaaaatagcaagttgaatagtaatcaaaaaacatagaaagattttagttcaaaatgattgctcctttctctacctggacttttaaaaaatcaattgtcatctaatatgagtttatttgtctatagacacaagtatcaatgtctaaaaaaaatcatgactttaaacttccaccgatgaggcaggtaggagataaagatgaattctgaactgttactaaaagtactcattttttaccttgtagggagggtgggcaatggggttacctgaccttatttgagggtatgggctttcttttttatttcatcacttgttatctcaaagagactcggagccagtgatccttttatcctgctacagtctttagggagctaaaaaaaaaaaaaaagcaggggctgccaaaactcttgatttcatatttccttctctaaatatatatgtatcctgttttttggataaaattttaccaagaatccaaaaaaaaaaaaaccctagaatttaatcaacaagatcagtctacaggtcacagtggatttcttttcaaactgacaatgtttaggttttaagcaaataaagttccagttaatgtgaaactcagtcacaaagagttgagatttttcctttatgaaatagaattgacattcttttatgctataaatgtgcattcaggtcccattaaccatgctctgcttttatttggggatagaacattttctttttcatatcccgatcttcccatttcttcatagaaatgtgataagaagtacatccctgtgatcctgctgcttcgtagagcaccactgcacaccctaccccgagtgccaaccacctctgctataggacactattttcctggccctattcttcacttacttcccatcctgtccttgactaggaatatgttaaatgctgctcccatacaattcagttagctcttgtctttttatttggtccaacccctgctttactgctcatgctgcttaaagcaggagggactagagaaacaaggcattttaggaggcctgtgtgcagttgaaaaccgacttttacacgccttataaaagcagtcaggagatagatccgtaggtttgatccttcacatctaataccaggcgctaatgggaacaaggtttaaagggtcctggtatgctaataaattgaaaaattagtgaaatttaaacttctgcctttttttcctgccttttaatctagatttgcttcctcaatatcctactttgtggtttactaggaacatgcttactctgatctttttttaaaaaacacacagtggcagagtcatttcactattgcactgtgtgttaaagaatgaataaggagttttcagttacatggccaaaaatacaggacttgaacataaatagcagttggatcattctctttcatgacggttaaattcagaggtgtgaactttgtaatgagggtgttaaagattaatctatttgcctaaatgggtttgttcaggtatccatttttaacaaagaagtttgtgttcatatagtaaaagacctatcagtgtttccaccatgcacttctattttttaggagtttataattttaagtcttacattcctagtaacatttgggcttttcttaggttatgtttcgtgaagatttggggggagggctcttttaaaacttcggcctcagttgtttaacagtctctttaatatattaatctgcactaacatctctgtgatatatgcacatattttagaggtaatcatgtcttctagattacttgtgtgcatttgattgggcttcttgtttagggtcccttttaaaattaattcattagattgaaaaatgtattctatatttctgatagactggacagaaggatctgtgtccccaagtgagacaggctctgaataacctttgttttctccactttttattgatgatttaaaacactctagtcttcccctcaaatcatgcatgcaaataggaggacagtggtggtgactcaactggatacaggtgctcaatagtcaggcttgatagtgatgtcaggacgcattacaagctgtaagccgatactgactggccattggcaccatccttgactaaccttcctctttttctctagtgtgcctatggtgaaatggcaatagcattcactgtcgtattttgcagtgctcaggaagtgggacgttaactttgaaggtgcttgtttgtattagctctgctaggtttacctctacaacgtagatttcagcagctatgctgactgacactacattctagttcttaagattttttttccagatccccccttccccagctagacatacgtagcatactttcatcttattcagtctttctgtaacctgctgctgcttttagtcctcctcacctcagatcggaatcaatggagtgggcccagaggatacattttaattccagtaatggtaggtagatttgtcctgctttctaaaacatctcctcatttcatatttccactccatattgattccataagggaaaattaatgggtgtttcctcctttagggaggtaatgcaaagagtgtggacatcttctaatcttgaggaacagtagttgatttcccttgaaggagcttacatattgactgttttcacaataacctgtttgccccagttcaatcctcattttaatacttaatttggtactggctcaaatagcattttcttacagataacaaatcaagagtgaaatttgaggttatactccagtaaagtttttaacacttgtgaatatggtcagctagactaaacttgactcttttttttaatggcttttttatctgtgaacattcagataagtggattttcaagtactggttggggatgggaatcgtgcttttctttaaacttcagtttacgagatgctttgagagcgttaggcaaaagcagaaataaatatcaggagcaacggggaaagctttataaaagatcatggtggccactgttgcagctttgaagaatgagtgctggcttgaacagttctttgcctgcatcattggtagctgcactgaaaggaaaaaactttcaccttaagaatttgaaaaggaagaaacctgggctctggtcttcatggcatttagactgagatgcttaaacagaacagaagtaatacgcatttcctgccataggatagggaaaatgtaacaagctggttgctcttgaggttagaaaattgtctgtttctctgtggatgaagctggatttacttgaaaatggagagttggcttattgtttgaatattgggacatcaagctatctatagccaagtttcagtcgcaaccagttttccctttgtctggggtaaattcgatacaaaatgattctttttgaatcctgaatccataaattacacttttttttttcaaattcacaaaattcacagtggtgctgactgtgtaataaccactattgggaaacatcccgtaaacctgcctgttgccatgccaatggagtgactgaactggtgacatctgtttgagcatgctttgtgtggctggtagaatgccaccgttgtgcatacactttgtacatcaggggtgaagggagggttttctagattattgggggagggtaaaattgggattttttggtatgcagatacatacagagactgggatatgtaaaaattaagtatcacaaaagaccatcacacgattctaccaatgcatgttgcatctgtaattcacgaacatggtcaacaaaatcatgttcacttcaaccccatttcatttaaattaaagaaaaaaaccttttaaataaagtggttacattcaaactttaacttccttagtaccatgctgcagatttcagcactgttaaggtattgcaagaatgcccaaccctctggtgtctgatcatgtatctagcaacattgcagtatgaagaaaagagatgccccggtctcagcccatggactagttaatacagtgaagcaggttcctgtcttttacccttcctgctcagaacataaaagattaaggactaaaatcaaggaagactgggagttttagagctggcaaaatgaagtctaaaagataaatcaaggcaaacaattactgagaacttggctgttgcttaacctggcaagtctaaaagcctttctttaaccttgtaggaattagatgcataaggtttgctgcaacatgttcatggtaaacaaactaagtagagctcttatttacaaatcttgtaacaaatacttctggaggaaaaagagaaaagaatcactaagtccagaagacaagcttaattgccagacgtatacaacacacatcacacgtaacaccacacatattcggggtttatactgtattttagggctagctgagtactatac

SEQ ID NO: 390973 - DNA, 5449 bp, Homo sapiens
tgctccctctcgactaggcagactgaagcagtcagtagtactttgactagaagcaataattccttaattgcctgttgccctgctgccaagattctctctctgttctttgctacagctattaatgccaatcaacttaaggccatactgtgttaatgaaaatctagagtctctagatggataacgatcgagaaggatagtgaagatgaaaaagaagatcataaaaatgtgcgccaacaacggcaggcggcatctaaagcagcttctaaacagagagagatgctcatggaagatgtgggcagtgaggaagaacaagaagaggaggatgaggcaccattccaggagaaagattccggcagcgatgaagatttcctaatggaagatgatgacgatagtgactatggcagttcgaaaaagaaaaacaaaaagatggttaagaagtccaaacctgaaagaaaagaaaagaaaatgcccaaacccagactaaaggctacagtgacgccaagtccagtgaaaggcaaagggaaagtgggtcgccccacagcttcaaaggcatcaaaggaaaagactccttctcccaaagaagaagatgaggaaccggaaagcccgccagaaaagaaaacatctacaagccccccacccgagaaatctggggatgaagggtctgaagatgaagccccttctggggaggattaaaagtgatgatggtctggggagagattttattaaaaaaaaaaagaaaaaaaaagaaaaaagagggaggaaaaaaaagaacctacttaagatagaacatggttttggctatggcttgactcatgggctttcagtgcttttttccatttgttgaaagtaacatttctctctctctctcttttttttttttttttttttaaagcaaaccattgtatgtgtaagtgtttaagttacctttttgtctattggtctctttgccagccctcccctttcccaatgaaagccatgtcaaattaatcactggattgactgcttcatctttttatttttaatgaaaggtgtaccacggttgtaaagcaataagatttgagatgaacactattgaaacttcgctttttgctaaaaaatagcaagttgaatagtaatcaaaaaacatagaaagattttagttcaaaatgattgctcctttctctacctggacttttaaaaaatcaattgtcatctaatatgagtttatttgtctatagacacaagtatcaatgtctaaaaaaaatcatgactttaaacttccaccgatgaggcaggtaggagataaagatgaattctgaactgttactaaaagtactcattttttaccttgtagggagggtgggcaatggggttacctgaccttatttgagggtatgggctttcttttttatttcatcacttgttatctcaaagagactcggagccagtgatccttttatcctgctacagtctttagggagctaaaaaaaaaaaaaaagcaggggctgccaaaactcttgatttcatatttccttctctaaatatatatgtatcctgttttttggataaaattttaccaagaatccaaaaaaaaaaaaaccctagaatttaatcaacaagatcagtctacaggtcacagtggatttcttttcaaactgacaatgtttaggttttaagcaaataaagttccagttaatgtgaaactcagtcacaaagagttgagatttttcctttatgaaatagaattgacattcttttatgctataaatgtgcattcaggtcccattaaccatgctctgcttttatttggggatagaacattttctttttcatatcccgatcttcccatttcttcatagaaatgtgataagaagtacatccctgtgatcctgctgcttcgtagagcaccactgcacaccctaccccgagtgccaaccacctctgctataggacactattttcctggccctattcttcacttacttcccatcctgtccttgactaggaatatgttaaatgctgctcccatacaattcagttagctcttgtctttttatttggtccaacccctgctttactgctcatgctgcttaaagcaggagggactagagaaacaaggcattttaggaggcctgtgtgcagttgaaaaccgacttttacacgccttataaaagcagtcaggagatagatccgtaggtttgatccttcacatctaataccaggcgctaatgggaacaaggtttaaagggtcctggtatgctaataaattgaaaaattagtgaaatttaaacttctgcctttttttcctgccttttaatctagatttgcttcctcaatatcctactttgtggtttactaggaacatgcttactctgatctttttttaaaaaacacacagtggcagagtcatttcactattgcactgtgtgttaaagaatgaataaggagttttcagttacatggccaaaaatacaggacttgaacataaatagcagttggatcattctctttcatgacggttaaattcagaggtgtgaactttgtaatgagggtgttaaagattaatctatttgcctaaatgggtttgttcaggtatccatttttaacaaagaagtttgtgttcatatagtaaaagacctatcagtgtttccaccatgcacttctattttttaggagtttataattttaagtcttacattcctagtaacatttgggcttttcttaggttatgtttcgtgaagatttggggggagggctcttttaaaacttcggcctcagttgtttaacagtctctttaatatattaatctgcactaacatctctgtgatatatgcacatattttagaggtaatcatgtcttctagattacttgtgtgcatttgattgggcttcttgtttagggtcccttttaaaattaattcattagattgaaaaatgtattctatatttctgatagactggacagaaggatctgtgtccccaagtgagacaggctctgaataacctttgttttctccactttttattgatgatttaaaacactctagtcttcccctcaaatcatgcatgcaaataggaggacagtggtggtgactcaactggatacaggtgctcaatagtcaggcttgatagtgatgtcaggacgcattacaagctgtaagccgatactgactggccattggcaccatccttgactaaccttcctctttttctctagtgtgcctatggtgaaatggcaatagcattcactgtcgtattttgcagtgctcaggaagtgggacgttaactttgaaggtgcttgtttgtattagctctgctaggtttacctctacaacgtagatttcagcagctatgctgactgacactacattctagttcttaagattttttttccagatccccccttccccagctagacatacgtagcatactttcatcttattcagtctttctgtaacctgctgctgcttttagtcctcctcacctcagatcggaatcaatggagtgggcccagaggatacattttaattccagtaatggtaggtagatttgtcctgctttctaaaacatctcctcatttcatatttccactccatattgattccataagggaaaattaatgggtgtttcctcctttagggaggtaatgcaaagagtgtggacatcttctaatcttgaggaacagtagttgatttcccttgaaggagcttacatattgactgttttcacaataacctgtttgccccagttcaatcctcattttaatacttaatttggtactggctcaaatagcattttcttacagataacaaatcaagagtgaaatttgaggttatactccagtaaagtttttaacacttgtgaatatggtcagctagactaaacttgactcttttttttaatggcttttttatctgtgaacattcagataagtggattttcaagtactggttggggatgggaatcgtgcttttctttaaacttcagtttacgagatgctttgagagcgttaggcaaaagcagaaataaatatcaggagcaacggggaaagctttataaaagatcatggtggccactgttgcagctttgaagaatgagtgctggcttgaacagttctttgcctgcatcattggtagctgcactgaaaggaaaaaactttcaccttaagaatttgaaaaggaagaaacctgggctctggtcttcatggcatttagactgagatgcttaaacagaacagaagtaatacgcatttcctgccataggatagggaaaatgtaacaagctggttgctcttgaggttagaaaattgtctgtttctctgtggatgaagctggatttacttgaaaatggagagttggcttattgtttgaatattgggacatcaagctatctatagccaagtttcagtcgcaaccagttttccctttgtctggggtaaattcgatacaaaatgattctttttgaatcctgaatccataaattacacttttttttttcaaattcacaaaattcacagtggtgctgactgtgtaataaccactattgggaaacatcccgtaaacctgcctgttgccatgccaatggagtgactgaactggtgacatctgtttgagcatgctttgtgtggctggtagaatgccaccgttgtgcatacactttgtacatcaggggtgaagggagggttttctagattattgggggagggtaaaattgggattttttggtatgcagatacatacagagactgggatatgtaaaaattaagtatcacaaaagaccatcacacgattctaccaatgcatgttgcatctgtaattcacgaacatggtcaacaaaatcatgttcacttcaaccccatttcatttaaattaaagaaaaaaaccttttaaataaagtggttacattcaaactttaacttccttagtaccatgctgcagatttcagcactgttaaggtattgcaagaatgcccaaccctctggtgtctgatcatgtatctagcaacattgcagtatgaagaaaagagatgccccggtctcagcccatggactagttaatacagtgaagcaggttcctgtcttttacccttcctgctcagaacataaaagattaaggactaaaatcaaggaagactgggagttttagagctggcaaaatgaagtctaaaagataaatcaaggcaaacaattactgagaacttggctgttgcttaacctggcaagtctaaaagcctttctttaaccttgtaggaattagatgcataaggtttgctgcaacatgttcatggtaaacaaactaagtagagctcttatttacaaatcttgtaacaaatacttctggaggaaaaagagaaaagaatcactaagtccagaagacaagcttaattgccagacgtatacaacacacatcacacgtaacaccacacatattcggggtttatactgtattttagggctagctgagtactatac

SEQ ID NO: 390974 - DNA, 5390 bp, Homo sapiens
gatagtttcagtttttattcagattaactcttacccttcctgttttcaatctacttttcaaacacatcactcatgtaactctctcatgtaaggtgcatgcaaaatccatttgacaaatgaggccagtgatgactccagtcaaattggtagtacagctccaaatagaatccaagggtgtttgactcccaaatcccatcctctagtcattcttagcactctcttccttttttacttggaaggatgtgtacattaagttagatgttgaaattcttctttcttctcagaagattccggcagcgatgaagatttcctaatggaagatgatgacgatagtgactatggcagttcgaaaaagaaaaacaaaaagatggttaagaagtccaaacctgaaagaaaagaaaagaaaatgcccaaacccagactaaaggctacagtgacgccaagtccagtgaaaggcaaagggaaagtgggtcgccccacagcttcaaaggcatcaaaggaaaagactccttctcccaaagaagaagatgaggaaccggaaagcccgccagaaaagaaaacatctacaagccccccacccgagaaatctggggatgaagggtctgaagatgaagccccttctggggaggattaaaagtgatgatggtctggggagagattttattaaaaaaaaaaagaaaaaaaaagaaaaaagagggaggaaaaaaaagaacctacttaagatagaacatggttttggctatggcttgactcatgggctttcagtgcttttttccatttgttgaaagtaacatttctctctctctctcttttttttttttttttttttaaagcaaaccattgtatgtgtaagtgtttaagttacctttttgtctattggtctctttgccagccctcccctttcccaatgaaagccatgtcaaattaatcactggattgactgcttcatctttttatttttaatgaaaggtgtaccacggttgtaaagcaataagatttgagatgaacactattgaaacttcgctttttgctaaaaaatagcaagttgaatagtaatcaaaaaacatagaaagattttagttcaaaatgattgctcctttctctacctggacttttaaaaaatcaattgtcatctaatatgagtttatttgtctatagacacaagtatcaatgtctaaaaaaaatcatgactttaaacttccaccgatgaggcaggtaggagataaagatgaattctgaactgttactaaaagtactcattttttaccttgtagggagggtgggcaatggggttacctgaccttatttgagggtatgggctttcttttttatttcatcacttgttatctcaaagagactcggagccagtgatccttttatcctgctacagtctttagggagctaaaaaaaaaaaaaaagcaggggctgccaaaactcttgatttcatatttccttctctaaatatatatgtatcctgttttttggataaaattttaccaagaatccaaaaaaaaaaaaaccctagaatttaatcaacaagatcagtctacaggtcacagtggatttcttttcaaactgacaatgtttaggttttaagcaaataaagttccagttaatgtgaaactcagtcacaaagagttgagatttttcctttatgaaatagaattgacattcttttatgctataaatgtgcattcaggtcccattaaccatgctctgcttttatttggggatagaacattttctttttcatatcccgatcttcccatttcttcatagaaatgtgataagaagtacatccctgtgatcctgctgcttcgtagagcaccactgcacaccctaccccgagtgccaaccacctctgctataggacactattttcctggccctattcttcacttacttcccatcctgtccttgactaggaatatgttaaatgctgctcccatacaattcagttagctcttgtctttttatttggtccaacccctgctttactgctcatgctgcttaaagcaggagggactagagaaacaaggcattttaggaggcctgtgtgcagttgaaaaccgacttttacacgccttataaaagcagtcaggagatagatccgtaggtttgatccttcacatctaataccaggcgctaatgggaacaaggtttaaagggtcctggtatgctaataaattgaaaaattagtgaaatttaaacttctgcctttttttcctgccttttaatctagatttgcttcctcaatatcctactttgtggtttactaggaacatgcttactctgatctttttttaaaaaacacacagtggcagagtcatttcactattgcactgtgtgttaaagaatgaataaggagttttcagttacatggccaaaaatacaggacttgaacataaatagcagttggatcattctctttcatgacggttaaattcagaggtgtgaactttgtaatgagggtgttaaagattaatctatttgcctaaatgggtttgttcaggtatccatttttaacaaagaagtttgtgttcatatagtaaaagacctatcagtgtttccaccatgcacttctattttttaggagtttataattttaagtcttacattcctagtaacatttgggcttttcttaggttatgtttcgtgaagatttggggggagggctcttttaaaacttcggcctcagttgtttaacagtctctttaatatattaatctgcactaacatctctgtgatatatgcacatattttagaggtaatcatgtcttctagattacttgtgtgcatttgattgggcttcttgtttagggtcccttttaaaattaattcattagattgaaaaatgtattctatatttctgatagactggacagaaggatctgtgtccccaagtgagacaggctctgaataacctttgttttctccactttttattgatgatttaaaacactctagtcttcccctcaaatcatgcatgcaaataggaggacagtggtggtgactcaactggatacaggtgctcaatagtcaggcttgatagtgatgtcaggacgcattacaagctgtaagccgatactgactggccattggcaccatccttgactaaccttcctctttttctctagtgtgcctatggtgaaatggcaatagcattcactgtcgtattttgcagtgctcaggaagtgggacgttaactttgaaggtgcttgtttgtattagctctgctaggtttacctctacaacgtagatttcagcagctatgctgactgacactacattctagttcttaagattttttttccagatccccccttccccagctagacatacgtagcatactttcatcttattcagtctttctgtaacctgctgctgcttttagtcctcctcacctcagatcggaatcaatggagtgggcccagaggatacattttaattccagtaatggtaggtagatttgtcctgctttctaaaacatctcctcatttcatatttccactccatattgattccataagggaaaattaatgggtgtttcctcctttagggaggtaatgcaaagagtgtggacatcttctaatcttgaggaacagtagttgatttcccttgaaggagcttacatattgactgttttcacaataacctgtttgccccagttcaatcctcattttaatacttaatttggtactggctcaaatagcattttcttacagataacaaatcaagagtgaaatttgaggttatactccagtaaagtttttaacacttgtgaatatggtcagctagactaaacttgactcttttttttaatggcttttttatctgtgaacattcagataagtggattttcaagtactggttggggatgggaatcgtgcttttctttaaacttcagtttacgagatgctttgagagcgttaggcaaaagcagaaataaatatcaggagcaacggggaaagctttataaaagatcatggtggccactgttgcagctttgaagaatgagtgctggcttgaacagttctttgcctgcatcattggtagctgcactgaaaggaaaaaactttcaccttaagaatttgaaaaggaagaaacctgggctctggtcttcatggcatttagactgagatgcttaaacagaacagaagtaatacgcatttcctgccataggatagggaaaatgtaacaagctggttgctcttgaggttagaaaattgtctgtttctctgtggatgaagctggatttacttgaaaatggagagttggcttattgtttgaatattgggacatcaagctatctatagccaagtttcagtcgcaaccagttttccctttgtctggggtaaattcgatacaaaatgattctttttgaatcctgaatccataaattacacttttttttttcaaattcacaaaattcacagtggtgctgactgtgtaataaccactattgggaaacatcccgtaaacctgcctgttgccatgccaatggagtgactgaactggtgacatctgtttgagcatgctttgtgtggctggtagaatgccaccgttgtgcatacactttgtacatcaggggtgaagggagggttttctagattattgggggagggtaaaattgggattttttggtatgcagatacatacagagactgggatatgtaaaaattaagtatcacaaaagaccatcacacgattctaccaatgcatgttgcatctgtaattcacgaacatggtcaacaaaatcatgttcacttcaaccccatttcatttaaattaaagaaaaaaaccttttaaataaagtggttacattcaaactttaacttccttagtaccatgctgcagatttcagcactgttaaggtattgcaagaatgcccaaccctctggtgtctgatcatgtatctagcaacattgcagtatgaagaaaagagatgccccggtctcagcccatggactagttaatacagtgaagcaggttcctgtcttttacccttcctgctcagaacataaaagattaaggactaaaatcaaggaagactgggagttttagagctggcaaaatgaagtctaaaagataaatcaaggcaaacaattactgagaacttggctgttgcttaacctggcaagtctaaaagcctttctttaaccttgtaggaattagatgcataaggtttgctgcaacatgttcatggtaaacaaactaagtagagctcttatttacaaatcttgtaacaaatacttctggaggaaaaagagaaaagaatcactaagtccagaagacaagcttaattgccagacgtatacaacacacatcacacgtaacaccacacatattcggggtttatactgtattttagggctagctgagtactatac

SEQ ID NO: 390975 - DNA, 5267 bp, Homo sapiens
  misc_feature (144)..(144): n is a, c, g, or t
cagctccagcttcagtgtttatccaaatactaaagaaaaaagtagaggttgtctttttcgatggcaaatcggacccttgcaggctgagggagagaaagctacatcacacacagaggtggggtgctcccgaggggctgtgggtcntaggtggaccgcctgcccggcttgcacgcgctcctcgtgttaggacccggaagatgatgacgatagtgactatggcagttcgaaaaagaaaaacaaaaagatggttaagaagtccaaacctgaaagaaaagaaaagaaaatgcccaaacccagactaaaggctacagtgacgccaagtccagtgaaaggcaaagggaaagtgggtcgccccacagcttcaaaggcatcaaaggaaaagactccttctcccaaagaagaagatgaggaaccggaaagcccgccagaaaagaaaacatctacaagccccccacccgagaaatctggggatgaagggtctgaagatgaagccccttctggggaggattaaaagtgatgatggtctggggagagattttattaaaaaaaaaaagaaaaaaaaagaaaaaagagggaggaaaaaaaagaacctacttaagatagaacatggttttggctatggcttgactcatgggctttcagtgcttttttccatttgttgaaagtaacatttctctctctctctcttttttttttttttttttttaaagcaaaccattgtatgtgtaagtgtttaagttacctttttgtctattggtctctttgccagccctcccctttcccaatgaaagccatgtcaaattaatcactggattgactgcttcatctttttatttttaatgaaaggtgtaccacggttgtaaagcaataagatttgagatgaacactattgaaacttcgctttttgctaaaaaatagcaagttgaatagtaatcaaaaaacatagaaagattttagttcaaaatgattgctcctttctctacctggacttttaaaaaatcaattgtcatctaatatgagtttatttgtctatagacacaagtatcaatgtctaaaaaaaatcatgactttaaacttccaccgatgaggcaggtaggagataaagatgaattctgaactgttactaaaagtactcattttttaccttgtagggagggtgggcaatggggttacctgaccttatttgagggtatgggctttcttttttatttcatcacttgttatctcaaagagactcggagccagtgatccttttatcctgctacagtctttagggagctaaaaaaaaaaaaaaagcaggggctgccaaaactcttgatttcatatttccttctctaaatatatatgtatcctgttttttggataaaattttaccaagaatccaaaaaaaaaaaaaccctagaatttaatcaacaagatcagtctacaggtcacagtggatttcttttcaaactgacaatgtttaggttttaagcaaataaagttccagttaatgtgaaactcagtcacaaagagttgagatttttcctttatgaaatagaattgacattcttttatgctataaatgtgcattcaggtcccattaaccatgctctgcttttatttggggatagaacattttctttttcatatcccgatcttcccatttcttcatagaaatgtgataagaagtacatccctgtgatcctgctgcttcgtagagcaccactgcacaccctaccccgagtgccaaccacctctgctataggacactattttcctggccctattcttcacttacttcccatcctgtccttgactaggaatatgttaaatgctgctcccatacaattcagttagctcttgtctttttatttggtccaacccctgctttactgctcatgctgcttaaagcaggagggactagagaaacaaggcattttaggaggcctgtgtgcagttgaaaaccgacttttacacgccttataaaagcagtcaggagatagatccgtaggtttgatccttcacatctaataccaggcgctaatgggaacaaggtttaaagggtcctggtatgctaataaattgaaaaattagtgaaatttaaacttctgcctttttttcctgccttttaatctagatttgcttcctcaatatcctactttgtggtttactaggaacatgcttactctgatctttttttaaaaaacacacagtggcagagtcatttcactattgcactgtgtgttaaagaatgaataaggagttttcagttacatggccaaaaatacaggacttgaacataaatagcagttggatcattctctttcatgacggttaaattcagaggtgtgaactttgtaatgagggtgttaaagattaatctatttgcctaaatgggtttgttcaggtatccatttttaacaaagaagtttgtgttcatatagtaaaagacctatcagtgtttccaccatgcacttctattttttaggagtttataattttaagtcttacattcctagtaacatttgggcttttcttaggttatgtttcgtgaagatttggggggagggctcttttaaaacttcggcctcagttgtttaacagtctctttaatatattaatctgcactaacatctctgtgatatatgcacatattttagaggtaatcatgtcttctagattacttgtgtgcatttgattgggcttcttgtttagggtcccttttaaaattaattcattagattgaaaaatgtattctatatttctgatagactggacagaaggatctgtgtccccaagtgagacaggctctgaataacctttgttttctccactttttattgatgatttaaaacactctagtcttcccctcaaatcatgcatgcaaataggaggacagtggtggtgactcaactggatacaggtgctcaatagtcaggcttgatagtgatgtcaggacgcattacaagctgtaagccgatactgactggccattggcaccatccttgactaaccttcctctttttctctagtgtgcctatggtgaaatggcaatagcattcactgtcgtattttgcagtgctcaggaagtgggacgttaactttgaaggtgcttgtttgtattagctctgctaggtttacctctacaacgtagatttcagcagctatgctgactgacactacattctagttcttaagattttttttccagatccccccttccccagctagacatacgtagcatactttcatcttattcagtctttctgtaacctgctgctgcttttagtcctcctcacctcagatcggaatcaatggagtgggcccagaggatacattttaattccagtaatggtaggtagatttgtcctgctttctaaaacatctcctcatttcatatttccactccatattgattccataagggaaaattaatgggtgtttcctcctttagggaggtaatgcaaagagtgtggacatcttctaatcttgaggaacagtagttgatttcccttgaaggagcttacatattgactgttttcacaataacctgtttgccccagttcaatcctcattttaatacttaatttggtactggctcaaatagcattttcttacagataacaaatcaagagtgaaatttgaggttatactccagtaaagtttttaacacttgtgaatatggtcagctagactaaacttgactcttttttttaatggcttttttatctgtgaacattcagataagtggattttcaagtactggttggggatgggaatcgtgcttttctttaaacttcagtttacgagatgctttgagagcgttaggcaaaagcagaaataaatatcaggagcaacggggaaagctttataaaagatcatggtggccactgttgcagctttgaagaatgagtgctggcttgaacagttctttgcctgcatcattggtagctgcactgaaaggaaaaaactttcaccttaagaatttgaaaaggaagaaacctgggctctggtcttcatggcatttagactgagatgcttaaacagaacagaagtaatacgcatttcctgccataggatagggaaaatgtaacaagctggttgctcttgaggttagaaaattgtctgtttctctgtggatgaagctggatttacttgaaaatggagagttggcttattgtttgaatattgggacatcaagctatctatagccaagtttcagtcgcaaccagttttccctttgtctggggtaaattcgatacaaaatgattctttttgaatcctgaatccataaattacacttttttttttcaaattcacaaaattcacagtggtgctgactgtgtaataaccactattgggaaacatcccgtaaacctgcctgttgccatgccaatggagtgactgaactggtgacatctgtttgagcatgctttgtgtggctggtagaatgccaccgttgtgcatacactttgtacatcaggggtgaagggagggttttctagattattgggggagggtaaaattgggattttttggtatgcagatacatacagagactgggatatgtaaaaattaagtatcacaaaagaccatcacacgattctaccaatgcatgttgcatctgtaattcacgaacatggtcaacaaaatcatgttcacttcaaccccatttcatttaaattaaagaaaaaaaccttttaaataaagtggttacattcaaactttaacttccttagtaccatgctgcagatttcagcactgttaaggtattgcaagaatgcccaaccctctggtgtctgatcatgtatctagcaacattgcagtatgaagaaaagagatgccccggtctcagcccatggactagttaatacagtgaagcaggttcctgtcttttacccttcctgctcagaacataaaagattaaggactaaaatcaaggaagactgggagttttagagctggcaaaatgaagtctaaaagataaatcaaggcaaacaattactgagaacttggctgttgcttaacctggcaagtctaaaagcctttctttaaccttgtaggaattagatgcataaggtttgctgcaacatgttcatggtaaacaaactaagtagagctcttatttacaaatcttgtaacaaatacttctggaggaaaaagagaaaagaatcactaagtccagaagacaagcttaattgccagacgtatacaacacacatcacacgtaacaccacacatattcggggtttatactgtattttagggctagctgagtactatac

SEQ ID NO: 390976 - DNA, 5148 bp, Homo sapiens
tcaaagcatcactccccgatggcagctggcgacagcggtggcgagaggatgaacaacaagttcgacgctttgaaagatgatgacatgtggggaccatgatcagaatgaagaaaacagctaacaagatggttaagaagtccaaacctgaaagaaaagaaaagaaaatgcccaaacccagactaaaggctacagtgacgccaagtccagtgaaaggcaaagggaaagtgggtcgccccacagcttcaaaggcatcaaaggaaaagactccttctcccaaagaagaagatgaggaaccggaaagcccgccagaaaagaaaacatctacaagccccccacccgagaaatctggggatgaagggtctgaagatgaagccccttctggggaggattaaaagtgatgatggtctggggagagattttattaaaaaaaaaaagaaaaaaaaagaaaaaagagggaggaaaaaaaagaacctacttaagatagaacatggttttggctatggcttgactcatgggctttcagtgcttttttccatttgttgaaagtaacatttctctctctctctcttttttttttttttttttttaaagcaaaccattgtatgtgtaagtgtttaagttacctttttgtctattggtctctttgccagccctcccctttcccaatgaaagccatgtcaaattaatcactggattgactgcttcatctttttatttttaatgaaaggtgtaccacggttgtaaagcaataagatttgagatgaacactattgaaacttcgctttttgctaaaaaatagcaagttgaatagtaatcaaaaaacatagaaagattttagttcaaaatgattgctcctttctctacctggacttttaaaaaatcaattgtcatctaatatgagtttatttgtctatagacacaagtatcaatgtctaaaaaaaatcatgactttaaacttccaccgatgaggcaggtaggagataaagatgaattctgaactgttactaaaagtactcattttttaccttgtagggagggtgggcaatggggttacctgaccttatttgagggtatgggctttcttttttatttcatcacttgttatctcaaagagactcggagccagtgatccttttatcctgctacagtctttagggagctaaaaaaaaaaaaaaagcaggggctgccaaaactcttgatttcatatttccttctctaaatatatatgtatcctgttttttggataaaattttaccaagaatccaaaaaaaaaaaaaccctagaatttaatcaacaagatcagtctacaggtcacagtggatttcttttcaaactgacaatgtttaggttttaagcaaataaagttccagttaatgtgaaactcagtcacaaagagttgagatttttcctttatgaaatagaattgacattcttttatgctataaatgtgcattcaggtcccattaaccatgctctgcttttatttggggatagaacattttctttttcatatcccgatcttcccatttcttcatagaaatgtgataagaagtacatccctgtgatcctgctgcttcgtagagcaccactgcacaccctaccccgagtgccaaccacctctgctataggacactattttcctggccctattcttcacttacttcccatcctgtccttgactaggaatatgttaaatgctgctcccatacaattcagttagctcttgtctttttatttggtccaacccctgctttactgctcatgctgcttaaagcaggagggactagagaaacaaggcattttaggaggcctgtgtgcagttgaaaaccgacttttacacgccttataaaagcagtcaggagatagatccgtaggtttgatccttcacatctaataccaggcgctaatgggaacaaggtttaaagggtcctggtatgctaataaattgaaaaattagtgaaatttaaacttctgcctttttttcctgccttttaatctagatttgcttcctcaatatcctactttgtggtttactaggaacatgcttactctgatctttttttaaaaaacacacagtggcagagtcatttcactattgcactgtgtgttaaagaatgaataaggagttttcagttacatggccaaaaatacaggacttgaacataaatagcagttggatcattctctttcatgacggttaaattcagaggtgtgaactttgtaatgagggtgttaaagattaatctatttgcctaaatgggtttgttcaggtatccatttttaacaaagaagtttgtgttcatatagtaaaagacctatcagtgtttccaccatgcacttctattttttaggagtttataattttaagtcttacattcctagtaacatttgggcttttcttaggttatgtttcgtgaagatttggggggagggctcttttaaaacttcggcctcagttgtttaacagtctctttaatatattaatctgcactaacatctctgtgatatatgcacatattttagaggtaatcatgtcttctagattacttgtgtgcatttgattgggcttcttgtttagggtcccttttaaaattaattcattagattgaaaaatgtattctatatttctgatagactggacagaaggatctgtgtccccaagtgagacaggctctgaataacctttgttttctccactttttattgatgatttaaaacactctagtcttcccctcaaatcatgcatgcaaataggaggacagtggtggtgactcaactggatacaggtgctcaatagtcaggcttgatagtgatgtcaggacgcattacaagctgtaagccgatactgactggccattggcaccatccttgactaaccttcctctttttctctagtgtgcctatggtgaaatggcaatagcattcactgtcgtattttgcagtgctcaggaagtgggacgttaactttgaaggtgcttgtttgtattagctctgctaggtttacctctacaacgtagatttcagcagctatgctgactgacactacattctagttcttaagattttttttccagatccccccttccccagctagacatacgtagcatactttcatcttattcagtctttctgtaacctgctgctgcttttagtcctcctcacctcagatcggaatcaatggagtgggcccagaggatacattttaattccagtaatggtaggtagatttgtcctgctttctaaaacatctcctcatttcatatttccactccatattgattccataagggaaaattaatgggtgtttcctcctttagggaggtaatgcaaagagtgtggacatcttctaatcttgaggaacagtagttgatttcccttgaaggagcttacatattgactgttttcacaataacctgtttgccccagttcaatcctcattttaatacttaatttggtactggctcaaatagcattttcttacagataacaaatcaagagtgaaatttgaggttatactccagtaaagtttttaacacttgtgaatatggtcagctagactaaacttgactcttttttttaatggcttttttatctgtgaacattcagataagtggattttcaagtactggttggggatgggaatcgtgcttttctttaaacttcagtttacgagatgctttgagagcgttaggcaaaagcagaaataaatatcaggagcaacggggaaagctttataaaagatcatggtggccactgttgcagctttgaagaatgagtgctggcttgaacagttctttgcctgcatcattggtagctgcactgaaaggaaaaaactttcaccttaagaatttgaaaaggaagaaacctgggctctggtcttcatggcatttagactgagatgcttaaacagaacagaagtaatacgcatttcctgccataggatagggaaaatgtaacaagctggttgctcttgaggttagaaaattgtctgtttctctgtggatgaagctggatttacttgaaaatggagagttggcttattgtttgaatattgggacatcaagctatctatagccaagtttcagtcgcaaccagttttccctttgtctggggtaaattcgatacaaaatgattctttttgaatcctgaatccataaattacacttttttttttcaaattcacaaaattcacagtggtgctgactgtgtaataaccactattgggaaacatcccgtaaacctgcctgttgccatgccaatggagtgactgaactggtgacatctgtttgagcatgctttgtgtggctggtagaatgccaccgttgtgcatacactttgtacatcaggggtgaagggagggttttctagattattgggggagggtaaaattgggattttttggtatgcagatacatacagagactgggatatgtaaaaattaagtatcacaaaagaccatcacacgattctaccaatgcatgttgcatctgtaattcacgaacatggtcaacaaaatcatgttcacttcaaccccatttcatttaaattaaagaaaaaaaccttttaaataaagtggttacattcaaactttaacttccttagtaccatgctgcagatttcagcactgttaaggtattgcaagaatgcccaaccctctggtgtctgatcatgtatctagcaacattgcagtatgaagaaaagagatgccccggtctcagcccatggactagttaatacagtgaagcaggttcctgtcttttacccttcctgctcagaacataaaagattaaggactaaaatcaaggaagactgggagttttagagctggcaaaatgaagtctaaaagataaatcaaggcaaacaattactgagaacttggctgttgcttaacctggcaagtctaaaagcctttctttaaccttgtaggaattagatgcataaggtttgctgcaacatgttcatggtaaacaaactaagtagagctcttatttacaaatcttgtaacaaatacttctggaggaaaaagagaaaagaatcactaagtccagaagacaagcttaattgccagacgtatacaacacacatcacacgtaacaccacacatattcggggtttatactgtattttagggctagctgagtactatac

SEQ ID NO: 390977 - DNA, 4433 bp, Homo sapiens
cggctggtttgattcatccattttgaagagacgggggagcggggggctcgtctgttccaggagccctgaaccaaagagcagcggagtttgagaagccagcagctcggggttcggcagcagcggtcccatcggctgaagttcggggggggtggggcgccgagcgcgcggggtggggggggtcctggtctttggcttctcgactcggtcctgtttcgacagcgaacatgtcgcggcctgtcagaaataggaaggttgttgattactcacagtttcaggaatctgatgatgcagatgaagattatggaagagattcgggccctcccactaagaaaattcgatcatctccccgagaagctaaaaataagaggcgatctggaaagaattcacaggaagatagtgaggactcagaagacaaagatgtgaagaccaagaaggatgattctcactcagcagaggatagtgaagatgaaaaagaagatcataaaaatgtgcgccaacaacggcaggcggcatctaaagcagcttctaaacagagagagatgctcatggaagatgtgggcagtgaggaagaacaagaagaggaggatgaggcaccattccaggagaaagattccggcagcgatgaagatttcctaatggaagatgatgacgatagtgactatggcagttcgaaaaagaaaaacaaaaagatggttaagaagtccaaacctgaaagaaaagaaaagaaaatgcccaaacccagactaaaggctacagtgacgccaagtccagtgaaaggcaaagggaaagtgggtcgccccacagcttcaaaggcatcaaaggaaaagactccttctcccaaagaagaagatgaggaaccggaaagcccgccagaaaagaaaacatctacaagccccccacccgagaaatctggggatgaagggtctgaagatgaagccccttctggggaggattaaaagtgatgatggtctggggagagattttattaaaaaaaaaaagaaaaaaaaagaaaaaagagggaggaaaaaaaagaacctacttaagatagaacatggttttggctatggcttgactcatgggctttcagtgcttttttccatttgttgaaagtaacatttctctctctctctcttttttttttttttttttttaaagcaaaccattgtatgtgtaagtgtttaagttacctttttgtctattggtctctttgccagccctcccctttcccaatgaaagccatgtcaaattaatcactggattgactgcttcatctttttatttttaatgaaaggtgtaccacggttgtaaagcaataagatttgagatgaacactattgaaacttcgctttttgctaaaaaatagcaagttgaatagtaatcaaaaaacatagaaagattttagttcaaaatgattgctcctttctctacctggacttttaaaaaatcaattgtcatctaatatgagtttatttgtctatagacacaagtatcaatgtctaaaaaaaatcatgactttaaacttccaccgatgaggcaggtaggagataaagatgaattctgaactgttactaaaagtactcattttttaccttgtagggagggtgggcaatggggttacctgaccttatttgagggtatgggctttcttttttatttcatcacttgttatctcaaagagactcggagccagtgatccttttatcctgctacagtctttagggagctaaaaaaaaaaaaaaagcaggggctgccaaaactcttgatttcatatttccttctctaaatatatatgtatcctgttttttggataaaattttaccaagaatccaaaaaaaaaaaaaccctagaatttaatcaacaagatcagtctacaggtcacagtggatttcttttcaaactgacaatgtttaggttttaagcaaataaagttccagttaatgtgaaactcagtcacaaagagttgagatttttcctttatgaaatagaattgacattcttttatgctataaatgtgcattcaggtcccattaaccatgctctgcttttatttggggatagaacattttctttttcatatcccgatcttcccatttcttcatagaaatgtgataagaagtacatccctgtgatcctgctgcttcgtagagcaccactgcacaccctaccccgagtgccaaccacctctgctataggacactattttcctggccctattcttcacttacttcccatcctgtccttgactaggaatatgttaaatgctgctcccatacaattcagttagctcttgtctttttatttggtccaacccctgctttactgctcatgctgcttaaagcaggagggactagagaaacaaggcattttaggaggcctgtgtgcagttgaaaaccgacttttacacgccttataaaagcagtcaggagatagatccgtaggtttgatccttcacatctaataccaggcgctaatgggaacaaggtttaaagggtcctggtatgctaataaattgaaaaattagtgaaatttaaacttctgcctttttttcctgccttttaatctagatttgcttcctcaatatcctactttgtggtttactaggaacatgcttactctgatctttttttaaaaaacacacagtggcagagtcatttcactattgcactgtgtgttaaagaatgaataaggagttttcagttacatggccaaaaatacaggacttgaacataaatagcagttggatcattctctttcatgacggttaaattcagaggtgtgaactttgtaatgagggtgttaaagattaatctatttgcctaaatgggtttgttcaggtatccatttttaacaaagaagtttgtgttcatatagtaaaagacctatcagtgtttccaccatgcacttctattttttaggagtttataattttaagtcttacattcctagtaacatttgggcttttcttaggttatgtttcgtgaagatttggggggagggctcttttaaaacttcggcctcagttgtttaacagtctctttaatatattaatctgcactaacatctctgtgatatatgcacatattttagaggtaatcatgtcttctagattacttgtgtgcatttgattgggcttcttgtttagggtcccttttaaaattaattcattagattgaaaaatgtattctatatttctgatagactggacagaaggatctgtgtccccaagtgagacaggctctgaataacctttgttttctccactttttattgatgatttaaaacactctagtcttcccctcaaatcatgcatgcaaataggaggacagtggtggtgactcaactggatacaggtgctcaatagtcaggcttgatagtgatgtcaggacgcattacaagctgtaagccgatactgactggccattggcaccatccttgactaaccttcctctttttctctagtgtgcctatggtgaaatggcaatagcattcactgtcgtattttgcagtgctcaggaagtgggacgttaactttgaaggtgcttgtttgtattagctctgctaggtttacctctacaacgtagatttcagcagctatgctgactgacactacattctagttcttaagattttttttccagatccccccttccccagctagacatacgtagcatactttcatcttattcagtctttctgtaacctgctgctgcttttagtcctcctcacctcagatcggaatcaatggagtgggcccagaggatacattttaattccagtaatggtaggtagatttgtcctgctttctaaaacatctcctcatttcatatttccactccatattgattccataagggaaaattaatgggtgtttcctcctttagggaggtaatgcaaagagtgtggacatcttctaatcttgaggaacagtagttgatttcccttgaaggagcttacatattgactgttttcacaataacctgtttgccccagttcaatcctcattttaatacttaatttggtactggctcaaatagcattttcttacagataacaaatcaagagtgaaatttgaggttatactccagtaaagtttttaacacttgtgaatatggtcagctagactaaacttgactcttttttttaatggcttttttatctgtgaacattcagataagtggattttcaagtactggttggggatgggaatcgtgcttttctttaaacttcagtttacgagatgctttgagagcgttaggcaaaagcagaaataaatatcaggagcaacggggaaagctttataaaagatcatggtggccactgttgcagctttgaagaatgagtgctggcttgaacagttctttgcctgcatcattggtagctgcactgggaaggcatttagactgagatgcttaaccagacacgttatcgctttt

SEQ ID NO: 390978 - DNA, 4111 bp, Homo sapiens
taaaattcgcggccgcgtcgacagtatttgagggtatgggctttcttttttatttcatcacttgttatctcaaagagactcggagccagtgatccttttatcctgctacagtctttagggagctaaaaaaaaaaaaaaagcaggggctgccaaaactcttgatttcatatttccttctctaaatatatatgtatcctgttttttggataaaattttaccaagaatccaaaaaaaaaaaaaccctagaatttaatcaacaagatcagtctacaggtcacagtggatttcttttcaaactgacaatgtttaggttttaagcaaataaagttccagttaatgtgaaactcagtcacaaagagttgagatttttcctttatgaaatagaattgacattcttttatgctataaatgtgcattcaggtcccattaaccatgctctgcttttatttggggatagaacattttctttttcatatcccgatcttcccatttcttcatagaaatgtgataagaagtacatccctgtgatcctgctgcttcgtagagcaccactgcacaccctaccccgagtgccaaccacctctgctataggacactattttcctggccctattcttcacttacttcccatcctgtccttgactaggaatatgttaaatgctgctcccatacaattcagttagctcttgtctttttatttggtccaacccctgctttactgctcatgctgcttaaagcaggagggactagagaaacaaggcattttaggaggcctgtgtgcagttgaaaaccgacttttacacgccttataaaagcagtcaggagatagatccgtaggtttgatccttcacatctaataccaggcgctaatgggaacaaggtttaaagggtcctggtatgctaataaattgaaaaattagtgaaatttaaacttctgcctttttttcctgccttttaatctagatttgcttcctcaatatcctactttgtggtttactaggaacatgcttactctgatctttttttaaaaaacacacagtggcagagtcatttcactattgcactgtgtgttaaagaatgaataaggagttttcagttacatggccaaaaatacaggacttgaacataaatagcagttggatcattctctttcatgacggttaaattcagaggtgtgaactttgtaatgagggtgttaaagattaatctatttgcctaaatgggtttgttcaggtatccatttttaacaaagaagtttgtgttcatatagtaaaagacctatcagtgtttccaccatgcacttctattttttaggagtttataattttaagtcttacattcctagtaacatttgggcttttcttaggttatgtttcgtgaagatttggggggagggctcttttaaaacttcggcctcagttgtttaacagtctctttaatatattaatctgcactaacatctctgtgatatatgcacatattttagaggtaatcatgtcttctagattacttgtgtgcatttgattgggcttcttgtttagggtcccttttaaaattaattcattagattgaaaaatgtattctatatttctgatagactggacagaaggatctgtgtccccaagtgagacaggctctgaataacctttgttttctccactttttattgatgatttaaaacactctagtcttcccctcaaatcatgcatgcaaataggaggacagtggtggtgactcaactggatacaggtgctcaatagtcaggcttgatagtgatgtcaggacgcattacaagctgtaagccgatactgactggccattggcaccatccttgactaaccttcctctttttctctagtgtgcctatggtgaaatggcaatagcattcactgtcgtattttgcagtgctcaggaagtgggacgttaactttgaaggtgcttgtttgtattagctctgctaggtttacctctacaacgtagatttcagcagctatgctgactgacactacattctagttcttaagattttttttccagatccccccttccccagctagacatacgtagcatactttcatcttattcagtctttctgtaacctgctgctgcttttagtcctcctcacctcagatcggaatcaatggagtgggcccagaggatacattttaattccagtaatggtaggtagatttgtcctgctttctaaaacatctcctcatttcatatttccactccatattgattccataagggaaaattaatgggtgtttcctcctttagggaggtaatgcaaagagtgtggacatcttctaatcttgaggaacagtagttgatttcccttgaaggagcttacatattgactgttttcacaataacctgtttgccccagttcaatcctcattttaatacttaatttggtactggctcaaatagcattttcttacagataacaaatcaagagtgaaatttgaggttatactccagtaaagtttttaacacttgtgaatatggtcagctagactaaacttgactcttttttttaatggcttttttatctgtgaacattcagataagtggattttcaagtactggttggggatgggaatcgtgcttttctttaaacttcagtttacgagatgctttgagagcgttaggcaaaagcagaaataaatatcaggagcaacggggaaagctttataaaagatcatggtggccactgttgcagctttgaagaatgagtgctggcttgaacagttctttgcctgcatcattggtagctgcactgaaaggaaaaaactttcaccttaagaatttgaaaaggaagaaacctgggctctggtcttcatggcatttagactgagatgcttaaacagaacagaagtaatacgcatttcctgccataggatagggaaaatgtaacaagctggttgctcttgaggttagaaaattgtctgtttctctgtggatgaagctggatttacttgaaaatggagagttggcttattgtttgaatattgggacatcaagctatctatagccaagtttcagtcgcaaccagttttccctttgtctggggtaaattcgatacaaaatgattctttttgaatcctgaatccataaattacacttttttttttcaaattcacaaaattcacagtggtgctgactgtgtaataaccactattgggaaacatcccgtaaacctgcctgttgccatgccaatggagtgactgaactggtgacatctgtttgagcatgctttgtgtggctggtagaatgccaccgttgtgcatacactttgtacatcaggggtgaagggagggttttctagattattgggggagggtaaaattgggattttttggtatgcagatacatacagagactgggatatgtaaaaattaagtatcacaaaagaccatcacacgattctaccaatgcatgttgcatctgtaattcacgaacatggtcaacaaaatcatgttcacttcaaccccatttcatttaaattaaagaaaaaaaccttttaaataaagtggttacattcaaactttaacttccttagtaccatgctgcagatttcagcactgttaaggtattgcaagaatgcccaaccctctggtgtctgatcatgtatctagcaacattgcagtatgaagaaaagagatgccccggtctcagcccatggactagttaatacagtgaagcaggttcctgtcttttacccttcctgctcagaacataaaagattaaggactaaaatcaaggaagactgggagttttagagctggcaaaatgaagtctaaaagataaatcaaggcaaacaattactgagaacttggctgttgcttaacctggcaagtctaaaagcctttctttaaccttgtaggaattagatgcataaggtttgctgcaacatgttcatggtaaacaaactaagtagagctcttatttacaaatcttgtaacaaatacttctggaggaaaaagagaaaagaatcactaagtccagaagacaagcttaattgccagacgtatacaacacacatcacacgtaacaccacacatattcggggtttatactgtattttagggctagctgagtactatac

SEQ ID NO: 390979 - DNA, 3751 bp, Homo sapiens
ataaaagaatgtcaattctattatgctataaaagcagagcatggttaatgggacctgaatgtcccattaaccatgctctgcttttatttggggatagaacattttctttttcatatcccgatcttcccatttcttcatagaaatgtgataagaagtacatccctgtgatcctgctgcttcgtagagcaccactgcacaccctaccccgagtgccaaccacctctgctataggacactattttcctggccctattcttcacttacttcccatcctgtccttgactaggaatatgttaaatgctgctcccatacaattcagttagctcttgtctttttatttggtccaacccctgctttactgctcatgctgcttaaagcaggagggactagagaaacaaggcattttaggaggcctgtgtgcagttgaaaaccgacttttacacgccttataaaagcagtcaggagatagatccgtaggtttgatccttcacatctaataccaggcgctaatgggaacaaggtttaaagggtcctggtatgctaataaattgaaaaattagtgaaatttaaacttctgcctttttttcctgccttttaatctagatttgcttcctcaatatcctactttgtggtttactaggaacatgcttactctgatctttttttaaaaaacacacagtggcagagtcatttcactattgcactgtgtgttaaagaatgaataaggagttttcagttacatggccaaaaatacaggacttgaacataaatagcagttggatcattctctttcatgacggttaaattcagaggtgtgaactttgtaatgagggtgttaaagattaatctatttgcctaaatgggtttgttcaggtatccatttttaacaaagaagtttgtgttcatatagtaaaagacctatcagtgtttccaccatgcacttctattttttaggagtttataattttaagtcttacattcctagtaacatttgggcttttcttaggttatgtttcgtgaagatttggggggagggctcttttaaaacttcggcctcagttgtttaacagtctctttaatatattaatctgcactaacatctctgtgatatatgcacatattttagaggtaatcatgtcttctagattacttgtgtgcatttgattgggcttcttgtttagggtcccttttaaaattaattcattagattgaaaaatgtattctatatttctgatagactggacagaaggatctgtgtccccaagtgagacaggctctgaataacctttgttttctccactttttattgatgatttaaaacactctagtcttcccctcaaatcatgcatgcaaataggaggacagtggtggtgactcaactggatacaggtgctcaatagtcaggcttgatagtgatgtcaggacgcattacaagctgtaagccgatactgactggccattggcaccatccttgactaaccttcctctttttctctagtgtgcctatggtgaaatggcaatagcattcactgtcgtattttgcagtgctcaggaagtgggacgttaactttgaaggtgcttgtttgtattagctctgctaggtttacctctacaacgtagatttcagcagctatgctgactgacactacattctagttcttaagattttttttccagatccccccttccccagctagacatacgtagcatactttcatcttattcagtctttctgtaacctgctgctgcttttagtcctcctcacctcagatcggaatcaatggagtgggcccagaggatacattttaattccagtaatggtaggtagatttgtcctgctttctaaaacatctcctcatttcatatttccactccatattgattccataagggaaaattaatgggtgtttcctcctttagggaggtaatgcaaagagtgtggacatcttctaatcttgaggaacagtagttgatttcccttgaaggagcttacatattgactgttttcacaataacctgtttgccccagttcaatcctcattttaatacttaatttggtactggctcaaatagcattttcttacagataacaaatcaagagtgaaatttgaggttatactccagtaaagtttttaacacttgtgaatatggtcagctagactaaacttgactcttttttttaatggcttttttatctgtgaacattcagataagtggattttcaagtactggttggggatgggaatcgtgcttttctttaaacttcagtttacgagatgctttgagagcgttaggcaaaagcagaaataaatatcaggagcaacggggaaagctttataaaagatcatggtggccactgttgcagctttgaagaatgagtgctggcttgaacagttctttgcctgcatcattggtagctgcactgaaaggaaaaaactttcaccttaagaatttgaaaaggaagaaacctgggctctggtcttcatggcatttagactgagatgcttaaacagaacagaagtaatacgcatttcctgccataggatagggaaaatgtaacaagctggttgctcttgaggttagaaaattgtctgtttctctgtggatgaagctggatttacttgaaaatggagagttggcttattgtttgaatattgggacatcaagctatctatagccaagtttcagtcgcaaccagttttccctttgtctggggtaaattcgatacaaaatgattctttttgaatcctgaatccataaattacacttttttttttcaaattcacaaaattcacagtggtgctgactgtgtaataaccactattgggaaacatcccgtaaacctgcctgttgccatgccaatggagtgactgaactggtgacatctgtttgagcatgctttgtgtggctggtagaatgccaccgttgtgcatacactttgtacatcaggggtgaagggagggttttctagattattgggggagggtaaaattgggattttttggtatgcagatacatacagagactgggatatgtaaaaattaagtatcacaaaagaccatcacacgattctaccaatgcatgttgcatctgtaattcacgaacatggtcaacaaaatcatgttcacttcaaccccatttcatttaaattaaagaaaaaaaccttttaaataaagtggttacattcaaactttaacttccttagtaccatgctgcagatttcagcactgttaaggtattgcaagaatgcccaaccctctggtgtctgatcatgtatctagcaacattgcagtatgaagaaaagagatgccccggtctcagcccatggactagttaatacagtgaagcaggttcctgtcttttacccttcctgctcagaacataaaagattaaggactaaaatcaaggaagactgggagttttagagctggcaaaatgaagtctaaaagataaatcaaggcaaacaattactgagaacttggctgttgcttaacctggcaagtctaaaagcctttctttaaccttgtaggaattagatgcataaggtttgctgcaacatgttcatggtaaacaaactaagtagagctcttatttacaaatcttgtaacaaatacttctggaggaaaaagagaaaagaatcactaagtccagaagacaagcttaattgccagacgtatacaacacacatcacacgtaacaccacacatattcggggtttatactgtattttagggctagctgagtactatac

SEQ ID NO: 390980 - DNA, 3514 bp, Homo sapiens
  misc_feature (19)..(19): n is a, c, g, or t
  misc_feature (26)..(26): n is a, c, g, or t
atcaatggctggtcccccncgagtantggatatcgtcgtccaggcctcggaatatgttaaatgctgctcccatacaattcagttagctcttgtctttttatttggtccaacccctgctttactgctcatgctgcttaaagcaggagggactagagaaacaaggcattttaggaggcctgtgtgcagttgaaaaccgacttttacacgccttataaaagcagtcaggagatagatccgtaggtttgatccttcacatctaataccaggcgctaatgggaacaaggtttaaagggtcctggtatgctaataaattgaaaaattagtgaaatttaaacttctgcctttttttcctgccttttaatctagatttgcttcctcaatatcctactttgtggtttactaggaacatgcttactctgatctttttttaaaaaacacacagtggcagagtcatttcactattgcactgtgtgttaaagaatgaataaggagttttcagttacatggccaaaaatacaggacttgaacataaatagcagttggatcattctctttcatgacggttaaattcagaggtgtgaactttgtaatgagggtgttaaagattaatctatttgcctaaatgggtttgttcaggtatccatttttaacaaagaagtttgtgttcatatagtaaaagacctatcagtgtttccaccatgcacttctattttttaggagtttataattttaagtcttacattcctagtaacatttgggcttttcttaggttatgtttcgtgaagatttggggggagggctcttttaaaacttcggcctcagttgtttaacagtctctttaatatattaatctgcactaacatctctgtgatatatgcacatattttagaggtaatcatgtcttctagattacttgtgtgcatttgattgggcttcttgtttagggtcccttttaaaattaattcattagattgaaaaatgtattctatatttctgatagactggacagaaggatctgtgtccccaagtgagacaggctctgaataacctttgttttctccactttttattgatgatttaaaacactctagtcttcccctcaaatcatgcatgcaaataggaggacagtggtggtgactcaactggatacaggtgctcaatagtcaggcttgatagtgatgtcaggacgcattacaagctgtaagccgatactgactggccattggcaccatccttgactaaccttcctctttttctctagtgtgcctatggtgaaatggcaatagcattcactgtcgtattttgcagtgctcaggaagtgggacgttaactttgaaggtgcttgtttgtattagctctgctaggtttacctctacaacgtagatttcagcagctatgctgactgacactacattctagttcttaagattttttttccagatccccccttccccagctagacatacgtagcatactttcatcttattcagtctttctgtaacctgctgctgcttttagtcctcctcacctcagatcggaatcaatggagtgggcccagaggatacattttaattccagtaatggtaggtagatttgtcctgctttctaaaacatctcctcatttcatatttccactccatattgattccataagggaaaattaatgggtgtttcctcctttagggaggtaatgcaaagagtgtggacatcttctaatcttgaggaacagtagttgatttcccttgaaggagcttacatattgactgttttcacaataacctgtttgccccagttcaatcctcattttaatacttaatttggtactggctcaaatagcattttcttacagataacaaatcaagagtgaaatttgaggttatactccagtaaagtttttaacacttgtgaatatggtcagctagactaaacttgactcttttttttaatggcttttttatctgtgaacattcagataagtggattttcaagtactggttggggatgggaatcgtgcttttctttaaacttcagtttacgagatgctttgagagcgttaggcaaaagcagaaataaatatcaggagcaacggggaaagctttataaaagatcatggtggccactgttgcagctttgaagaatgagtgctggcttgaacagttctttgcctgcatcattggtagctgcactgaaaggaaaaaactttcaccttaagaatttgaaaaggaagaaacctgggctctggtcttcatggcatttagactgagatgcttaaacagaacagaagtaatacgcatttcctgccataggatagggaaaatgtaacaagctggttgctcttgaggttagaaaattgtctgtttctctgtggatgaagctggatttacttgaaaatggagagttggcttattgtttgaatattgggacatcaagctatctatagccaagtttcagtcgcaaccagttttccctttgtctggggtaaattcgatacaaaatgattctttttgaatcctgaatccataaattacacttttttttttcaaattcacaaaattcacagtggtgctgactgtgtaataaccactattgggaaacatcccgtaaacctgcctgttgccatgccaatggagtgactgaactggtgacatctgtttgagcatgctttgtgtggctggtagaatgccaccgttgtgcatacactttgtacatcaggggtgaagggagggttttctagattattgggggagggtaaaattgggattttttggtatgcagatacatacagagactgggatatgtaaaaattaagtatcacaaaagaccatcacacgattctaccaatgcatgttgcatctgtaattcacgaacatggtcaacaaaatcatgttcacttcaaccccatttcatttaaattaaagaaaaaaaccttttaaataaagtggttacattcaaactttaacttccttagtaccatgctgcagatttcagcactgttaaggtattgcaagaatgcccaaccctctggtgtctgatcatgtatctagcaacattgcagtatgaagaaaagagatgccccggtctcagcccatggactagttaatacagtgaagcaggttcctgtcttttacccttcctgctcagaacataaaagattaaggactaaaatcaaggaagactgggagttttagagctggcaaaatgaagtctaaaagataaatcaaggcaaacaattactgagaacttggctgttgcttaacctggcaagtctaaaagcctttctttaaccttgtaggaattagatgcataaggtttgctgcaacatgttcatggtaaacaaactaagtagagctcttatttacaaatcttgtaacaaatacttctggaggaaaaagagaaaagaatcactaagtccagaagacaagcttaattgccagacgtatacaacacacatcacacgtaacaccacacatattcggggtttatactgtattttagggctagctgagtactatac

SEQ ID NO: 390981 - DNA, 3504 bp, Homo sapiens
cggctggtttgattcatccattttgaagagacgggggagcggggggctcgtctgttccaggagccctgaaccaaagagcagcggagtttgagaagccagcagctcggggttcggcagcagcggtcccatcggctgaagttcggggggggtggggcgccgagcgcgcggggtggggggggtcctggtctttggcttctcgactcggtcctgtttcgacagcgaacatgtcgcggcctgtcagaaataggaaggttgttgattactcacagtttcaggaatctgatgatgcagatgaagattatggaagagattcgggccctcccactaagaaaattcgatcatctccccgagaagctaaaaataagaggcgatctggaaagaattcacaggaagatagtgaggactcagaagacaaagatgtgaagaccaagaaggatgattctcactcagcagaggatagtgaagatgaaaaagaagatcataaaaatgtgcgccaacaacggcaggcggcatctaaagcagcttctaaacagagagagatgctcatggaagatgtgggcagtgaggaagaacaagaagaggaggatgaggcaccattccaggagaaagattccggcagcgatgaagatttcctaatggaagatgatgacgatagtgactatggcagttcgaaaaagaaaaacaaaaagatggttaagaagtccaaacctgaaagaaaagaaaagaaaatgcccaaacccagactaaaggctacagtgacgccaagtccagtgaaaggcaaagggaaagtgggtcgccccacagcttcaaaggcatcaaaggaaaagactccttctcccaaagaagaagatgaggaaccggaaagcccgccagaaaagaaaacatctacaagccccccacccgagaaatctggggatgaagggtctgaagatgaagccccttctggggaggattaaaagtgatgatggtctggggagagattttattaaaaaaaaaaagaaaaaaaaagaaaaaagagggaggaaaaaaaagaacctacttaagatagaacatggttttggctatggcttgactcatgggctttcagtgcttttttccatttgttgaaagtaacatttctctctctctctcttttttttttttttttttttaaagcaaaccattgtatgtgtaagtgtttaagttacctttttgtctattggtctctttgccagccctcccctttcccaatgaaagccatgtcaaattaatcactggattgactgcttcatctttttatttttaatgaaaggtgtaccacggttgtaaagcaataagatttgagatgaacactattgaaacttcgctttttgctaaaaaatagcaagttgaatagtaatcaaaaaacatagaaagattttagttcaaaatgattgctcctttctctacctggacttttaaaaaatcaattgtcatctaatatgagtttatttgtctatagacacaagtatcaatgtctaaaaaaaatcatgactttaaacttccaccgatgaggcaggtaggagataaagatgaattctgaactgttactaaaagtactcattttttaccttgtagggagggtgggcaatggggttacctgaccttatttgagggtatgggctttcttttttatttcatcacttgttatctcaaagagactcggagccagtgatccttttatcctgctacagtctttagggagctaaaaaaaaaaaaaaagcaggggctgccaaaactcttgatttcatatttccttctctaaatatatatgtatcctgttttttggataaaattttaccaagaatccaaaaaaaaaaaaaccctagaatttaatcaacaagatcagtctacaggtcacagtggatttcttttcaaactgacaatgtttaggttttaagcaaataaagttccagttaatgtgaaactcagtcacaaagagttgagatttttcctttatgaaatagaattgacattcttttatgctataaatgtgcattcaggtcccattaaccatgctctgcttttatttggggatagaacattttctttttcatatcccgatcttcccatttcttcatagaaatgtgataagaagtacatccctgtgatcctgctgcttcgtagagcaccactgcacaccctaccccgagtgccaaccacctctgctataggacactattttcctggccctattcttcacttacttcccatcctgtccttgactaggaatatgttaaatgctgctcccatacaattcagttagctcttgtctttttatttggtccaacccctgctttactgctcatgctgcttaaagcaggagggactagagaaacaaggcattttaggaggcctgtgtgcagttgaaaaccgacttttacacgccttataaaagcagtcaggagatagatccgtaggtttgatccttcacatctaataccaggcgctaatgggaacaaggtttaaagggtcctggtatgctaataaattgaaaaattagtgaaatttaaacttctgcctttttttcctgccttttaatctagatttgcttcctcaatatcctactttgtggtttactaggaacatgcttactctgatctttttttaaaaaacacacagtggcagagtcatttcactattgcactgtgtgttaaagaatgaataaggagttttcagttacatggccaaaaatacaggacttgaacataaatagcagttggatcattctctttcatgacggttaaattcagaggtgtgaactttgtaatgagggtgttaaagattaatctatttgcctaaatgggtttgttcaggtatccatttttaacaaagaagtttgtgttcatatagtaaaagacctatcagtgtttccaccatgcacttctattttttaggagtttataattttaagtcttacattcctagtaacatttgggcttttcttaggttatgtttcgtgaagatttggggggagggctcttttaaaacttcggcctcagttgtttaacagtctctttaatatattaatctgcactaacatctctgtgatatatgcacatattttagaggtaatcatgtcttctagattacttgtgtgcatttgattgggcttcttgtttagggtcccttttaaaattaattcattagattgaaaaatgtattctatatttctgatagactggacagaaggatctgtgtccccaagtgagacaggctctgaataacctttgttttctccactttttattgatgatttaaaacactctagtcttcccctcaaatcatgcatgcaaataggaggacagtggtggtgactcaactggatacaggtgctcaatagtcaggcttgatagtgatgtcaggacgcattacaagctgtaagccgatactgactggccattggcaccatccttgactaaccttcctctttttctctagtgtgcctatggtgccgttaacttttgaaggtgcgttgtttggttt

SEQ ID NO: 390982 - DNA, 2893 bp, Homo sapiens
cggctggtttgattcatccattttgaagagacgggggagcggggggctcgtctgttccaggagccctgaaccaaagagcagcggagtttgagaagccagcagctcggggttcggcagcagcggtcccatcggctgaagttcggggggggtggggcgccgagcgcgcggggtggggggggtcctggtctttggcttctcgactcggtcctgtttcgacagcgaacatgtcgcggcctgtcagaaataggaaggttgttgattactcacagtttcaggaatctgatgatgcagatgaagattatggaagagattcgggccctcccactaagaaaattcgatcatctccccgagaagctaaaaataagaggcgatctggaaagaattcacaggaagatagtgaggactcagaagacaaagatgtgaagaccaagaaggatgattctcactcagcagaggatagtgaagatgaaaaagaagatcataaaaatgtgcgccaacaacggcaggcggcatctaaagcagcttctaaacagagagagatgctcatggaagatgtgggcagtgaggaagaacaagaagaggaggatgaggcaccattccaggagaaagattccggcagcgatgaagatttcctaatggaagatgatgacgatagtgactatggcagttcgaaaaagaaaaacaaaaagatggttaagaagtccaaacctgaaagaaaagaaaagaaaatgcccaaacccagactaaaggctacagtgacgccaagtccagtgaaaggcaaagggaaagtgggtcgccccacagcttcaaaggcatcaaaggaaaagactccttctcccaaagaagaagatgaggaaccggaaagcccgccagaaaagaaaacatctacaagccccccacccgagaaatctggggatgaagggtctgaagatgaagccccttctggggaggattaaaagtgatgatggtctggggagagattttattaaaaaaaaaaagaaaaaaaaagaaaaaagagggaggaaaaaaaagaacctacttaagatagaacatggttttggctatggcttgactcatgggctttcagtgcttttttccatttgttgaaagtaacatttctctctctctctcttttttttttttttttttttaaagcaaaccattgtatgtgtaagtgtttaagttacctttttgtctattggtctctttgccagccctcccctttcccaatgaaagccatgtcaaattaatcactggattgactgcttcatctttttatttttaatgaaaggtgtaccacggttgtaaagcaataagatttgagatgaacactattgaaacttcgctttttgctaaaaaatagcaagttgaatagtaatcaaaaaacatagaaagattttagttcaaaatgattgctcctttctctacctggacttttaaaaaatcaattgtcatctaatatgagtttatttgtctatagacacaagtatcaatgtctaaaaaaaatcatgactttaaacttccaccgatgaggcaggtaggagataaagatgaattctgaactgttactaaaagtactcattttttaccttgtagggagggtgggcaatggggttacctgaccttatttgagggtatgggctttcttttttatttcatcacttgttatctcaaagagactcggagccagtgatccttttatcctgctacagtctttagggagctaaaaaaaaaaaaaaagcaggggctgccaaaactcttgatttcatatttccttctctaaatatatatgtatcctgttttttggataaaattttaccaagaatccaaaaaaaaaaaaaccctagaatttaatcaacaagatcagtctacaggtcacagtggatttcttttcaaactgacaatgtttaggttttaagcaaataaagttccagttaatgtgaaactcagtcacaaagagttgagatttttcctttatgaaatagaattgacattcttttatgctataaatgtgcattcaggtcccattaaccatgctctgcttttatttggggatagaacattttctttttcatatcccgatcttcccatttcttcatagaaatgtgataagaagtacatccctgtgatcctgctgcttcgtagagcaccactgcacaccctaccccgagtgccaaccacctctgctataggacactattttcctggccctattcttcacttacttcccatcctgtccttgactaggaatatgttaaatgctgctcccatacaattcagttagctcttgtctttttatttggtccaacccctgctttactgctcatgctgcttaaagcaggagggactagagaaacaaggcattttaggaggcctgtgtgcagttgaaaaccgacttttacacgccttataaaagcagtcaggagatagatccgtaggtttgatccttcacatctaataccaggcgctaatgggaacaaggtttaaagggtcctggtatgctaataaattgaaaaattagtgaaatttaaacttctgcctttttttcctgccttttaatctagatttgcttcctcaatatcctactttgtggtttactaggaacatgcttactctgatctttttttaaaaaacacacagtggcagagtcatttcactattgcactgtgtgttaaagaatgaataaggagttttcagttacatggccaaaaatacaggacttgaacataaatagcagttggatcattctctttcatgacggttaaattcagaggtgtgaactttgtaatgagggtgttaaagattaatctatttgcctaaatgggtttgttcaggtatccatttttaacaaagaagtttgtgttcatatagtaaaagacctatcagtgtttcc

SEQ ID NO: 390983 - DNA, 2530 bp, Homo sapiens
cggctggtttgattcatccattttgaagagacgggggagcggggggctcgtctgttccaggagccctgaaccaaagagcagcggagtttgagaagccagcagctcggggttcggcagcagcggtcccatcggctgaagttcggggggggtggggcgccgagcgcgcggggtggggggggtcctggtctttggcttctcgactcggtcctgtttcgacagcgaacatgtcgcggcctgtcagaaataggaaggttgttgattactcacagtttcaggaatctgatgatgcagatgaagattatggaagagattcgggccctcccactaagaaaattcgatcatctccccgagaagctaaaaataagaggcgatctggaaagaattcacaggaagatagtgaggactcagaagacaaagatgtgaagaccaagaaggatgattctcactcagcagaggatagtgaagatgaaaaagaagatcataaaaatgtgcgccaacaacggcaggcggcatctaaagcagcttctaaacagagagagatgctcatggaagatgtgggcagtgaggaagaacaagaagaggaggatgaggcaccattccaggagaaagattccggcagcgatgaagatttcctaatggaagatgatgacgatagtgactatggcagttcgaaaaagaaaaacaaaaagatggttaagaagtccaaacctgaaagaaaagaaaagaaaatgcccaaacccagactaaaggctacagtgacgccaagtccagtgaaaggcaaagggaaagtgggtcgccccacagcttcaaaggcatcaaaggaaaagactccttctcccaaagaagaagatgaggaaccggaaagcccgccagaaaagaaaacatctacaagccccccacccgagaaatctggggatgaagggtctgaagatgaagccccttctggggaggattaaaagtgatgatggtctggggagagattttattaaaaaaaaaaagaaaaaaaaagaaaaaagagggaggaaaaaaaagaacctacttaagatagaacatggttttggctatggcttgactcatgggctttcagtgcttttttccatttgttgaaagtaacatttctctctctctctcttttttttttttttttttttaaagcaaaccattgtatgtgtaagtgtttaagttacctttttgtctattggtctctttgccagccctcccctttcccaatgaaagccatgtcaaattaatcactggattgactgcttcatctttttatttttaatgaaaggtgtaccacggttgtaaagcaataagatttgagatgaacactattgaaacttcgctttttgctaaaaaatagcaagttgaatagtaatcaaaaaacatagaaagattttagttcaaaatgattgctcctttctctacctggacttttaaaaaatcaattgtcatctaatatgagtttatttgtctatagacacaagtatcaatgtctaaaaaaaatcatgactttaaacttccaccgatgaggcaggtaggagataaagatgaattctgaactgttactaaaagtactcattttttaccttgtagggagggtgggcaatggggttacctgaccttatttgagggtatgggctttcttttttatttcatcacttgttatctcaaagagactcggagccagtgatccttttatcctgctacagtctttagggagctaaaaaaaaaaaaaaagcaggggctgccaaaactcttgatttcatatttccttctctaaatatatatgtatcctgttttttggataaaattttaccaagaatccaaaaaaaaaaaaaccctagaatttaatcaacaagatcagtctacaggtcacagtggatttcttttcaaactgacaatgtttaggttttaagcaaataaagttccagttaatgtgaaactcagtcacaaagagttgagatttttcctttatgaaatagaattgacattcttttatgctataaatgtgcattcaggtcccattaaccatgctctgcttttatttggggatagaacattttctttttcatatcccgatcttcccatttcttcatagaaatgtgataagaagtacatccctgtgatcctgctgcttcgtagagcaccactgcacaccctaccccgagtgccaaccacctctgctataggacactattttcctggccctattcttcacttacttcccatcctgtccttgactaggaatatgttaaatgctgctcccatacaattcagttagctcttgtctttttatttggtccaacccctgctttactgctcatgctgcttaaagcaggagggactagagaaacaaggcattttaggaggcctgtgtgcagttgaaaaccgacttttacacgccttataaaagcagtcaggagatagatccgtaggtttgatccttcacatctaataccaggcgctaatgggaacaaggtttaaagggtcctggtatgctaataaattgaaaaattagtgaaattta

SEQ ID NO: 390984 - DNA, 2450 bp, Homo sapiens
ctatacaatcagctcggtacccaggtctcttcccctcaaatcatgcatgcaaataggaggacagtggtggtgactcaactggatacaggtgctcaatagtcaggcttgatagtgatgtcaggacgcattacaagctgtaagccgatactgactggccattggcaccatccttgactaaccttcctctttttctctagtgtgcctatggtgaaatggcaatagcattcactgtcgtattttgcagtgctcaggaagtgggacgttaactttgaaggtgcttgtttgtattagctctgctaggtttacctctacaacgtagatttcagcagctatgctgactgacactacattctagttcttaagattttttttccagatccccccttccccagctagacatacgtagcatactttcatcttattcagtctttctgtaacctgctgctgcttttagtcctcctcacctcagatcggaatcaatggagtgggcccagaggatacattttaattccagtaatggtaggtagatttgtcctgctttctaaaacatctcctcatttcatatttccactccatattgattccataagggaaaattaatgggtgtttcctcctttagggaggtaatgcaaagagtgtggacatcttctaatcttgaggaacagtagttgatttcccttgaaggagcttacatattgactgttttcacaataacctgtttgccccagttcaatcctcattttaatacttaatttggtactggctcaaatagcattttcttacagataacaaatcaagagtgaaatttgaggttatactccagtaaagtttttaacacttgtgaatatggtcagctagactaaacttgactcttttttttaatggcttttttatctgtgaacattcagataagtggattttcaagtactggttggggatgggaatcgtgcttttctttaaacttcagtttacgagatgctttgagagcgttaggcaaaagcagaaataaatatcaggagcaacggggaaagctttataaaagatcatggtggccactgttgcagctttgaagaatgagtgctggcttgaacagttctttgcctgcatcattggtagctgcactgaaaggaaaaaactttcaccttaagaatttgaaaaggaagaaacctgggctctggtcttcatggcatttagactgagatgcttaaacagaacagaagtaatacgcatttcctgccataggatagggaaaatgtaacaagctggttgctcttgaggttagaaaattgtctgtttctctgtggatgaagctggatttacttgaaaatggagagttggcttattgtttgaatattgggacatcaagctatctatagccaagtttcagtcgcaaccagttttccctttgtctggggtaaattcgatacaaaatgattctttttgaatcctgaatccataaattacacttttttttttcaaattcacaaaattcacagtggtgctgactgtgtaataaccactattgggaaacatcccgtaaacctgcctgttgccatgccaatggagtgactgaactggtgacatctgtttgagcatgctttgtgtggctggtagaatgccaccgttgtgcatacactttgtacatcaggggtgaagggagggttttctagattattgggggagggtaaaattgggattttttggtatgcagatacatacagagactgggatatgtaaaaattaagtatcacaaaagaccatcacacgattctaccaatgcatgttgcatctgtaattcacgaacatggtcaacaaaatcatgttcacttcaaccccatttcatttaaattaaagaaaaaaaccttttaaataaagtggttacattcaaactttaacttccttagtaccatgctgcagatttcagcactgttaaggtattgcaagaatgcccaaccctctggtgtctgatcatgtatctagcaacattgcagtatgaagaaaagagatgccccggtctcagcccatggactagttaatacagtgaagcaggttcctgtcttttacccttcctgctcagaacataaaagattaaggactaaaatcaaggaagactgggagttttagagctggcaaaatgaagtctaaaagataaatcaaggcaaacaattactgagaacttggctgttgcttaacctggcaagtctaaaagcctttctttaaccttgtaggaattagatgcataaggtttgctgcaacatgttcatggtaaacaaactaagtagagctcttatttacaaatcttgtaacaaatacttctggaggaaaaagagaaaagaatcactaagtccagaagacaagcttaattgccagacgtatacaacacacatcacacgtaacaccacacatattcggggtttatactgtattttagggctagctgagtactatac

SEQ ID NO: 390985 - DNA, 988 bp, Homo sapiens
cggctggtttgattcatccattttgaagagacgggggagcggggggctcgtctgttccaggagccctgaaccaaagagcagcggagtttgagaagccagcagctcggggttcggcagcagcggtcccatcggctgaagttcggggggggtggggcgccgagcgcgcggggtggggggggtcctggtctttggcttctcgactcggtcctgtttcgacagcgaacatgtcgcggcctgtcagaaataggaaggttgttgattactcacagtttcaggaatctgatgatgcagatgaagattatggaagagattcgggccctcccactaagaaaattcgatcatctccccgagaagctaaaaataagaggcgatctggaaagaattcacaggaagatagtgaggactcagaagacaaagatgtgaagaccaagaaggatgattctcactcagcagaggatagtgaagatgaaaaagaagatcataaaaatgtgcgccaacaacggcaggcggcatctaaagcagcttctaaacagagagagatgctcatggaagatgtgggcagtgaggaagaacaagaagaggaggatgaggcaccattccaggagaaagattccggcagcgatgaagatttcctaatggaagatgatgacgatagtgactatggcagttcgaaaaagaaaaacaaaaagatggttaagaagtccaaacctgaaagaaaagaaaagaaaatgcccaaacccagactaaaggctacagtgacgccaagtccagtgaaaggcaaagggaaagtgggtcgccccacagcttcaaaggcatcaaaggaaaagactccttctcccaaagaagaagatgaggaaccggaaagcccgccagaaaagaaaacatctacaagccccccacccgagaaatctggggatgaagggtctgaagatgaagccccttctggggaggattaaaagtgatgatggtctggggagagattttatta

SEQ ID NO: 390986 - DNA, 1404 bp, Homo sapiens
  misc_feature (1227)..(1227): n is a, c, g, or t
  misc_feature (1231)..(1231): n is a, c, g, or t
  misc_feature (1243)..(1243): n is a, c, g, or t
  misc_feature (1280)..(1280): n is a, c, g, or t
  misc_feature (1298)..(1298): n is a, c, g, or t
  misc_feature (1368)..(1368): n is a, c, g, or t
  misc_feature (1400)..(1400): n is a, c, g, or t
cggctggtttgattcatccattttgaagagacgggggagcggggggctcgtctgttccaggagccctgaaccaaagagcagcggagtttgagaagccagcagctcggggttcggcagcagcggtcccatcggctgaagttcggggggggtggggcgccgagcgcgcggggtggggggggtcctggtctttggcttctcgactcggtcctgtttcgacagcgaacatgtcgcggcctgtcagaaataggaaggttgttgattactcacagtttcaggaatctgatgatgcagatgaagattatggaagagattcgggccctcccactaagaaaattcgatcatctccccgagaagctaaaaataagaggcgatctggaaagaattcacaggaagatagtgaggactcagaagacaaagatgtgaagaccaagaaggatgattctcactcagcagaggatagtgaagatgaaaaagaagatcataaaaatgtgcgccaacaacggcaggcggcatctaaagcagcttctaaacagagagagatgctcatggaagatgtgggcagtgaggaagaacaagaagaggaggatgaggcaccattccaggagaaagattccggcagcgatgaagatttcctaatggaagatgatgacgatagtgactatggcagttcgaaaaagaaaaacaaaaagatggttaagaagtccaaacctgaaagaaaagaaaagaaaatgcccaaacccagactaaaggctacagtgacgccaagtccagtgaaaggcaaagggaaagtgggtcgccccacagcttcaaaggcatcaaaggaaaagactccttctcccaaagaagaagatgaggaaccggaaagcccgccagaaaagaaaacatctacaagccccccacccgagaaatctggggatgaagggtctgaagatgaagccccttctggggaggattaaaagtgatgatggtctggggagagattttattaaaaaaaaaaagaaaaaaaaagaaaaaagagggaggaaaaaaaagaacctacttaagatagaacatggttttggctatggcttgactcatgggctttcagtgcttttttccatttgttgaaagtaacatttctctctctctctcttttttttttttttttttttaatttttttttttttttttttttttttttttttttttttttttttttttttttttttttttttttatgattacacncatntatttaacagcncagttttacacagaatgctaagagcacttttcttcanattttacagaagggcttnaaacatacagactattcgtaatcatacaatagcacatccaaatctaactcctaaatagatgatgcattanaatttgtttagaatttggcttaatggcattcngggg

SEQ ID NO: 390987 - DNA, 1525 bp, Homo sapiens
tcgtgatagctgactctagaggatacacctctgtccacagaaaaggcgagatgctttgagagcgttaggcaaaagcagaaataaatatcaggagcaacggggaaagctttataaaagatcatggtggccactgttgcagctttgaagaatgagtgctggcttgaacagttctttgcctgcatcattggtagctgcactgaaaggaaaaaactttcaccttaagaatttgaaaaggaagaaacctgggctctggtcttcatggcatttagactgagatgcttaaacagaacagaagtaatacgcatttcctgccataggatagggaaaatgtaacaagctggttgctcttgaggttagaaaattgtctgtttctctgtggatgaagctggatttacttgaaaatggagagttggcttattgtttgaatattgggacatcaagctatctatagccaagtttcagtcgcaaccagttttccctttgtctggggtaaattcgatacaaaatgattctttttgaatcctgaatccataaattacacttttttttttcaaattcacaaaattcacagtggtgctgactgtgtaataaccactattgggaaacatcccgtaaacctgcctgttgccatgccaatggagtgactgaactggtgacatctgtttgagcatgctttgtgtggctggtagaatgccaccgttgtgcatacactttgtacatcaggggtgaagggagggttttctagattattgggggagggtaaaattgggattttttggtatgcagatacatacagagactgggatatgtaaaaattaagtatcacaaaagaccatcacacgattctaccaatgcatgttgcatctgtaattcacgaacatggtcaacaaaatcatgttcacttcaaccccatttcatttaaattaaagaaaaaaaccttttaaataaagtggttacattcaaactttaacttccttagtaccatgctgcagatttcagcactgttaaggtattgcaagaatgcccaaccctctggtgtctgatcatgtatctagcaacattgcagtatgaagaaaagagatgccccggtctcagcccatggactagttaatacagtgaagcaggttcctgtcttttacccttcctgctcagaacataaaagattaaggactaaaatcaaggaagactgggagttttagagctggcaaaatgaagtctaaaagataaatcaaggcaaacaattactgagaacttggctgttgcttaacctggcaagtctaaaagcctttctttaaccttgtaggaattagatgcataaggtttgctgcaacatgttcatggtaaacaaactaagtagagctcttatttacaaatcttgtaacaaatacttctggaggaaaaagagaaaagaatcactaagtccagaagacaagcttaattgccagacgtatacaacacacatcacacgtaacaccacacatattcggggtttatactgtattttagggctagctgagtactatac

SEQ ID NO: 390988 - DNA, 1383 bp, Homo sapiens
atttcttcactcatatcctccaacagttctttgcctgcatcattggtagctgcactgaaaggaaaaaactttcaccttaagaatttgaaaaggaagaaacctgggctctggtcttcatggcatttagactgagatgcttaaacagaacagaagtaatacgcatttcctgccataggatagggaaaatgtaacaagctggttgctcttgaggttagaaaattgtctgtttctctgtggatgaagctggatttacttgaaaatggagagttggcttattgtttgaatattgggacatcaagctatctatagccaagtttcagtcgcaaccagttttccctttgtctggggtaaattcgatacaaaatgattctttttgaatcctgaatccataaattacacttttttttttcaaattcacaaaattcacagtggtgctgactgtgtaataaccactattgggaaacatcccgtaaacctgcctgttgccatgccaatggagtgactgaactggtgacatctgtttgagcatgctttgtgtggctggtagaatgccaccgttgtgcatacactttgtacatcaggggtgaagggagggttttctagattattgggggagggtaaaattgggattttttggtatgcagatacatacagagactgggatatgtaaaaattaagtatcacaaaagaccatcacacgattctaccaatgcatgttgcatctgtaattcacgaacatggtcaacaaaatcatgttcacttcaaccccatttcatttaaattaaagaaaaaaaccttttaaataaagtggttacattcaaactttaacttccttagtaccatgctgcagatttcagcactgttaaggtattgcaagaatgcccaaccctctggtgtctgatcatgtatctagcaacattgcagtatgaagaaaagagatgccccggtctcagcccatggactagttaatacagtgaagcaggttcctgtcttttacccttcctgctcagaacataaaagattaaggactaaaatcaaggaagactgggagttttagagctggcaaaatgaagtctaaaagataaatcaaggcaaacaattactgagaacttggctgttgcttaacctggcaagtctaaaagcctttctttaaccttgtaggaattagatgcataaggtttgctgcaacatgttcatggtaaacaaactaagtagagctcttatttacaaatcttgtaacaaatacttctggaggaaaaagagaaaagaatcactaagtccagaagacaagcttaattgccagacgtatacaacacacatcacacgtaacaccacacatattcggggtttatactgtattttagggctagctgagtactatac

SEQ ID NO: 390989 - DNA, 1001 bp, Homo sapiens
cggctggtttgattcatccattttgaagagacgggggagcggggggctcgtctgttccaggagccctgaaccaaagagcagcggagtttgagaagccagcagctcggggttcggcagcagcggtcccatcggctgaagttcggggggggtggggcgccgagcgcgcggggtggggggggtcctggtctttggcttctcgactcggtcctgtttcgacagcgaacatgtcgcggcctgtcagaaataggaaggttgttgattactcacagtttcaggaatctgatgatgcagatgaagattatggaagagattcgggccctcccactaagaaaattcgatcatctccccgagaagctaaaaataagaggcgatctggaaagaattcacaggaagatagtgaggactcagaagacaaagatgtgaagaccaagaaggatgattctcactcagcagaggatagtgaagatgaaaaagaagatcataaaaatgtgcgccaacaacggcaggcggcatctaaagcagcttctaaacagagagagatgctcatggaagatgtgggcagtgaggaagaacaagaagaggaggatgaggcaccattccaggagaaagattccggcagcgatgaagatttcctaatggaagatgatgacgatagtgactatggcagttcgaaaaagaaaaacaaaaagatggttaagaagtccaaacctgaaagaaaagaaaagaaaatgcccaaacccagactaaaggctacagtgacgccaagtccagtgaaaggcaaagggaaagtgggtcgccccacagcttcaaaggcatcaaaggaaaagactccttctcccaaagaagaagatgaggaaccattccaggagaaagattccggcagcgatgaagatttcctacatggaagatgatgacgatagtgactatggcagttcgaaaaagaaaaacaaaaagatggttaagaagtccaaacccctggaaagaagatgcagcaacgaagg

SEQ ID NO: 390990 - DNA, 1393 bp, Homo sapiens
ctatgactattataagaaatgtaagatttggataagtcataatcacagatcagaaactgcagacattgaggcctggatggccgtttagagagaaagagttaacatttcagtggagacctttcctatcttgtatttcctacagtctcctcctatcttcagatgcagtgttctggcagcacctcaagctcactgtcaccaaatgggattcaacgtctttcctcccaaacatgctctacctcaccatgtcgatagatgtacagtcgccccactactggcttaaattctaaattactgaaaaccatgcaacaggcaaaagtgtgagacaaagggaaacaccgggttttccctttgtctggggtaaattcgatacaaaatgattctttttgaatcctgaatccataaattacacttttttttttcaaattcacaaaattcacagtggtgctgactgtgtaataaccactattgggaaacatcccgtaaacctgcctgttgccatgccaatggagtgactgaactggtgacatctgtttgagcatgctttgtgtggctggtagaatgccaccgttgtgcatacactttgtacatcaggggtgaagggagggttttctagattattgggggagggtaaaattgggattttttggtatgcagatacatacagagactgggatatgtaaaaattaagtatcacaaaagaccatcacacgattctaccaatgcatgttgcatctgtaattcacgaacatggtcaacaaaatcatgttcacttcaaccccatttcatttaaattaaagaaaaaaaccttttaaataaagtggttacattcaaactttaacttccttagtaccatgctgcagatttcagcactgttaaggtattgcaagaatgcccaaccctctggtgtctgatcatgtatctagcaacattgcagtatgaagaaaagagatgccccggtctcagcccatggactagttaatacagtgaagcaggttcctgtcttttacccttcctgctcagaacataaaagattaaggactaaaatcaaggaagactgggagttttagagctggcaaaatgaagtctaaaagataaatcaaggcaaacaattactgagaacttggctgttgcttaacctggcaagtctaaaagcctttctttaaccttgtaggaattagatgcataaggtttgctgcaacatgttcatggtaaacaaactaagtagagctcttatttacaaatcttgtaacaaatacttctggaggaaaaagagaaaagaatcactaagtccagaagacaagcttaattgccagacgtatacaacacacatcacacgtaacaccacacatattcggggtttatactgtattttagggctagctgagtactatac

SEQ ID NO: 390991 - DNA, 1557 bp, Homo sapiens
ggattccttgtcttcaaatggcaggtggagctggttgtctaattgaagccgaattgtttggtggttcttataaaaaggtggtattcaaaaacgtaagtggattattaccagtacaagcacccgtaatactcccattctttcacgtctaggccaactggtcttcaggctgtagtctgcgctagtggtcatttgcttataatcattgtttttcctttcttgacttcctccaaagtggtaaagtgaaattcctcatgtggtcctgtctgccctccctctttttctagtttccccctcctaccccgtccaactctcaggccagggctacagaggatggaaggctattgccccctatcattgtgcactcttattacagagccaaggattgtcaccagtgaagaggtcattattcgagacagccctgttctccctgtcaccctgcagtgtaacctcacctccagctctcacacccttacatacagctactagacaaagggaaacaccgggttttccctttgtctggggtaaattcgatacaaaatgattctttttgaatcctgaatccataaattacacttttttttttcaaattcacaaaattcacagtggtgctgactgtgtaataaccactattgggaaacatcccgtaaacctgcctgttgccatgccaatggagtgactgaactggtgacatctgtttgagcatgctttgtgtggctggtagaatgccaccgttgtgcatacactttgtacatcaggggtgaagggagggttttctagattattgggggagggtaaaattgggattttttggtatgcagatacatacagagactgggatatgtaaaaattaagtatcacaaaagaccatcacacgattctaccaatgcatgttgcatctgtaattcacgaacatggtcaacaaaatcatgttcacttcaaccccatttcatttaaattaaagaaaaaaaccttttaaataaagtggttacattcaaactttaacttccttagtaccatgctgcagatttcagcactgttaaggtattgcaagaatgcccaaccctctggtgtctgatcatgtatctagcaacattgcagtatgaagaaaagagatgccccggtctcagcccatggactagttaatacagtgaagcaggttcctgtcttttacccttcctgctcagaacataaaagattaaggactaaaatcaaggaagactgggagttttagagctggcaaaatgaagtctaaaagataaatcaaggcaaacaattactgagaacttggctgttgcttaacctggcaagtctaaaagcctttctttaaccttgtaggaattagatgcataaggtttgctgcaacatgttcatggtaaacaaactaagtagagctcttatttacaaatcttgtaacaaatacttctggaggaaaaagagaaaagaatcactaagtccagaagacaagcttaattgccagacgtatacaacacacatcacacgtaacaccacacatattcggggtttatactgtattttagggctagctgagtactatac

SEQ ID NO: 390992 - DNA, 1097 bp, Homo sapiens
gtgatcagaatatgtaatgaaggtctgtgtctgctggtaggaggttttccctttgtctggggtaaattcgatacaaaatgattctttttgaatcctgaatccataaattacacttttttttttcaaattcacaaaattcacagtggtgctgactgtgtaataaccactattgggaaacatcccgtaaacctgcctgttgccatgccaatggagtgactgaactggtgacatctgtttgagcatgctttgtgtggctggtagaatgccaccgttgtgcatacactttgtacatcaggggtgaagggagggttttctagattattgggggagggtaaaattgggattttttggtatgcagatacatacagagactgggatatgtaaaaattaagtatcacaaaagaccatcacacgattctaccaatgcatgttgcatctgtaattcacgaacatggtcaacaaaatcatgttcacttcaaccccatttcatttaaattaaagaaaaaaaccttttaaataaagtggttacattcaaactttaacttccttagtaccatgctgcagatttcagcactgttaaggtattgcaagaatgcccaaccctctggtgtctgatcatgtatctagcaacattgcagtatgaagaaaagagatgccccggtctcagcccatggactagttaatacagtgaagcaggttcctgtcttttacccttcctgctcagaacataaaagattaaggactaaaatcaaggaagactgggagttttagagctggcaaaatgaagtctaaaagataaatcaaggcaaacaattactgagaacttggctgttgcttaacctggcaagtctaaaagcctttctttaaccttgtaggaattagatgcataaggtttgctgcaacatgttcatggtaaacaaactaagtagagctcttatttacaaatcttgtaacaaatacttctggaggaaaaagagaaaagaatcactaagtccagaagacaagcttaattgccagacgtatacaacacacatcacacgtaacaccacacatattcggggtttatactgtattttagggctagctgagtactatac

SEQ ID NO: 390993 - DNA, 895 bp, Homo sapiens
cggctggtttgattcatccattttgaagagacgggggagcggggggctcgtctgttccaggagccctgaaccaaagagcagcggagtttgagaagccagcagctcggggttcggcagcagcggtcccatcggctgaagttcggggggggtggggcgccgagcgcgcggggtggggggggtcctggtctttggcttctcgactcggtcctgtttcgacagcgaacatgtcgcggcctgtcagaaataggaaggttgttgattactcacagtttcaggaatctgatgatgcagatgaagattatggaagagattcgggccctcccactaagaaaattcgatcatctccccgagaagctaaaaataagaggcgatctggaaagaattcacaggaagatagtgaggactcagaagacaaagatgtgaagaccaagaaggatgattctcactcagcagaggatagtgaagatgaaaaagaagatcataaaaatgtgcgccaacaacggcaggcggcatctaaagcagcttctaaacagagagagatgctcatggaagatgtgggcagtgaggaagaacaagaagaggaggatgaggcaccattccaggagaaagattccggcagcgatgaagatttcctaatggaagatgatgacgatagtgactatggcagttcgaaaaagaaaaacaaaaaaaaaaacaaaaaacaaaaaaccccggaggccctaaatagccggggggcgggacaaaagggcgtacgagaaggggccaagtgggccaaacggggtccccggagaccccagtttcctgggcaccaaggggaaaaactccggcggaggaaccccaaaaagagagagcgcgcgaataagagtgcaggaaaaccgccgggaacccgggataa

SEQ ID NO: 390994 - DNA, 1278 bp, Homo sapiens
  misc_feature (1143)..(1143): n is a, c, g, or t
  misc_feature (1160)..(1160): n is a, c, g, or t
ctatgactattataagaaatgtaagatttggataagtcataatcacagatcagaaactgcagacattgaggcctggatggccgtttagagagaaagagttaacatttcagtggagacctttcctatcttgtatttcctacagtctcctcctatcttcagatgcagtgttctggcagcacctcaagctcactgtcaccaaatgggattcaacgtctttcctcccaaacatgctctacctcaccatgtcgatagatgtacagtcgccccactactggcttaaattctaaattactgaaaaccatgcaacaggcaaaagtgtgagacaaagggaaacaccgggttttccctttgtctggggtaaattcgatacaaaatgattctttttgaatcctgaatccataaattacacttttttttttcaaattcacaaaattcacagtggtgctgactgtgtaataaccactattgggaaacatcccgtaaacctgcctgttgccatgccaatggagtgactgaactggtgacatctgtttgagcatgctttgtgtggctggtagaatgccaccgttgtgcatacactttgtacatcaggggtgaagggagggttttctagattattgggggagggtaaaattgggattttttggttgttccttttttgatggggtgtgggggtatagtactcagcttatgccctaaaataacatgtataaaaacccctgaagtattgtgtgggtgtgtacgtgtgagtgtgtgttggtatacgtctggcaattaaagcttggtcttctggaacttagtgaattcttttctctttttcctccagaagtattggttacaagatttgtaaataagagctctacttagtttgtttaccatgaacatgttgcagcaaaccttatgcatctaattcctacaaggttaaagaaaggcttttagacttgccaggttaagcaacagccaagttctcagtaattgtttgcttgatttatcttttagacttcatttggcagctctaaaactcccagtcttccttgattttagtccttaatcttttatgttctgagcaggaagggtaaacagacaggaacctggttcactggtattaactagtcccatgggctgagaccggggcaatctctnttcttcatactggcaangttgctagatactgatcggacaccaaagggttggggcatatcttgcaaaacctttaaagttgctgaatttgccgctgggtctcagggaagtcacagtttgaatgttacccttttttta

SEQ ID NO: 390995 - DNA, 939 bp, Homo sapiens
gtacggtttgcgagaagacgacagaaggggaggatgaggcaccattccaggagaaagattccggcagcgatgaagatttcctaatggaagatgatgacgatagtgactatggcagttcgaaaaagaaaaacaaaaagatggttaagaagtcctggtctttggcttctcgactcggtcctgtttcgacagcgaacatgtcgcggcctgtcagaaataggaaggttgttgattactcacagtttcaggaatctgatgatgcagatgaagattatggaagagattcgggccctcccactaagaaaattcgatcatctccccgagaagctaaaaataagaggcgatctggaaagaattcacaggaagatagtgtaggactcgattgcaagacaaaggatgtgtagacgaccgagagcaagcgatgatctctgcactccaggcgaggaggatagtgaagatgaaaaagaagatcataaaaatgtgcgccaacaacggcaggcggcatctaaagcagcttctaaacagagagagatgctcatggaagatgtgggcagtgaggaagaacaagtacacgacggtacggatgcagggcagccattccaggagaaagattccggcagcgatgaagatttcctacatggaagatgatgacgatagtgactatggcagttctaatctatgcaagatacggagttctcccaaacgacatacatggaccgtgaacctcaattaacttggcccaacgcaagaggaccatcatcatgcctgtgatcgaggatgctcgagacccacaggaaataccggatgctcatcgcaatggtggatgtgatcttgtgctgatgtggccagccagaacagacccggattgtggcctgaatgcccaactcctgtaaagggggggagacatggggaatcccatagggcatgcttgatccacggcca

SEQ ID NO: 390996 - DNA, 766 bp, Homo sapiens
  misc_feature (608)..(608): n is a, c, g, or t
aaggctaggtgcgaggccgggtggcgggggagcggggggctcgtctgttccaggagccctgaaccaaagagcagcggagtttgagaagccagcagctcggggttcggcagcagcggtcccatctctccttctgcctcactctgggcctcttctttctactgtacatttccacctctctaggcctctgctctcactgtccctctctgtctgtctctcagcctttatctctgggtttgatcccccactccaggctctgggccccttcttcccccttccctcaaacctggctgctataggcaggaaggaaaccctggaacacatgtggatatatatacgagccccacggggaggggggagagcaccacgcgacggcgggaggagttgatggcggctgtctctctctctctcccgcaaggacccaggctgtggatcacggggcctgccagcttgagtgtagagggaggggggactctacccttctcagccccaccagcccccctctgcccaaccacaattttcccttcctccgccttcctctccctctcctgtttacactccccaaatgcgcacaggctgttatcatgggtcctgagtcatcccacacacangctgccccagcgtccctgcccccagctggcgcagggcccgccccatggagccccctgccgcctgggctaatgggagccagatggccgctggtgactcagacacgggcctgtgggaaccaggcgtcccgcttccatgccccaaaaccggtccttgtccc

SEQ ID NO: 390997 - DNA, 5597 bp, Homo sapiens
  misc_feature (5462)..(5462): n is a, c, g, or t
  misc_feature (5479)..(5479): n is a, c, g, or t
cggctggtttgattcatccattttgaagagacgggggagcggggggctcgtctgttccaggagccctgaaccaaagagcagcggagtttgagaagccagcagctcggggttcggcagcagcggtcccatcggctgaagttcggggggggtggggcgccgagcgcgcggggtggggggggtcctggtctttggcttctcgactcggtcctgtttcgacagcgaacatgtcgcggcctgtcagaaataggaaggttgttgattactcacagtttcaggaatctgatgatgcagatgaagattatggaagagattcgggccctcccactaagaaaattcgatcatctccccgagaagctaaaaataagaggcgatctggaaagaattcacaggaagatagtgaggactcagaagacaaagatgtgaagaccaagaaggatgattctcactcagcagaggatagtgaagatgaaaaagaagatcataaaaatgtgcgccaacaacggcaggcggcatctaaagcagcttctaaacagagagagatgctcatggaagatgtgggcagtgaggaagaacaagaagaggaggatgaggcaccattccaggagaaagattccggcagcgatgaagatttcctaatggaagatgatgacgatagtgactatggcagttcgaaaaagaaaaacaaaaagatggttaagaagtccaaacctgaaagaaaagaaaagaaaatgcccaaacccagactaaaggctacagtgacgccaagtccagtgaaaggcaaagggaaagtgggtcgccccacagcttcaaaggcatcaaaggaaaagactccttctcccaaagaagaagatgaggaaccggaaagcccgccagaaaagaaaacatctacaagccccccacccgagaaatctggggatgaagggtctgaagatgaagccccttctggggaggattaaaagtgatgatggtctggggagagattttattaaaaaaaaaaagaaaaaaaaagaaaaaagagggaggaaaaaaaagaacctacttaagatagaacatggttttggctatggcttgactcatgggctttcagtgcttttttccatttgttgaaagtaacatttctctctctctctcttttttttttttttttttttaaagcaaaccattgtatgtgtaagtgtttaagttacctttttgtctattggtctctttgccagccctcccctttcccaatgaaagccatgtcaaattaatcactggattgactgcttcatctttttatttttaatgaaaggtgtaccacggttgtaaagcaataagatttgagatgaacactattgaaacttcgctttttgctaaaaaatagcaagttgaatagtaatcaaaaaacatagaaagattttagttcaaaatgattgctcctttctctacctggacttttaaaaaatcaattgtcatctaatatgagtttatttgtctatagacacaagtatcaatgtctaaaaaaaatcatgactttaaacttccaccgatgaggcaggtaggagataaagatgaattctgaactgttactaaaagtactcattttttaccttgtagggagggtgggcaatggggttacctgaccttatttgagggtatgggctttcttttttatttcatcacttgttatctcaaagagactcggagccagtgatccttttatcctgctacagtctttagggagctaaaaaaaaaaaaaaagcaggggctgccaaaactcttgatttcatatttccttctctaaatatatatgtatcctgttttttggataaaattttaccaagaatccaaaaaaaaaaaaaccctagaatttaatcaacaagatcagtctacaggtcacagtggatttcttttcaaactgacaatgtttaggttttaagcaaataaagttccagttaatgtgaaactcagtcacaaagagttgagatttttcctttatgaaatagaattgacattcttttatgctataaatgtgcattcaggtcccattaaccatgctctgcttttatttggggatagaacattttctttttcatatcccgatcttcccatttcttcatagaaatgtgataagaagtacatccctgtgatcctgctgcttcgtagagcaccactgcacaccctaccccgagtgccaaccacctctgctataggacactattttcctggccctattcttcacttacttcccatcctgtccttgactaggaatatgttaaatgctgctcccatacaattcagttagctcttgtctttttatttggtccaacccctgctttactgctcatgctgcttaaagcaggagggactagagaaacaaggcattttaggaggcctgtgtgcagttgaaaaccgacttttacacgccttataaaagcagtcaggagatagatccgtaggtttgatccttcacatctaataccaggcgctaatgggaacaaggtttaaagggtcctggtatgctaataaattgaaaaattagtgaaatttaaacttctgcctttttttcctgccttttaatctagatttgcttcctcaatatcctactttgtggtttactaggaacatgcttactctgatctttttttaaaaaacacacagtggcagagtcatttcactattgcactgtgtgttaaagaatgaataaggagttttcagttacatggccaaaaatacaggacttgaacataaatagcagttggatcattctctttcatgacggttaaattcagaggtgtgaactttgtaatgagggtgttaaagattaatctatttgcctaaatgggtttgttcaggtatccatttttaacaaagaagtttgtgttcatatagtaaaagacctatcagtgtttccaccatgcacttctattttttaggagtttataattttaagtcttacattcctagtaacatttgggcttttcttaggttatgtttcgtgaagatttggggggagggctcttttaaaacttcggcctcagttgtttaacagtctctttaatatattaatctgcactaacatctctgtgatatatgcacatattttagaggtaatcatgtcttctagattacttgtgtgcatttgattgggcttcttgtttagggtcccttttaaaattaattcattagattgaaaaatgtattctatatttctgatagactggacagaaggatctgtgtccccaagtgagacaggctctgaataacctttgttttctccactttttattgatgatttaaaacactctagtcttcccctcaaatcatgcatgcaaataggaggacagtggtggtgactcaactggatacaggtgctcaatagtcaggcttgatagtgatgtcaggacgcattacaagctgtaagccgatactgactggccattggcaccatccttgactaaccttcctctttttctctagtgtgcctatggtgaaatggcaatagcattcactgtcgtattttgcagtgctcaggaagtgggacgttaactttgaaggtgcttgtttgtattagctctgctaggtttacctctacaacgtagatttcagcagctatgctgactgacactacattctagttcttaagattttttttccagatccccccttccccagctagacatacgtagcatactttcatcttattcagtctttctgtaacctgctgctgcttttagtcctcctcacctcagatcggaatcaatggagtgggcccagaggatacattttaattccagtaatggtaggtagatttgtcctgctttctaaaacatctcctcatttcatatttccactccatattgattccataagggaaaattaatgggtgtttcctcctttagggaggtaatgcaaagagtgtggacatcttctaatcttgaggaacagtagttgatttcccttgaaggagcttacatattgactgttttcacaataacctgtttgccccagttcaatcctcattttaatacttaatttggtactggctcaaatagcattttcttacagataacaaatcaagagtgaaatttgaggttatactccagtaaagtttttaacacttgtgaatatggtcagctagactaaacttgactcttttttttaatggcttttttatctgtgaacattcagataagtggattttcaagtactggttggggatgggaatcgtgcttttctttaaacttcagtttacgagatgctttgagagcgttaggcaaaagcagaaataaatatcaggagcaacggggaaagctttataaaagatcatggtggccactgttgcagctttgaagaatgagtgctggcttgaacagttctttgcctgcatcattggtagctgcactgaaaggaaaaaactttcaccttaagaatttgaaaaggaagaaacctgggctctggtcttcatggcatttagactgagatgcttaaacagaacagaagtaatacgcatttcctgccataggatagggaaaatgtaacaagctggttgctcttgaggttagaaaattgtctgtttctctgtggatgaagctggatttacttgaaaatggagagttggcttattgtttgaatattgggacatcaagctatctatagccaagtttcagtcgcaaccagttttccctttgtctggggtaaattcgatacaaaatgattctttttgaatcctgaatccataaattacacttttttttttcaaattcacaaaattcacagtggtgctgactgtgtaataaccactattgggaaacatcccgtaaacctgcctgttgccatgccaatggagtgactgaactggtgacatctgtttgagcatgctttgtgtggctggtagaatgccaccgttgtgcatacactttgtacatcaggggtgaagggagggttttctagattattgggggagggtaaaattgggattttttggttgttccttttttgatggggtgtgggggtatagtactcagcttatgccctaaaataacatgtataaaaacccctgaagtattgtgtgggtgtgtacgtgtgagtgtgtgttggtatacgtctggcaattaaagcttggtcttctggaacttagtgaattcttttctctttttcctccagaagtattggttacaagatttgtaaataagagctctacttagtttgtttaccatgaacatgttgcagcaaaccttatgcatctaattcctacaaggttaaagaaaggcttttagacttgccaggttaagcaacagccaagttctcagtaattgtttgcttgatttatcttttagacttcatttggcagctctaaaactcccagtcttccttgattttagtccttaatcttttatgttctgagcaggaagggtaaacagacaggaacctggttcactggtattaactagtcccatgggctgagaccggggcaatctctnttcttcatactggcaangttgctagatactgatcggacaccaaagggttggggcatatcttgcaaaacctttaaagttgctgaatttgccgctgggtctcagggaagtcacagtttgaatgttacccttttttta

SEQ ID NO: 390998 - DNA, 5658 bp, Homo sapiens
cggctggtttgattcatccattttgaagagacgggggagcggggggctcgtctgttccaggagccctgaaccaaagagcagcggagtttgagaagccagcagctcggggttcggcagcagcggtcccatcggctgaagttcggggggggtggggcgccgagcgcgcggggtggggggggtcctggtctttggcttctcgactcggtcctgtttcgacagcgaacatgtcgcggcctgtcagaaataggaaggttgttgattactcacagtttcaggaatctgatgatgcagatgaagattatggaagagattcgggccctcccactaagaaaattcgatcatctccccgagaagctaaaaataagaggcgatctggaaagaattcacaggaagatagtgaggactcagaagacaaagatgtgaagaccaagaaggatgattctcactcagcagaggatagtgaagatgaaaaagaagatcataaaaatgtgcgccaacaacggcaggcggcatctaaagcagcttctaaacagagagagatgctcatggaagatgtgggcagtgaggaagaacaagaagaggaggatgaggcaccattccaggagaaagattccggcagcgatgaagatttcctaatggaagatgatgacgatagtgactatggcagttcgaaaaagaaaaacaaaaagatggttaagaagtccaaacctgaaagaaaagaaaagaaaatgcccaaacccagactaaaggctacagtgacgccaagtccagtgaaaggcaaagggaaagtgggtcgccccacagcttcaaaggcatcaaaggaaaagactccttctcccaaagaagaagatgaggaaccggaaagcccgccagaaaagaaaacatctacaagccccccacccgagaaatctggggatgaagggtctgaagatgaagccccttctggggaggattaaaagtgatgatggtctggggagagattttattaaaaaaaaaaagaaaaaaaaagaaaaaagagggaggaaaaaaaagaacctacttaagatagaacatggttttggctatggcttgactcatgggctttcagtgcttttttccatttgttgaaagtaacatttctctctctctctcttttttttttttttttttttaaagcaaaccattgtatgtgtaagtgtttaagttacctttttgtctattggtctctttgccagccctcccctttcccaatgaaagccatgtcaaattaatcactggattgactgcttcatctttttatttttaatgaaaggtgtaccacggttgtaaagcaataagatttgagatgaacactattgaaacttcgctttttgctaaaaaatagcaagttgaatagtaatcaaaaaacatagaaagattttagttcaaaatgattgctcctttctctacctggacttttaaaaaatcaattgtcatctaatatgagtttatttgtctatagacacaagtatcaatgtctaaaaaaaatcatgactttaaacttccaccgatgaggcaggtaggagataaagatgaattctgaactgttactaaaagtactcattttttaccttgtagggagggtgggcaatggggttacctgaccttatttgagggtatgggctttcttttttatttcatcacttgttatctcaaagagactcggagccagtgatccttttatcctgctacagtctttagggagctaaaaaaaaaaaaaaagcaggggctgccaaaactcttgatttcatatttccttctctaaatatatatgtatcctgttttttggataaaattttaccaagaatccaaaaaaaaaaaaaccctagaatttaatcaacaagatcagtctacaggtcacagtggatttcttttcaaactgacaatgtttaggttttaagcaaataaagttccagttaatgtgaaactcagtcacaaagagttgagatttttcctttatgaaatagaattgacattcttttatgctataaatgtgcattcaggtcccattaaccatgctctgcttttatttggggatagaacattttctttttcatatcccgatcttcccatttcttcatagaaatgtgataagaagtacatccctgtgatcctgctgcttcgtagagcaccactgcacaccctaccccgagtgccaaccacctctgctataggacactattttcctggccctattcttcacttacttcccatcctgtccttgactaggaatatgttaaatgctgctcccatacaattcagttagctcttgtctttttatttggtccaacccctgctttactgctcatgctgcttaaagcaggagggactagagaaacaaggcattttaggaggcctgtgtgcagttgaaaaccgacttttacacgccttataaaagcagtcaggagatagatccgtaggtttgatccttcacatctaataccaggcgctaatgggaacaaggtttaaagggtcctggtatgctaataaattgaaaaattagtgaaatttaaacttctgcctttttttcctgccttttaatctagatttgcttcctcaatatcctactttgtggtttactaggaacatgcttactctgatctttttttaaaaaacacacagtggcagagtcatttcactattgcactgtgtgttaaagaatgaataaggagttttcagttacatggccataaattcagaggtgtgaactttgtaatgagggtgttaaagattaatctatttgcctaaatgggtttgttcaggtatccatttttaacaaagaagtttgtgttcatatagtaaaagacctatcagtgtttccaccatgcacttctattttttaggagtttataattttaagtcttacattcctagtaacatttgggcttttcttaggttatgtttcgtgaagatttggggggagggctcttttaaaacttcggcctcagttgtttaacagtctctttaatatattaatctgcactaacatctctgtgatatatgcacatattttagaggtaatcatgtcttctagattacttgtgtgcatttgattgggcttcttgtttagggtcccttttaaaattaattcattagattgaaaaatgtattctatatttctgatagactggacagaaggatctgtgtccccaagtgagacaggctctgaataacctttgttttctccactttttattgatgatttaaaacactctagtcttcccctcaaatcatgcatgcaaataggaggacagtggtggtgactcaactggatacaggtgctcaatagtcaggcttgatagtgatgtcaggacgcattacaagctgtaagccgatactgactggccattggcaccatccttgactaaccttcctctttttctctagtgtgcctatggtgaaatggcaatagcattcactgtcgtattttgcagtgctcaggaagtgggacgttaactttgaaggtgcttgtttgtattagctctgctaggtttacctctacaacgtagatttcagcagctatgctgactgacactacattctagttcttaagattttttttccagatccccccttccccagctagacatacgtagcatactttcatcttattcagtctttctgtaacctgctgctgcttttagtcctcctcacctcagatcggaatcaatggagtgggcccagaggatacattttaattccagtaatggtaggtagatttgtcctgctttctaaaacatctcctcatttcatatttccactccatattgattccataagggaaaattaatgggtgtttcctcctttagggaggtaatgcaaagagtgtggacatcttctaatcttgaggaacagtagttgatttcccttgaaggagcttacatattgactgttttcacaataacctgtttgccccagttcaatcctcattttaatacttaatttggtactggctcaaatagcattttcttacagataacaaatcaagagtgaaatttgaggttatactccagtaaagtttttaacacttgtgaatatggtcagctagactaaacttgactcttttttttaatggcttttttatctgtgaacattcagataagtggattttcaagtactggttggggatgggaatcgtgcttttctttaaacttcagtttacgagatgctttgagagcgttaggcaaaagcagaaataaatatcaggagcaacggggaaagctttataaaagatcatggtggccactgttgcagctttgaagaatgagtgctggcttgaacagttctttgcctgcatcattggtagctgcactgaaaggaaaaaactttcaccttaagaatttgaaaaggaagaaacctgggctctggtcttcatggcatttagactgagatgcttaaacagaacagaagtaatacgcatttcctgccataggatagggaaaatgtaacaagctggttgctcttgaggttagaaaattgtctgtttctctgtggatgaagctggatttacttgaaaatggagagttggcttattgtttgaatattgggacatcaagctatctatagccaagtttcagtcgcaaccagttttccctttgtctggggtaaattcgatacaaaatgattctttttgaatcctgaatccataaattacacttttttttttcaaattcacaaaattcacagtggtgctgactgtgtaataaccactattgggaaacatcccgtaaacctgcctgttgccatgccaatggagtgactgaactggtgacatctgtttgagcatgctttgtgtggctggtagaatgccaccgttgtgcatacactttgtacatcaggggtgaagggagggttttctagattattgggggagggtaaaattgggattttttggtatgcagatacatacagagactgggatatgtaaaaattaagtatcacaaaagaccatcacacgattctaccaatgcatgttgcatctgtaattcacgaacatggtcaacaaaatcatgttcacttcaaccccatttcatttaaattaaagaaaaaaaccttttaaataaagtggttacattcaaactttaacttccttagtaccatgctgcagatttcagcactgttaaggtattgcaagaatgcccaaccctctggtgtctgatcatgtatctagcaacattgcagtatgaagaaaagagatgccccggtctcagcccatggactagttaatacagtgaagcaggttcctgtcttttacccttcctgctcagaacataaaagattaaggactaaaatcaaggaagactgggagttttagagctggcaaaatgaagtctaaaagataaatcaaggcaaacaattactgagaacttggctgttgcttaacctggcaagtctaaaagcctttctttaaccttgtaggaattagatgcataaggtttgctgcaacatgttcatggtaaacaaactaagtagagctcttatttacaaatcttgtaacaaatacttctggaggaaaaagagaaaagaatcactaagtccagaagacaagcttaattgccagacgtatacaacacacatcacacgtaacaccacacatattcggggtttatactgtattttagggctagctgagtactatac

SEQ ID NO: 390999 - DNA, 5274 bp, Homo sapiens
cggctggtttgattcatccattttgaagagacgggggagcggggggctcgtctgttccaggagccctgaaccaaagagcagcggagtttgagaagccagcagctcggggttcggcagcagcggtcccatcggctgaagttcggggggggtggggcgccgagcgcgcggggtggggggggtcctggtctttggcttctcgactcggtcctgtttcgacagcgaacatgtcgcggcctgtcagaaataggaaggttgttgattactcacagtttcaggaatctgatgatgcagatgaagattatggaagagattcgggccctcccactaagaaaattcgatcatctccccgagaagctaaaaataagaggcgatctggaaagaattcacaggaagatagtgaggactcagaagacaaagatgtgaagaccaagaaggatgattctcactcagcagaggatagtgaagatgaaaaagaagatcataaaaatgtgcgccaacaacggcaggcggcatctaaagcagcttctaaacagagagagatgctcatggaagatgtgggcagtgaggaagaacaagaagaggaggatgaggcaccattccaggagaaagattccggcagcgatgaagatttcctaatggaagatgatgacgatagtgactatggcagttcgaaaaagaaaaacaaaaagatggttaagaagtccaaacctgaaagaaaagaaaagaaaatgcccaaacccagactaaaggctacagtgacgccaagtccagtgaaaggcaaagggaaagtgggtcgccccacagcttcaaaggcatcaaaggaaaagactccttctcccaaagaagaagatgaggaaccggaaagcccgccagaaaagaaaacatctacaagccccccacccgagaaatctggggatgaagggtctgaagatgaagccccttctggggaggattaaaagtgatgatggtctggggagagattttattaaaaaaaaaaagaaaaaaaaagaaaaaagagggaggaaaaaaaagaacctacttaagatagaacatggttttggctatggcttgactcatgggctttcagtgcttttttccatttgttgaaagtaacatttctctctctctctcttttttttttttttttttttaaagcaaaccattgtatgtgtaagtgtttaagttactatttgagggtatgggctttcttttttatttcatcacttgttatctcaaagagactcggagccagtgatccttttatcctgctacagtctttagggagctaaaaaaaaaaaaaaagcaggggctgccaaaactcttgatttcatatttccttctctaaatatatatgtatcctgttttttggataaaattttaccaagaatccaaaaaaaaaaaaaccctagaatttaatcaacaagatcagtctacaggtcacagtggatttcttttcaaactgacaatgtttaggttttaagcaaataaagttccagttaatgtgaaactcagtcacaaagagttgagatttttcctttatgaaatagaattgacattcttttatgctataaatgtgcattcaggtcccattaaccatgctctgcttttatttggggatagaacattttctttttcatatcccgatcttcccatttcttcatagaaatgtgataagaagtacatccctgtgatcctgctgcttcgtagagcaccactgcacaccctaccccgagtgccaaccacctctgctataggacactattttcctggccctattcttcacttacttcccatcctgtccttgactaggaatatgttaaatgctgctcccatacaattcagttagctcttgtctttttatttggtccaacccctgctttactgctcatgctgcttaaagcaggagggactagagaaacaaggcattttaggaggcctgtgtgcagttgaaaaccgacttttacacgccttataaaagcagtcaggagatagatccgtaggtttgatccttcacatctaataccaggcgctaatgggaacaaggtttaaagggtcctggtatgctaataaattgaaaaattagtgaaatttaaacttctgcctttttttcctgccttttaatctagatttgcttcctcaatatcctactttgtggtttactaggaacatgcttactctgatctttttttaaaaaacacacagtggcagagtcatttcactattgcactgtgtgttaaagaatgaataaggagttttcagttacatggccaaaaatacaggacttgaacataaatagcagttggatcattctctttcatgacggttaaattcagaggtgtgaactttgtaatgagggtgttaaagattaatctatttgcctaaatgggtttgttcaggtatccatttttaacaaagaagtttgtgttcatatagtaaaagacctatcagtgtttccaccatgcacttctattttttaggagtttataattttaagtcttacattcctagtaacatttgggcttttcttaggttatgtttcgtgaagatttggggggagggctcttttaaaacttcggcctcagttgtttaacagtctctttaatatattaatctgcactaacatctctgtgatatatgcacatattttagaggtaatcatgtcttctagattacttgtgtgcatttgattgggcttcttgtttagggtcccttttaaaattaattcattagattgaaaaatgtattctatatttctgatagactggacagaaggatctgtgtccccaagtgagacaggctctgaataacctttgttttctccactttttattgatgatttaaaacactctagtcttcccctcaaatcatgcatgcaaataggaggacagtggtggtgactcaactggatacaggtgctcaatagtcaggcttgatagtgatgtcaggacgcattacaagctgtaagccgatactgactggccattggcaccatccttgactaaccttcctctttttctctagtgtgcctatggtgaaatggcaatagcattcactgtcgtattttgcagtgctcaggaagtgggacgttaactttgaaggtgcttgtttgtattagctctgctaggtttacctctacaacgtagatttcagcagctatgctgactgacactacattctagttcttaagattttttttccagatccccccttccccagctagacatacgtagcatactttcatcttattcagtctttctgtaacctgctgctgcttttagtcctcctcacctcagatcggaatcaatggagtgggcccagaggatacattttaattccagtaatggtaggtagatttgtcctgctttctaaaacatctcctcatttcatatttccactccatattgattccataagggaaaattaatgggtgtttcctcctttagggaggtaatgcaaagagtgtggacatcttctaatcttgaggaacagtagttgatttcccttgaaggagcttacatattgactgttttcacaataacctgtttgccccagttcaatcctcattttaatacttaatttggtactggctcaaatagcattttcttacagataacaaatcaagagtgaaatttgaggttatactccagtaaagtttttaacacttgtgaatatggtcagctagactaaacttgactcttttttttaatggcttttttatctgtgaacattcagataagtggattttcaagtactggttggggatgggaatcgtgcttttctttaaacttcagtttacgagatgctttgagagcgttaggcaaaagcagaaataaatatcaggagcaacggggaaagctttataaaagatcatggtggccactgttgcagctttgaagaatgagtgctggcttgaacagttctttgcctgcatcattggtagctgcactgaaaggaaaaaactttcaccttaagaatttgaaaaggaagaaacctgggctctggtcttcatggcatttagactgagatgcttaaacagaacagaagtaatacgcatttcctgccataggatagggaaaatgtaacaagctggttgctcttgaggttagaaaattgtctgtttctctgtggatgaagctggatttacttgaaaatggagagttggcttattgtttgaatattgggacatcaagctatctatagccaagtttcagtcgcaaccagttttccctttgtctggggtaaattcgatacaaaatgattctttttgaatcctgaatccataaattacacttttttttttcaaattcacaaaattcacagtggtgctgactgtgtaataaccactattgggaaacatcccgtaaacctgcctgttgccatgccaatggagtgactgaactggtgacatctgtttgagcatgctttgtgtggctggtagaatgccaccgttgtgcatacactttgtacatcaggggtgaagggagggttttctagattattgggggagggtaaaattgggattttttggtatgcagatacatacagagactgggatatgtaaaaattaagtatcacaaaagaccatcacacgattctaccaatgcatgttgcatctgtaattcacgaacatggtcaacaaaatcatgttcacttcaaccccatttcatttaaattaaagaaaaaaaccttttaaataaagtggttacattcaaactttaacttccttagtaccatgctgcagatttcagcactgttaaggtattgcaagaatgcccaaccctctggtgtctgatcatgtatctagcaacattgcagtatgaagaaaagagatgccccggtctcagcccatggactagttaatacagtgaagcaggttcctgtcttttacccttcctgctcagaacataaaagattaaggactaaaatcaaggaagactgggagttttagagctggcaaaatgaagtctaaaagataaatcaaggcaaacaattactgagaacttggctgttgcttaacctggcaagtctaaaagcctttctttaaccttgtaggaattagatgcataaggtttgctgcaacatgttcatggtaaacaaactaagtagagctcttatttacaaatcttgtaacaaatacttctggaggaaaaagagaaaagaatcactaagtccagaagacaagcttaattgccagacgtatacaacacacatcacacgtaacaccacacatattcggggtttatactgtattttagggctagctgagtactatac

SEQ ID NO: 391000 - DNA, 5226 bp, Homo sapiens
gcggccgcctactactactactactgctcgaattcaagcttctaacgatgtacggggtcatggaagatgtgggcagtgaggaagaacaagaagaggaggatgaggcaccattccaggagaaagattccggcagcgatgaagatttcctaatggaagatgatgacgatagtgactatggcagttcgaaaaagaaaaacaaaaagatggttaagaagtccaaacctgaaagaaaagaaaagaaaatgcccaaacccagactaaaggctacagtgacgccaagtccagtgaaaggcaaagggaaagtgggtcgccccacagcttcaaaggcatcaaaggaaaagactccttctcccaaagaagaagatgaggaaccggaaagcccgccagaaaagaaaacatctacaagccccccacccgagaaatctggggatgaagggtctgaagatgaagccccttctggggaggattaaaagtgatgatggtctggggagagattttattaaaaaaaaaaagaaaaaaaaagaaaaaagagggaggaaaaaaaagaacctacttaagatagaacatggttttggctatggcttgactcatgggctttcagtgcttttttccatttgttgaaagtaacatttctctctctctctcttttttttttttttttttttaaagcaaaccattgtatgtgtaagtgtttaagttacctttttgtctattggtctctttgccagccctcccctttcccaatgaaagccatgtcaaattaatcactggattgactgcttcatctttttatttttaatgaaaggtgtaccacggttgtaaagcaataagatttgagatgaacactattgaaacttcgctttttgctaaaaaatagcaagttgaatagtaatcaaaaaacatagaaagattttagttcaaaatgattgctcctttctctacctggacttttaaaaaatcaattgtcatctaatatgagtttatttgtctatagacacaagtatcaatgtctaaaaaaaatcatgactttaaacttccaccgatgaggcaggtaggagataaagatgaattctgaactgttactaaaagtactcattttttaccttgtagggagggtgggcaatggggttacctgaccttatttgagggtatgggctttcttttttatttcatcacttgttatctcaaagagactcggagccagtgatccttttatcctgctacagtctttagggagctaaaaaaaaaaaaaaagcaggggctgccaaaactcttgatttcatatttccttctctaaatatatatgtatcctgttttttggataaaattttaccaagaatccaaaaaaaaaaaaaccctagaatttaatcaacaagatcagtctacaggtcacagtggatttcttttcaaactgacaatgtttaggttttaagcaaataaagttccagttaatgtgaaactcagtcacaaagagttgagatttttcctttatgaaatagaattgacattcttttatgctataaatgtgcattcaggtcccattaaccatgctctgcttttatttggggatagaacattttctttttcatatcccgatcttcccatttcttcatagaaatgtgataagaagtacatccctgtgatcctgctgcttcgtagagcaccactgcacaccctaccccgagtgccaaccacctctgctataggacactattttcctggccctattcttcacttacttcccatcctgtccttgactaggaatatgttaaatgctgctcccatacaattcagttagctcttgtctttttatttggtccaacccctgctttactgctcatgctgcttaaagcaggagggactagagaaacaaggcattttaggaggcctgtgtgcagttgaaaaccgacttttacacgccttataaaagcagtcaggagatagatccgtaggtttgatccttcacatctaataccaggcgctaatgggaacaaggtttaaagggtcctggtatgctaataaattgaaaaattagtgaaatttaaacttctgcctttttttcctgccttttaatctagatttgcttcctcaatatcctactttgtggtttactaggaacatgcttactctgatctttttttaaaaaacacacagtggcagagtcatttcactattgcactgtgtgttaaagaatgaataaggagttttcagttacatggccaaaaatacaggacttgaacataaatagcagttggatcattctctttcatgacggttaaattcagaggtgtgaactttgtaatgagggtgttaaagattaatctatttgcctaaatgggtttgttcaggtatccatttttaacaaagaagtttgtgttcatatagtaaaagacctatcagtgtttccaccatgcacttctattttttaggagtttataattttaagtcttacattcctagtaacatttgggcttttcttaggttatgtttcgtgaagatttggggggagggctcttttaaaacttcggcctcagttgtttaacagtctctttaatatattaatctgcactaacatctctgtgatatatgcacatattttagaggtaatcatgtcttctagattacttgtgtgcatttgattgggcttcttgtttagggtcccttttaaaattaattcattagattgaaaaatgtattctatatttctgatagactggacagaaggatctgtgtccccaagtgagacaggctctgaataacctttgttttctccactttttattgatgatttaaaacactctagtcttcccctcaaatcatgcatgcaaataggaggacagtggtggtgactcaactggatacaggtgctcaatagtcaggcttgatagtgatgtcaggacgcattacaagctgtaagccgatactgactggccattggcaccatccttgactaaccttcctctttttctctagtgtgcctatggtgaaatggcaatagcattcactgtcgtattttgcagtgctcaggaagtgggacgttaactttgaaggtgcttgtttgtattagctctgctaggtttacctctacaacgtagatttcagcagctatgctgactgacactacattctagttcttaagattttttttccagatccccccttccccagctagacatacgtagcatactttcatcttattcagtctttctgtaacctgctgctgcttttagtcctcctcacctcagatcggaatcaatggagtgggcccagaggatacattttaattccagtaatggtaggtagatttgtcctgctttctaaaacatctcctcatttcatatttccactccatattgattccataagggaaaattaatgggtgtttcctcctttagggaggtaatgcaaagagtgtggacatcttctaatcttgaggaacagtagttgatttcccttgaaggagcttacatattgactgttttcacaataacctgtttgccccagttcaatcctcattttaatacttaatttggtactggctcaaatagcattttcttacagataacaaatcaagagtgaaatttgaggttatactccagtaaagtttttaacacttgtgaatatggtcagctagactaaacttgactcttttttttaatggcttttttatctgtgaacattcagataagtggattttcaagtactggttggggatgggaatcgtgcttttctttaaacttcagtttacgagatgctttgagagcgttaggcaaaagcagaaataaatatcaggagcaacggggaaagctttataaaagatcatggtggccactgttgcagctttgaagaatgagtgctggcttgaacagttctttgcctgcatcattggtagctgcactgaaaggaaaaaactttcaccttaagaatttgaaaaggaagaaacctgggctctggtcttcatggcatttagactgagatgcttaaacagaacagaagtaatacgcatttcctgccataggatagggaaaatgtaacaagctggttgctcttgaggttagaaaattgtctgtttctctgtggatgaagctggatttacttgaaaatggagagttggcttattgtttgaatattgggacatcaagctatctatagccaagtttcagtcgcaaccagttttccctttgtctggggtaaattcgatacaaaatgattctttttgaatcctgaatccataaattacacttttttttttcaaattcacaaaattcacagtggtgctgactgtgtaataaccactattgggaaacatcccgtaaacctgcctgttgccatgccaatggagtgactgaactggtgacatctgtttgagcatgctttgtgtggctggtagaatgccaccgttgtgcatacactttgtacatcaggggtgaagggagggttttctagattattgggggagggtaaaattgggattttttggtatgcagatacatacagagactgggatatgtaaaaattaagtatcacaaaagaccatcacacgattctaccaatgcatgttgcatctgtaattcacgaacatggtcaacaaaatcatgttcacttcaaccccatttcatttaaattaaagaaaaaaaccttttaaataaagtggttacattcaaactttaacttccttagtaccatgctgcagatttcagcactgttaaggtattgcaagaatgcccaaccctctggtgtctgatcatgtatctagcaacattgcagtatgaagaaaagagatgccccggtctcagcccatggactagttaatacagtgaagcaggttcctgtcttttacccttcctgctcagaacataaaagattaaggactaaaatcaaggaagactgggagttttagagctggcaaaatgaagtctaaaagataaatcaaggcaaacaattactgagaacttggctgttgcttaacctggcaagtctaaaagcctttctttaaccttgtaggaattagatgcataaggtttgctgcaacatgttcatggtaaacaaactaagtagagctcttatttacaaatcttgtaacaaatacttctggaggaaaaagagaaaagaatcactaagtccagaagacaagcttaattgccagacgtatacaacacacatcacacgtaacaccacacatattcggggtttatactgtattttagggctagctgagtactatac

SEQ ID NO: 391001 - DNA, 5144 bp, Homo sapiens
tacgcgctgttcactatcttcatcaccattccaggagaaagattccggcagcgatgaagatttcctaatggaagatgatgacgatagtgactatggcagttcgaaaaagaaaaacaaaaagatggttaagaagtccaaacctgaaagaaaagaaaagaaaatgcccaaacccagactaaaggctacagtgacgccaagtccagtgaaaggcaaagggaaagtgggtcgccccacagcttcaaaggcatcaaaggaaaagactccttctcccaaagaagaagatgaggaaccggaaagcccgccagaaaagaaaacatctacaagccccccacccgagaaatctggggatgaagggtctgaagatgaagccccttctggggaggattaaaagtgatgatggtctggggagagattttattaaaaaaaaaaagaaaaaaaaagaaaaaagagggaggaaaaaaaagaacctacttaagatagaacatggttttggctatggcttgactcatgggctttcagtgcttttttccatttgttgaaagtaacatttctctctctctctcttttttttttttttttttttaaagcaaaccattgtatgtgtaagtgtttaagttacctttttgtctattggtctctttgccagccctcccctttcccaatgaaagccatgtcaaattaatcactggattgactgcttcatctttttatttttaatgaaaggtgtaccacggttgtaaagcaataagatttgagatgaacactattgaaacttcgctttttgctaaaaaatagcaagttgaatagtaatcaaaaaacatagaaagattttagttcaaaatgattgctcctttctctacctggacttttaaaaaatcaattgtcatctaatatgagtttatttgtctatagacacaagtatcaatgtctaaaaaaaatcatgactttaaacttccaccgatgaggcaggtaggagataaagatgaattctgaactgttactaaaagtactcattttttaccttgtagggagggtgggcaatggggttacctgaccttatttgagggtatgggctttcttttttatttcatcacttgttatctcaaagagactcggagccagtgatccttttatcctgctacagtctttagggagctaaaaaaaaaaaaaaagcaggggctgccaaaactcttgatttcatatttccttctctaaatatatatgtatcctgttttttggataaaattttaccaagaatccaaaaaaaaaaaaaccctagaatttaatcaacaagatcagtctacaggtcacagtggatttcttttcaaactgacaatgtttaggttttaagcaaataaagttccagttaatgtgaaactcagtcacaaagagttgagatttttcctttatgaaatagaattgacattcttttatgctataaatgtgcattcaggtcccattaaccatgctctgcttttatttggggatagaacattttctttttcatatcccgatcttcccatttcttcatagaaatgtgataagaagtacatccctgtgatcctgctgcttcgtagagcaccactgcacaccctaccccgagtgccaaccacctctgctataggacactattttcctggccctattcttcacttacttcccatcctgtccttgactaggaatatgttaaatgctgctcccatacaattcagttagctcttgtctttttatttggtccaacccctgctttactgctcatgctgcttaaagcaggagggactagagaaacaaggcattttaggaggcctgtgtgcagttgaaaaccgacttttacacgccttataaaagcagtcaggagatagatccgtaggtttgatccttcacatctaataccaggcgctaatgggaacaaggtttaaagggtcctggtatgctaataaattgaaaaattagtgaaatttaaacttctgcctttttttcctgccttttaatctagatttgcttcctcaatatcctactttgtggtttactaggaacatgcttactctgatctttttttaaaaaacacacagtggcagagtcatttcactattgcactgtgtgttaaagaatgaataaggagttttcagttacatggccaaaaatacaggacttgaacataaatagcagttggatcattctctttcatgacggttaaattcagaggtgtgaactttgtaatgagggtgttaaagattaatctatttgcctaaatgggtttgttcaggtatccatttttaacaaagaagtttgtgttcatatagtaaaagacctatcagtgtttccaccatgcacttctattttttaggagtttataattttaagtcttacattcctagtaacatttgggcttttcttaggttatgtttcgtgaagatttggggggagggctcttttaaaacttcggcctcagttgtttaacagtctctttaatatattaatctgcactaacatctctgtgatatatgcacatattttagaggtaatcatgtcttctagattacttgtgtgcatttgattgggcttcttgtttagggtcccttttaaaattaattcattagattgaaaaatgtattctatatttctgatagactggacagaaggatctgtgtccccaagtgagacaggctctgaataacctttgttttctccactttttattgatgatttaaaacactctagtcttcccctcaaatcatgcatgcaaataggaggacagtggtggtgactcaactggatacaggtgctcaatagtcaggcttgatagtgatgtcaggacgcattacaagctgtaagccgatactgactggccattggcaccatccttgactaaccttcctctttttctctagtgtgcctatggtgaaatggcaatagcattcactgtcgtattttgcagtgctcaggaagtgggacgttaactttgaaggtgcttgtttgtattagctctgctaggtttacctctacaacgtagatttcagcagctatgctgactgacactacattctagttcttaagattttttttccagatccccccttccccagctagacatacgtagcatactttcatcttattcagtctttctgtaacctgctgctgcttttagtcctcctcacctcagatcggaatcaatggagtgggcccagaggatacattttaattccagtaatggtaggtagatttgtcctgctttctaaaacatctcctcatttcatatttccactccatattgattccataagggaaaattaatgggtgtttcctcctttagggaggtaatgcaaagagtgtggacatcttctaatcttgaggaacagtagttgatttcccttgaaggagcttacatattgactgttttcacaataacctgtttgccccagttcaatcctcattttaatacttaatttggtactggctcaaatagcattttcttacagataacaaatcaagagtgaaatttgaggttatactccagtaaagtttttaacacttgtgaatatggtcagctagactaaacttgactcttttttttaatggcttttttatctgtgaacattcagataagtggattttcaagtactggttggggatgggaatcgtgcttttctttaaacttcagtttacgagatgctttgagagcgttaggcaaaagcagaaataaatatcaggagcaacggggaaagctttataaaagatcatggtggccactgttgcagctttgaagaatgagtgctggcttgaacagttctttgcctgcatcattggtagctgcactgaaaggaaaaaactttcaccttaagaatttgaaaaggaagaaacctgggctctggtcttcatggcatttagactgagatgcttaaacagaacagaagtaatacgcatttcctgccataggatagggaaaatgtaacaagctggttgctcttgaggttagaaaattgtctgtttctctgtggatgaagctggatttacttgaaaatggagagttggcttattgtttgaatattgggacatcaagctatctatagccaagtttcagtcgcaaccagttttccctttgtctggggtaaattcgatacaaaatgattctttttgaatcctgaatccataaattacacttttttttttcaaattcacaaaattcacagtggtgctgactgtgtaataaccactattgggaaacatcccgtaaacctgcctgttgccatgccaatggagtgactgaactggtgacatctgtttgagcatgctttgtgtggctggtagaatgccaccgttgtgcatacactttgtacatcaggggtgaagggagggttttctagattattgggggagggtaaaattgggattttttggtatgcagatacatacagagactgggatatgtaaaaattaagtatcacaaaagaccatcacacgattctaccaatgcatgttgcatctgtaattcacgaacatggtcaacaaaatcatgttcacttcaaccccatttcatttaaattaaagaaaaaaaccttttaaataaagtggttacattcaaactttaacttccttagtaccatgctgcagatttcagcactgttaaggtattgcaagaatgcccaaccctctggtgtctgatcatgtatctagcaacattgcagtatgaagaaaagagatgccccggtctcagcccatggactagttaatacagtgaagcaggttcctgtcttttacccttcctgctcagaacataaaagattaaggactaaaatcaaggaagactgggagttttagagctggcaaaatgaagtctaaaagataaatcaaggcaaacaattactgagaacttggctgttgcttaacctggcaagtctaaaagcctttctttaaccttgtaggaattagatgcataaggtttgctgcaacatgttcatggtaaacaaactaagtagagctcttatttacaaatcttgtaacaaatacttctggaggaaaaagagaaaagaatcactaagtccagaagacaagcttaattgccagacgtatacaacacacatcacacgtaacaccacacatattcggggtttatactgtattttagggctagctgagtactatac

SEQ ID NO: 391002 - DNA, 4997 bp, Homo sapiens
cccaccccatgaggaaagatgccccagactaaaggctacagtgacgccaagtccagtgaaaggcaaagggaaagtgggtcgccccacagcttcaaaggcatcaaaggaaaagactccttctcccaaagaagaagatgaggaaccggaaagcccgccagaaaagaaaacatctacaagccccccacccgagaaatctggggatgaagggtctgaagatgaagccccttctggggaggattaaaagtgatgatggtctggggagagattttattaaaaaaaaaaagaaaaaaaaagaaaaaagagggaggaaaaaaaagaacctacttaagatagaacatggttttggctatggcttgactcatgggctttcagtgcttttttccatttgttgaaagtaacatttctctctctctctcttttttttttttttttttttaaagcaaaccattgtatgtgtaagtgtttaagttacctttttgtctattggtctctttgccagccctcccctttcccaatgaaagccatgtcaaattaatcactggattgactgcttcatctttttatttttaatgaaaggtgtaccacggttgtaaagcaataagatttgagatgaacactattgaaacttcgctttttgctaaaaaatagcaagttgaatagtaatcaaaaaacatagaaagattttagttcaaaatgattgctcctttctctacctggacttttaaaaaatcaattgtcatctaatatgagtttatttgtctatagacacaagtatcaatgtctaaaaaaaatcatgactttaaacttccaccgatgaggcaggtaggagataaagatgaattctgaactgttactaaaagtactcattttttaccttgtagggagggtgggcaatggggttacctgaccttatttgagggtatgggctttcttttttatttcatcacttgttatctcaaagagactcggagccagtgatccttttatcctgctacagtctttagggagctaaaaaaaaaaaaaaagcaggggctgccaaaactcttgatttcatatttccttctctaaatatatatgtatcctgttttttggataaaattttaccaagaatccaaaaaaaaaaaaaccctagaatttaatcaacaagatcagtctacaggtcacagtggatttcttttcaaactgacaatgtttaggttttaagcaaataaagttccagttaatgtgaaactcagtcacaaagagttgagatttttcctttatgaaatagaattgacattcttttatgctataaatgtgcattcaggtcccattaaccatgctctgcttttatttggggatagaacattttctttttcatatcccgatcttcccatttcttcatagaaatgtgataagaagtacatccctgtgatcctgctgcttcgtagagcaccactgcacaccctaccccgagtgccaaccacctctgctataggacactattttcctggccctattcttcacttacttcccatcctgtccttgactaggaatatgttaaatgctgctcccatacaattcagttagctcttgtctttttatttggtccaacccctgctttactgctcatgctgcttaaagcaggagggactagagaaacaaggcattttaggaggcctgtgtgcagttgaaaaccgacttttacacgccttataaaagcagtcaggagatagatccgtaggtttgatccttcacatctaataccaggcgctaatgggaacaaggtttaaagggtcctggtatgctaataaattgaaaaattagtgaaatttaaacttctgcctttttttcctgccttttaatctagatttgcttcctcaatatcctactttgtggtttactaggaacatgcttactctgatctttttttaaaaaacacacagtggcagagtcatttcactattgcactgtgtgttaaagaatgaataaggagttttcagttacatggccaaaaatacaggacttgaacataaatagcagttggatcattctctttcatgacggttaaattcagaggtgtgaactttgtaatgagggtgttaaagattaatctatttgcctaaatgggtttgttcaggtatccatttttaacaaagaagtttgtgttcatatagtaaaagacctatcagtgtttccaccatgcacttctattttttaggagtttataattttaagtcttacattcctagtaacatttgggcttttcttaggttatgtttcgtgaagatttggggggagggctcttttaaaacttcggcctcagttgtttaacagtctctttaatatattaatctgcactaacatctctgtgatatatgcacatattttagaggtaatcatgtcttctagattacttgtgtgcatttgattgggcttcttgtttagggtcccttttaaaattaattcattagattgaaaaatgtattctatatttctgatagactggacagaaggatctgtgtccccaagtgagacaggctctgaataacctttgttttctccactttttattgatgatttaaaacactctagtcttcccctcaaatcatgcatgcaaataggaggacagtggtggtgactcaactggatacaggtgctcaatagtcaggcttgatagtgatgtcaggacgcattacaagctgtaagccgatactgactggccattggcaccatccttgactaaccttcctctttttctctagtgtgcctatggtgaaatggcaatagcattcactgtcgtattttgcagtgctcaggaagtgggacgttaactttgaaggtgcttgtttgtattagctctgctaggtttacctctacaacgtagatttcagcagctatgctgactgacactacattctagttcttaagattttttttccagatccccccttccccagctagacatacgtagcatactttcatcttattcagtctttctgtaacctgctgctgcttttagtcctcctcacctcagatcggaatcaatggagtgggcccagaggatacattttaattccagtaatggtaggtagatttgtcctgctttctaaaacatctcctcatttcatatttccactccatattgattccataagggaaaattaatgggtgtttcctcctttagggaggtaatgcaaagagtgtggacatcttctaatcttgaggaacagtagttgatttcccttgaaggagcttacatattgactgttttcacaataacctgtttgccccagttcaatcctcattttaatacttaatttggtactggctcaaatagcattttcttacagataacaaatcaagagtgaaatttgaggttatactccagtaaagtttttaacacttgtgaatatggtcagctagactaaacttgactcttttttttaatggcttttttatctgtgaacattcagataagtggattttcaagtactggttggggatgggaatcgtgcttttctttaaacttcagtttacgagatgctttgagagcgttaggcaaaagcagaaataaatatcaggagcaacggggaaagctttataaaagatcatggtggccactgttgcagctttgaagaatgagtgctggcttgaacagttctttgcctgcatcattggtagctgcactgaaaggaaaaaactttcaccttaagaatttgaaaaggaagaaacctgggctctggtcttcatggcatttagactgagatgcttaaacagaacagaagtaatacgcatttcctgccataggatagggaaaatgtaacaagctggttgctcttgaggttagaaaattgtctgtttctctgtggatgaagctggatttacttgaaaatggagagttggcttattgtttgaatattgggacatcaagctatctatagccaagtttcagtcgcaaccagttttccctttgtctggggtaaattcgatacaaaatgattctttttgaatcctgaatccataaattacacttttttttttcaaattcacaaaattcacagtggtgctgactgtgtaataaccactattgggaaacatcccgtaaacctgcctgttgccatgccaatggagtgactgaactggtgacatctgtttgagcatgctttgtgtggctggtagaatgccaccgttgtgcatacactttgtacatcaggggtgaagggagggttttctagattattgggggagggtaaaattgggattttttggtatgcagatacatacagagactgggatatgtaaaaattaagtatcacaaaagaccatcacacgattctaccaatgcatgttgcatctgtaattcacgaacatggtcaacaaaatcatgttcacttcaaccccatttcatttaaattaaagaaaaaaaccttttaaataaagtggttacattcaaactttaacttccttagtaccatgctgcagatttcagcactgttaaggtattgcaagaatgcccaaccctctggtgtctgatcatgtatctagcaacattgcagtatgaagaaaagagatgccccggtctcagcccatggactagttaatacagtgaagcaggttcctgtcttttacccttcctgctcagaacataaaagattaaggactaaaatcaaggaagactgggagttttagagctggcaaaatgaagtctaaaagataaatcaaggcaaacaattactgagaacttggctgttgcttaacctggcaagtctaaaagcctttctttaaccttgtaggaattagatgcataaggtttgctgcaacatgttcatggtaaacaaactaagtagagctcttatttacaaatcttgtaacaaatacttctggaggaaaaagagaaaagaatcactaagtccagaagacaagcttaattgccagacgtatacaacacacatcacacgtaacaccacacatattcggggtttatactgtattttagggctagctgagtactatac

SEQ ID NO: 391003 - DNA, 1949 bp, Homo sapiens
cggctggtttgattcatccattttgaagagacgggggagcggggggctcgtctgttccaggagccctgaaccaaagagcagcggagtttgagaagccagcagctcggggttcggcagcagcggtcccatcggctgaagttcggggggggtggggcgccgagcgcgcggggtggggggggtcctggtctttggcttctcgactcggtcctgtttcgacagcgaacatgtcgcggcctgtcagaaataggaaggttgttgattactcacagtttcaggaatctgatgatgcagatgaagattatggaagagattcgggccctcccactaagaaaattcgatcatctccccgagaagctaaaaataagaggcgatctggaaagaattcacaggaagatagtgaggactcagaagacaaagatgtgaagaccaagaaggatgattctcactcagcagaggatagtgaagatgaaaaagaagatcataaaaatgtgcgccaacaacggcaggcggcatctaaagcagcttctaaacagagagagatgctcatggaagatgtgggcagtgaggaagaacaagaagaggaggatgaggcaccattccaggagaaagattccggcagcgatgaagatttcctaatggaagatgatgacgatagtgactatggcagttcgaaaaagaaaaacaaaaagatggttaagaagtccaaacctgaaagaaaagaaaagaaaatgcccaaacccagactaaaggctacagtgacgccaagtccagtgaaaggcaaagggaaagtgggtcgccccacagcttcaaaggcatcaaaggaaaagactccttctcccaaagaagaagatgaggaaccggaaagcccgccagaaaagaaaacatctacaagccccccacccgagaaatctggggatgaagggtctgaagatgaagccccttctggggaggattaaaagtgatgatggtctggggagagattttattaaaaaaaaaaagaaaaaaaaagaaaaaagagggaggaaaaaaaagaacctacttaagatagaacatggttttggctatggcttgactcatgggctttcagtgcttttttccatttgttgaaagtaacatttctctctctctctcttttttttttttttttttttaaagcaaaccattgtatgtgtaagtgtttaagttacctttttgtctattggtctctttgccagccctcccctttcccaatgaaagccatgtcaaattaatcactggattgactgcttcatctttttatttttaatgaaaggtgtaccacggttgtaaagcaataagatttgagatgaacactattgaaacttcgctttttgctaaaaaatagcaagttgaatagtaatcaaaaaacatagaaagattttagttcaaaatgattgctcctttctctacctggacttttaaaaaatcaattgtcatctaatatgagtttatttgtctatagacacaagtatcaatgtctaaaaaaaatcatgactttaaacttccaccgatgaggcaggtaggagataaagatgaattctgaactgttactaaaagtactcattttttaccttgtagggagggtgggcaatggggttacctgaccttatttgagggtatgggctttcttttttatttcatcacttgttatctcaaagagactcggagccagtgatccttttatcctgctacagtctttagggagctaaaaaaaaaaaaaaagcaggggctgccaaaactcttgatttcatatttccttctctaaatatatatgtatcctgttttttggataaaattttaccaagaatccaaaaaaaaaaaaaccctagaatttaatcaacaagatcagtctacaggtcacagtggatttcttttcaaactgacaatgtttaggttttaagcaaataaagttccagttaatgtgaaactca

SEQ ID NO: 391004 - DNA, 3034 bp, Homo sapiens
cggctggtttgattcatccattttgaagagacgggggagcggggggctcgtctgttccaggagccctgaaccaaagagcagcggagtttgagaagccagcagctcggggttcggcagcagcggtcccatcggctgaagttcggggggggtggggcgccgagcgcgcggggtggggggggtcctggtctttggcttctcgactcggtcctgtttcgacagcgaacatgtcgcggcctgtcagaaataggaaggttgttgattactcacagtttcaggaatctgatgatgcagatgaagattatggaagagattcgggccctcccactaagaaaattcgatcatctccccgagaagctaaaaataagaggcgatctggaaagaattcacaggaagatagtgaggactcagaagacaaagatgtgaagaccaagaaggatgattctcactcagcagaggatagtgaagatgaaaaagaagatcataaaaatgtgcgccaacaacggcaggcggcatctaaagcagcttctaaacagagagagatgctcatggaagatgtgggcagtgaggaagaacaagaagaggaggatgaggcaccattccaggagaaagattccggcagcgatgaagatttcctaatggaagatgatgacgatagtgactatggcagttcgaaaaagaaaaacaaaaagatggttaagaagtccaaacctgaaagaaaagaaaagaaaatgcccaaacccagactaaaggctacagtgacgccaagtccagtgaaaggcaaagggaaagtgggtcgccccacagcttcaaaggcatcaaaggaaaagactccttctcccaaagaagaagatgaggaaccggaaagcccgccagaaaagaaaacatctacaagccccccacccgagaaatctggggatgaagggtctgaagatgaagccccttctggggaggattaaaagtgatgatggtctggggagagattttattaaaaaaaaaaagaaaaaaaaagaaaaaagagggaggaaaaaaaagaacctacttaagatagaacatggttttggctatggcttgactcatgggctttcagtgcttttttccatttgttgaaagtaacatttctctctctctctcttttttttttttttttttttaaagcaaaccattgtatgtgtaagtgtttaagttacctttttgtctattggtctctttgccagccctcccctttcccaatgaaagccatgtcaaattaatcactggattgactgcttcatctttttatttttaatgaaaggtgtaccacggttgtaaagcaataagatttgagatgaacactattgaaacttcgctttttgctaaaaaatagcaagttgaatagtaatcaaaaaacatagaaagattttagttcaaaatgattgctcctttctctacctggacttttaaaaaatcaattgtcatctaatatgagtttatttgtctatagacacaagtatcaatgtctaaaaaaaatcatgactttaaacttccaccgatgaggcaggtaggagataaagatgaattctgaactgttactaaaagtactcattttttaccttgtagggagggtgggcaatggggttacctgaccttatttgagggtatgggctttcttttttatttcatcacttgttatctcaaagagactcggagccagtgatccttttatcctgctacagtctttagggagctaaaaaaaaaaaaaaagcaggggctgccaaaactcttgatttcatatttccttctctaaatatatatgtatcctgttttttggataaaattttaccaagaatccaaaaaaaaaaaaaccctagaatttaatcaacaagatcagtctacaggtcacagtggatttcttttcaaactgacaatgtttaggttttaagcaaataaagttccagttaatgtgaaactcagtcacaaagagttgagatttttcctttatgaaatagaattgacattcttttatgctataaatgtgcattcaggtcccattaaccatgctctgcttttatttggggatagaacattttctttttcatatcccgatcttcccatttcttcatagaaatgtgataagaagtacatccctgtgatcctgctgcttcgtagagcaccactgcacaccctaccccgagtgccaaccacctctgctataggacactattttcctggccctattcttcacttacttcccatcctgtccttgactaggaatatgttaaatgctgctcccatacaattcagttagctcttgtctttttatttggtccaacccctgctttactgctcatgctgcttaaagcaggagggactagagaaacaaggcattttaggaggcctgtgtgcagttgaaaaccgacttttacacgccttataaaagcagtcaggagatagatccgtaggtttgatccttcacatctaataccaggcgctaatgggaacaaggtttaaagggtcctggtatgctaataaattgaaaaattagtgaaatttaaacttctgcctttttttcctgccttttaatctagatttgcttcctcaatatcctactttgtggtttactaggaacatgcttactctgatctttttttaaaaaacacacagtggcagagtcatttcactattgcactgtgtgttaaagaatgaataaggagttttcagttacatggccaaaaatacaggacttgaacataaatagcagttggatcattctctttcatgacggttaaattcagaggtgtgaactttgtaatgagggtgttaaagattaatctatttgcctaaatgggtttgttcaggtatccatttttaacaaagaagtttgtgttcatatagtaaaagacctatcagtgtttccaccatgcacttctattttttaggagtttataattttaagtcttacattcctagtaacatttgggcttttcttaggttatgttacctgaccttatttgagggtatgggctttcttttttatttcatcacttgttatctcaaa

SEQ ID NO: 391005 - DNA, 1248 bp, Homo sapiens
cggctggtttgattcatccattttgaagagacgggggagcggggggctcgtctgttccaggagccctgaaccaaagagcagcggagtttgagaagccagcagctcggggttcggcagcagcggtcccatcggctgaagttcggggggggtggggcgccgagcgcgcggggtggggggggtcctggtctttggcttctcgactcggtcctgtttcgacagcgaacatgtcgcggcctgtcagaaataggaaggttgttgattactcacagtttcaggaatctgatgatgcagatgaagattatggaagagattcgggccctcccactaagaaaattcgatcatctccccgagaagctaaaaataagaggcgatctggaaagaattcacaggaagatagtgaggactcagaagacaaagatgtgaagaccaagaaggatgattctcactcagcagaggatagtgaagatgaaaaagaagatcataaaaatgtgcgccaacaacggcaggcggcatctaaagcagcttctaaacagagagagatgctcatggaagatgtgggcagtgaggaagaacaagaagaggaggatgaggcaccattccaggagaaagattccggcagcgatgaagatttcctaatggaagatgatgacgatagtgactatggcagttcgaaaaagaaaaacaaaaagatggttaagaagtccaaacctgaaagaaaagaaaagaaaatgcccaaacccagactaaaggctacagtgacgccaagtccagtgaaaggcaaagggaaagtgggtcgccccacagcttcaaaggcatcaaaggaaaagactccttctcccaaagaagaagatgaggaaccggaaagcccgccagaaaagaaaacatctacaagccccccacccgagaaatctggggatgaagggtctgaagatgaagccccttctggggaggattaaaagtgatgatggtctggggagagattttattaaaaaaaaaaagaaaaaaaaagaaaaaagagggaggaaaaaaaagaacctacttaagatagaacatggttttggctatggcttgactcatgggctttcagtgcttttttccatttgttgaaagtaacatttctctctctctctcttttttttttttttttttttaaagcaaaccattgtatgtgtaagtgtttaagttacctttttgtctattggtctctttgccagccctcccctttcccaatgaaagccatgtcaaatt

SEQ ID NO: 391006 - DNA, 1150 bp, Homo sapiens
cggctggtttgattcatccattttgaagagacgggggagcggggggctcgtctgttccaggagccctgaaccaaagagcagcggagtttgagaagccagcagctcggggttcggcagcagcggtcccatcggctgaagttcggggggggtggggcgccgagcgcgcggggtggggggggtcctggtctttggcttctcgactcggtcctgtttcgacagcgaacatgtcgcggcctgtcagaaataggaaggttgttgattactcacagtttcaggaatctgatgatgcagatgaagattatggaagagattcgggccctcccactaagaaaattcgatcatctccccgagaagctaaaaataagaggcgatctggaaagaattcacaggaagatagtgaggactcagaagacaaagatgtgaagaccaagaaggatgattctcactcagcagaggatagtgaagatgaaaaagaagatcataaaaatgtgcgccaacaacggcaggcggcatctaaagcagcttctaaacagagagagatgctcatggaagatgtgggcagtgaggaagaacaagaagaggaggatgaggcaccattccaggagaaagattccggcagcgatgaagatttcctaatggaagatgatgacgatagtgactatggcagttcgaaaaagaaaaacaaaaagatggttaagaagtccaaacctgaaagaaaagaaaagaaaatgcccaaacccagactaaaggctacagtgacgccaagtccagtgaaaggcaaagggaaagtgggtcgccccacagcttcaaaggcatcaaaggaaaagactccttctcccaaagaagaagatgaggaaccggaaagcccgccagaaaagaaaacatctacaagccccccacccgagaaatctggggatgaagggtccaagatagattctgagttcatctttaaatttgcccacagcacctctaaatcccttgtaaatttacctgttagtcaaagaggacagctctttgacactaggaaaaaccttgtagagagagtaaaatttacaccatagtaggctaaggcagcaccattagaagcgtcagctcacaccatactaaaatccaacattactgactctcaaccgattgtcatcttcacctt

SEQ ID NO: 391007 - DNA, 755 bp, Homo sapiens
cggctggtttgattcatccattttgaagagacgggggagcggggggctcgtctgttccaggagccctgaaccaaagagcagcggagtttgagaagccagcagctcggggttcggcagcagcggtcccatcggctgaagttcggggggggtggggcgccgagcgcgcggggtggggggggtcctggtctttggcttctcgactcggtcctgtttcgacagcgaacatgtcgcggcctgtcagaaataggaaggttgttgattactcacagtttcaggaatctgatgatgcagatgaagattatggaagagattcgggccctcccactaagaaaattcgatcatctccccgagaagctaaaaataagaggcgatctggaaagaattcacaggaagatagtgaggactcagaagacaaagatgtgaagaccaagaaggatgattctcactcagcagaggatagtgaagatgaaaaagaagatcataaaaatgtgcgccaacaacggcaggcggcatctaaagcagcttctaaacagagagagatgctcatggaagatgtgggcagtgaggaagaacaagaagaggaggatgaggcaccattccaggagaaagattccggcagcgatgaagatttcctaatggaagatgatgacgatagtgactatggcagttcgaaaaagaaaaacaaaaagatggttaagaagtccaaacctgaaagaaaagaagggagtagagagaaaaaaaaaaggtcgtatcga

SEQ ID NO: 391008 - DNA, 925 bp, Homo sapiens
  misc_feature (748)..(748): n is a, c, g, or t
  misc_feature (752)..(752): n is a, c, g, or t
  misc_feature (764)..(764): n is a, c, g, or t
  misc_feature (801)..(801): n is a, c, g, or t
  misc_feature (819)..(819): n is a, c, g, or t
  misc_feature (889)..(889): n is a, c, g, or t
  misc_feature (921)..(921): n is a, c, g, or t
cggctggtttgattcatccattttgaagagacgggggagcggggggctcgtctgttccaggagccctgaaccaaagagcagcggagtttgagaagccagcagctcggggttcggcagcagcggtcccatcggctgaagttcggggggggtggggcgccgagcgcgcggggtggggggggtcctggtctttggcttctcgactcggtcctgtttcgacagcgaacatgtcgcggcctgtcagaaataggaaggttgttgattactcacagtttcaggaatctgatgatgcagatgaagattatggaagagattcgggccctcccactaagaaaattcgatcatctccccgagaagctaaaaataagaggcgatctggaaagaattcacaggaagatagtgaggactcagaagacaaagatgtgaagaccaagaaggatgattctcactcagcagaggatagtgaagatgaaaaagaagatcataaaaatgtgcgccaacaacggcaggcggcatctaaagcagcttctaaacagagagagatgctcatggaagatgtgggcagtgaggaagaacaagaagaggaggatgaggcaccattccaggagaaagattccggcagcgatgaagatttcctaatggaagatgatgacgatagtgactatggcagttcgaaaaagaaaaacaaaaaaaaaaagtggccgctcgaattttttttttttttttttttttttttttttatgattacacncatntatttaacagcncagttttacacagaatgctaagagcacttttcttcanattttacagaagggcttnaaacatacagactattcgtaatcatacaatagcacatccaaatctaactcctaaatagatgatgcattanaatttgtttagaatttggcttaatggcattcngggg

SEQ ID NO: 391009 - DNA, 507 bp, Homo sapiens
atgtacatatatgtgctagggtctgaaatgtttgtgttcccctaaaacgtgtatcttgaaatcctaaccccgaaggtgatggcagtaggaggtaaggcctttagaaggtgattaggtcatgagggtggaggctctgagtgggattagtgcccttacatggaggcctcaaagagcttcctcatcccttccactatgggaggacaccacaagaaaacagaggtccatgaatcaggaagcagggcctccccagacactgaatcttctggtgccttgatcttggacttccaacatccagaactgtgagaagtaaatttctcacagaagctacccaggctatgctattttgttatagtagcccaaatggactaggccaacatgtgtgtgtgtgtgtatagtacatgtgtgtggcatgtgtgcagtgcactgtgtggtaaaagtatgtgtgcactatatgtgtgtgtggggtacgtgtgtgcatacaatgtgtgtgtgccacatgcatgcggc

SEQ ID NO: 391010 - DNA, 227 bp, Homo sapiens
caagagcaaaactccatcccccccgccaaaaaaaagtttaaaactgactctagtaagtcagtaactcctctaaaggaagccctggaactttggagagatttcactaattaccaattcaccaatatatagcccctgaacattgtatctcgaagtcttctaaatctgataaattacgtatgtgtggtgttctaccaccaagatcacaaatgggtacttctgattgcatc

SEQ ID NO: 391011 - DNA, 247 bp, Homo sapiens
tagcgggattacaagcgtcagttactgcacctggcctctttctcaggtgcaatcatagtgcactacagcctcaaactcctggcctcaagtgattgttctgcctcagcctcacaagtagctgggactgcagacatgtgcaactgcatccagctagaattctctttttatttatttttttttttgagatggagttttactcttgttgcctaagctggagtgcaatggcgtgatctcggctcactgtaac

SEQ ID NO: 391012 - DNA, 120 bp, Homo sapiens
ggtctaatgagcagttccagatgagggaaccaaatgcccatgggaagagcttggacttagcccagtaaacacaagagaggtccttaagtttatgtgggctgatgaaagtggtgttttaca

SEQ ID NO: 391013 - DNA, 609 bp, Homo sapiens
atcttagaagctgactctcacagggtggaaattgagggaaattgctatacatgtgtgctgtaagtgcctcatgatgtggcagtctgaaatatgagtcatgccattcgtcctacataacctgattcttattccctgcttcttctgtgcatcatgcagtattttcagggtctgaacagtgtttatgtctgtgggtcccctacgtgcctattagtgcagcaaagacttggactcaggagttagacttcctgggttcccagtccatttctgccactttctcagttatgtcctcttgggaaatatacttactctctctgcgcttccgttttctcatctttaaaatgggagatagaatacctacctcacaggtaagcgtatttgaggattcaataagataatacatgtaagcactaaaaacagtgcgtggcatgtaatactagcacccaataaagattagctcttaggatcatcatcgttatgtcttacacataggaagccatcattaggtgcttggctttcatcaattttggtctgactctacacgtctattgaagtttgtaaaaattaaacattgggcctttgaaatgttctttaatatcactgtgggaaaaa

SEQ ID NO: 391014 - DNA, 335 bp, Homo sapiens
cgagctcggtacccttttccacagggtacttttctctctgcgcttccgttttctcatctttaaaatgggagatagaatacctacctcacaggtaagcgtatttgaggattcaataagataatacatgtaagcactaaaaacagtgcgtggcatgtaatactagcacccaataaagattagctcttaggatcatcatcgttatgtcttacacataggaagccatcattaggtgcttggctttcatcaattttggtctgactctacacgtctattgaagtttgtaaaaattaaacattgggcctttgaaatgttctttaatatcactgtgggaaaaa

SEQ ID NO: 391015 - DNA, 377 bp, Homo sapiens
ggcatgtggcattggaagagagaacatgccaggcaaggtgatctcttccagtctgaggttttatttgatagcttaaggactcagagttagtcaaaatgcaatgtctgaaggcacccttccttctgacaccagttgcagatttgaaggtgtttcttaagcccccactcaggtttgataattcactacaaagacttacgtaactcactgataactgttattgcacgattgtggtttatcacagggaaagaacacagattaaaatcagcctaaggaagagacacacagggcagagtctgggagggtttcaggtgtgaagcttcgttgtcctcaggacgctgtgttctcctgtgtgaatgtgggacaaaacacatggggtg

SEQ ID NO: 391016 - DNA, 373 bp, Homo sapiens
ctccccagtacgctgttatcactgtgtgaccgcaaacatgacgaggtgaacttatagtataaaacgtagagacgagttttcaccatgttggccaggctggtctcgaactcccgacctcaggtgatccacctgcctcagccttccaaagtgctgggattacaggcatgagccaccatgcctggcccatatgtcttcttttgagaagtgtctgttcatgttctttgcccactttttaatggggttatttgtttttttggttgttgatttctttaagttccttatagattctgggtattagacctttgtcagatgcatagtttgtgaatattttcttccattgtgcaggttgtctgtttatcctgttaatagttta

SEQ ID NO: 391017 - DNA, 640 bp, Homo sapiens
ctcccgaaggcagggatgatattatatgcattccttgtccccaacactgatcactgtccttggcccgaggaggtgctcagtcatttctattgaattaagacagatcacctcccccagagctgatgcctgagtgaatgaaggttagcccctgaggtggttagcagggccggattaggatgcctgagaccaagcttccttcagtggcaggtggcaaattctcacacatggcccatgcacctgtacctctaaaataaaaatgtttgccatatgtgaagatgggacagattttctaatcaggacttttccaaacaacagccaagttcctcctcatagagggtgactggtggcccatagggggccttcgtgggaataagaataagaccccagtgtggcattctgccagatacatggctgggaagcagaaaagagactggattccagccccctttcacctctcagccaggccctcttgagcagggcccacctggcagtattctgtaatcctacaaactgtcctcagggtctgtgtcctccaaagaaagtttaaagcaaaatattcctccatgcactcactgtgtcctctcttctgatcttttctaccactttaactagatttaaactaatacaatggttgccgggc

SEQ ID NO: 391018 - DNA, 513 bp, Homo sapiens
ctttttactcttcattatactggatgtcatagctagagttgtaaggcaagaaaaagtaataaaagatacacagattagaaaggaagaagtggaacagtctttatttgcagatggctgcaaaaacttattagaactaaaagtatattgaacagagtttagagatacacagccagtataaaaaacaaatgtatatctacatacaaagcataaactattaaaaactgaaaaatttggctgggcacagtggctcacacttgtaatcccagcactttgggaggccaaggtgggtggattgcttcaggtcaagtttgagaccagcctggccaacacagcgaaaccccgtctctactaaaaatacaaaaaattagccaggcgttggggtgcacatctgtagcactagctgctcaggaggccgaggcaggagattggcctgaacccaggaggtagaggttgcagtgagccgagattgcgccactgcactccagcctgggtgacagagtgagactccatctc

SEQ ID NO: 391019 - DNA, 220 bp, Homo sapiens
ttggcctcccaaagtgctgggattacaggtgtgggccaccatgcctagcctccagctccttatttttagtggattaccttaatttgtagtattcctttcatacatttttctcactttaataatcacagttttaaaatatgaatactttagtagcatcgctaatactactttatataataatactttagtagtatcgctaataccactattacaaggataa

SEQ ID NO: 391020 - DNA, 591 bp, Homo sapiens
ggaggagaaagctgagaggcagctagacagggagggggtggggagagccggggccacctccccgtctggtctgtctgcctctgtcctggccagaaggaaggaggacacagacacaggcatgtaggggtgcggcagagatggggggccgtgtgtctttgagccccaaggttctcctgagctgagaccttcattacctcatgtgcttcctaaggatacaggccttgaacctgctgggggcaggccctggactcaagctccataggcagcccccctttttctagcctgggtgatgccctcccgagtccttgcttttcaaagcattttggggggacgtggtaggggcacccatcctctgctccaggagctggagatgggatttcccatttctctgacaagaattcccaagaagtgatggctgtcactgcagctccacccccatgcccatctttctttttctgttatagattgtttatgttaagtcatctttctctgggacaaagtacttagcctctcattttcatcagtaaaagcagggataataattccttcctcacagagttgttaggactgccaaattaggtcccatatgta

SEQ ID NO: 391021 - DNA, 367 bp, Homo sapiens
gagatggagtctcactctgttgcccaggctagagtgcagtggcatgccctccatctcccaggttcaagagattctcctgcctcagcctcccaagcagctgaaattacaagcgcgcaacaccatacccgactaactaatttttgtatttttagaagagacaggatttcaccatgttggccaggctggtctcgaattcctgacctcaggtgatccacctgcctcggcctcccaaagtgctgggattacaggtgtgagccactgcacacagtcaaacatgtggtttttaatctgtcaggaaaaaagttccagaaaagtgatgtcattttataaatctcagatttaataaggataaaaaattaggagacag

SEQ ID NO: 391022 - DNA, 489 bp, Homo sapiens
cacatcaaaaagttaattccccatgatgaagcaggctttattcctgggatgcaaggttggttcaacatacgcacatcaataaatgtgatttaccacgtgaacagaatttaaaacatacgatcatcttaatagatgcacagaaagcttttggtaaaatccaacatctcttcatgataaaaaacctcaaactaggcatcaaaagaacatacctcaaaatcataagagccatctatgacagactcatagccagcatcatactaaatgggcaaaagctggaagcattctccttgaaaacattaaaagaaaggatgtccactctcaccacgcctattcaacatagtactgaaggtcctagccagagtagtcaggcaggagaaggaaataaaaggcatccagataggaagagtagaagtcaaattatctcttttcattgacagtatgattctatacttggaaaaccctaaagcctccaccaaaaggctcctagac

SEQ ID NO: 391023 - DNA, 372 bp, Homo sapiens
attctccctaccttgcctaggtttccccttttctctttcagtctattgagacgcttcccacggctcagctgagttggcctcacccaaccaattcaggacaaccccacctggaaatgatttttcctctagaattctataagcgctcatttttatctacaattatttaacttagcaaatgtttactgaatatggatatgtatatatatgccaggtaccatgctaggcaattagagataaatataagattcagtctttgctgccagggagctcaatttagtgaaagagagataagggaaatgaataattctaacaccgtgataagtacattgtgtgagagttcttgtgacagtggtaggtgcgggaggggaatgg

SEQ ID NO: 391024 - DNA, 788 bp, Homo sapiens
agtggcagtggtagtctaatccagagctccaagccatttaaagctcattcacatttgcatttgtctatgaagttcagatgttgctcactagggcttcaccccatagggcctgctggtgcttccaatgagacacccactctctcaacaggaaggaccatctggtctctgctgtgttgctggggccacttgcatggcttaggaatcactttgattgttggcccctccctactgtgagctccttgagtgccttgtctgcacctggggcatctgggaaggcccagtcccagcccaggggatccctcggaggcccctgaatgagtgatcccacaagtgcagattcaactctggtttggagggtaaagggatctgggagttgggttgccagtgtggagactgaattcaaagaaggattgtgaaaggtattaattgttattattacgacatttaaacagtgtttacaagctcagagaggactttactgtaggctatttgacatgtatggttcactatttcataagggaggaagctgaatgaaaagtagcttaagagccgggcgcggtggctcacgactgtaatcccagcactttgggaggctgaggcgggcagatcacgaggtcaagagatcgagaccatcctgcccaacatggtgaaaccgtgtctctactaaaaatacaaaacttagcggggcgtggtagtgcctgcctgtagtcccagatactctggaggctaaggaaggagaatcgcttaaacgcgggagtcggatgttgccttgagccgatatcatgcca

SEQ ID NO: 391025 - DNA, 391 bp, Homo sapiens
agtaacctctaatctacttttggtctctgtagatttgcctattatggacatttgcatagatgctatcatatcatatggtacaatatgatgaaattgtccatttgtgtcccacctctttcacttacgataatgttttcaaagttcatccacattgtagcatgtatcagtactttattctttttaattgccaagtaagaattcatcatatggacataccacattttgtttatccattcatccatttatggatgtttgggttttgtccactttggtgctattatgactaatgctgttatgagcatttgtgcacaagtaccctcttaaactttgtgcccaaagtgagtgtctcatttacctcactgtagttccagccttgttactttgacgacgc

SEQ ID NO: 391026 - DNA, 421 bp, Homo sapiens
aatcccccatcatccatggttttgctttctgcaggttcagtcacctacagtccaactgcagtctgaaaatattaagtggaaaattctagaaatgatttctaagttaaaatgagtttttaaaaacgttttaaattagttttcagtagtagtctaacactacatcacagtgcctaccttattcacctcacttcatcacatcatggaggcattttctcacatcacaataagggtgaatgcggtatattttgagaaagagactagagtcacataacctgtcacagtatattgttatatttgttctattattgttacttattgtgcctaattcgtaaattaagctttatcataggtatgtacgtataggaaaaatatagcatacacagggttcaatagtggtttcagccatccactgagattgtct

SEQ ID NO: 391027 - DNA, 366 bp, Homo sapiens
caccttgatattcatcctattaacactgcttttcattgttacaaaactctttttgtgtttggttttttcattttttaaaaaaaacagacccaaagcttacaaaacttcttttgttttgatattcactctaattagtctactcacatgtgaacccattccagttagactttggctctaaactctactcctaccttaccaaaaaagctctggtcaaggtcatcaatttcttccatgttctaaatatttaaagtttttacatttttgtctttgatttatctgtatattatttttgtatttttgtggggataaattttaacttttttccatagaaacaaccaattgtatgagcaggttttgctgtgtctt

SEQ ID NO: 391028 - DNA, 394 bp, Homo sapiens
ctcctggcagtagggttcatgtgattgaaagatacgaaaacggaggctcaggcatgtaagaaatattccagaatagaggtagggcacgctggctcatgcctgtaatcccagcttggctctgtgccacatgggagcagctccagagtgactttcaacttgtttctgcagggttttgtttggagcatgaggactgtcttctgttgatttgctttttaagcaacagtaaattcattcctggctttatctattgagccccattttgcacaattctctggcccaaatttgcatcagtgagggatttcgggcaggtccagggctctccgcaacatccatctgcttgccctccattgccagggtgtgtcctggaggtgtgtcctagcccatctttctgttc

SEQ ID NO: 391029 - DNA, 148 bp, Homo sapiens
agctgcctacaaggaaggtactttaaatataaaaacagaagacagtgtggtggctcatgcctgtgatctcagcactttgggagtctgaggtgggaggatctcttgaggcccaattttcgaaagcagcctgggcaacgtagacccagtt

SEQ ID NO: 391030 - DNA, 503 bp, Homo sapiens
accacaaggaggcaacttaaggtgcccagaacatagaatatatataggtcagttttccacagtggctacttgctatctttataatgttctctccgccactttcaggagccgctgtagcctacccactgaattaatgtcccgtcctgaccatccccatccatccctgagtgtcaggaagcagtaggagtctgaaactccttcccaagctcatgtagtcagagtcagaatctcagcattcctcaccctctcccaaagcagggtgtcactctttctcatgacacttcattgatctctactctttttgacatatatctaaaaaccttcctatagccatctgagcccatccttctcttggccacccactggagagatcttacttgtccctgtatccttaaagtacctgatctgagtagatgctcgtgaactaaacaaatgagttaactgataacctggtttcagtgacgctacagtaacatttctttcagctgtgcagagaccctatc

SEQ ID NO: 391031 - DNA, 478 bp, Homo sapiens
gtatacatcagttagtgcttttaaccttcccccagcaagtcaatattttcctaagatttaaagaagtagctgtttcctccaaggctttttttcttagtctctaaatcttaagttgcaaataatggaatctaagtttaaaaccatgcttcatcagaaatactctcaatgtactaatggaacacattatcattgctgattattattttctctaataccataaaacctcttgattatttctaatactcatataataaaatatattttatattggtaacatcaggtaaataagttgttatggatatcaaaagtatgaccagtacaagccagcgttttatattgcctcccaccttaaaaattacactgttacacattgatatccctgaaaacaaatgtgttaatacatatcactctgaatcattcacagtgatattactcaattaattgtttatttaattaccctatttggtaatcaaaacag

SEQ ID NO: 391032 - DNA, 290 bp, Homo sapiens
tgccgtgtgcaacctccatgaggatgttgaacctcactagctttcctgtgtgtgctgttgctctgcagttctgcagggctcagccttggccacgttaacctctcagtccccctaaattggtaactctgcatcctgttcccaacaccagaagccctaaggacaactagaaaggctgggcgagcacccaggtgcaagcatgctcacctggggcaggtgggaggtcactgtaagaacagcctgggagagctgtaatgcaccatcaaggacgggctcctgggacctgggaccca

SEQ ID NO: 391033 - DNA, 429 bp, Homo sapiens
gtgtcggaagcagacagcagccctctccagacagcagaacctgcagcaccttgatcttgaacttcccagcctccacaaatgtgagaaaatgcatttctgttctttataaattactcagtctgcaggattttgttatagcaccacaaaaagatttcaagagtcacttttagccctcaaaaattaaaatactaacacaagagcacacaaattattatttggctagtgatagcattcatcaaaaaagcattatttctttcatgttgcagtgtgcttccgcggaagcacactgcaacagaccctctgtatatttccgcattattcttgtctccttttcagaccatgatggccaatatggagattaaaatatgtcatcagtcatctctttatggtgacttccctttgcaaaccaggctgtgaccaacacatgtg

SEQ ID NO: 391034 - DNA, 727 bp, Homo sapiens
gaatgttagaacagaaggtctcaccgtggactcaagagctgacatgaagaatgtcaccaccatcctgctctccaaggactcctcatcttcaatggactcctcatcttcaacggactcctcatctacaacgggcagggtggaaactgcaacttgtgccatgatccctgcgcaagaaaagtagtaagaaattgagtggtagaaatccagtgtcctaaactcacatccagagctgtgagagtttttcacaggctggctaattcagagttttcttgcatcagaggaaaagtaagactcggaaacttggtattcgatttgcccaaaactctcattagatagagaatccatccgctaactttctatctagtattatttccataaagttagatcaatatcactcccaaaataaatccacgtggcaaccagaatcagtgcatttctcccaagtacaagaggaggtggccgagcgtggtggttcacgcctgtaatcccagcacttttggaggccgaggagggtgcatcaggaggtcaggagatggagcccatccaggccaatatggtgaaaccccggtgtctactaaaaatacaaaaaatagctgggtgtggtggcgtgtgtcccagctacttgggaggctgaggtaggagaattgcttgaaccagggagtcggaggttgcactgagccaagatcgtgccactgcactccagcctggtgacagagcaaaactccat

SEQ ID NO: 391035 - DNA, 450 bp, Homo sapiens
gcacgagccgttttcagcaaaaattttgtatttatatagattgcctataagaatatttgatagaaatgatgtattatgcactatcttcttgacagagaaaatctggtctgcagacgtagaaaaaaacacagatggatgaaaacaattctgtaatcaagatttgatgttggaggtacccaagtaaactgacagggaaagactaaattgtggaagaacttcagatacaaatttctaagtcattttatatttttgggtatttatagtccatgtaagatacctctaactttctaggtgatttaacctacataatgtatggccctccagaccgagcatgaaaacagcttatattcctgtctttgtaatgtgtatttgtcataaccaagagtgtagatcaaaattctgagaggcactatctctaacatggaaataaacaatgtaggacaatttcta

SEQ ID NO: 391036 - DNA, 379 bp, Homo sapiens
agagacgtgggcagggattctgggaggttataggaagcaactggatctacccttgagggaccatcagcttagaaccctgtcctgactatggagccattaagaagctggtatgctctgaaggaagtcaggcagtggtgttcatgctgccatcctgaaccaagcccctcggagaccattctatctcattccaagctggcaagctccttctaagtgcccaccatggggcaggtgctatggaggacaccaagatagaggaagacagggcatttgccctcctgtcatttccatatgtttagggagataggcagacaggtgactggaggtcatggcctgtccagagcttaggatgaaaagcagctttattaatagtacctacaca

SEQ ID NO: 391037 - DNA, 1046 bp, Homo sapiens
tcaaattgaaaacctttaggttgtgttcttggctcattctctcataacctggatctaagttggaaagctgtggcaccctgtttgggtgtcccatctaccctgttttctgtttctgcagatggcttgttcaagcttcattttaagcctgctctgtctacttatcttccttatatcctaatagacttctcttgtgttattacacatttctcttttgctctaatatttcattattttccagtttgtcagtaccgttatcagagggacaaggaaggaataacacaccagttgaccattttgtttctctgaaaatctgagcaatacggagatccttttattagtaaaactgaatcattactcatactacaagggctttcacttttaaaatgtaatccatcattgcttgccatttttatgaaaaccaaagttgaaaagtcttctgaatcacaggctatgtatagccacacatgcatgacttcaggctagcataaagacatgtctgctcctgagcctcttcttttaaagggcaaccacttgtataccctctggtggccactcctccttctccactccaaggcagccctggtactttcctaagtggcccctcctacagagcacttgccggcatttggcctgctgctggtgaagacgccccttactagcttcataaatgtttttctgcaagcagggatcccagacacatactttggtttctagtgtttcagttactatgttgtatttgaaattctcattccacaattaccctttagttgaagtcctgaagtacatgccatgtactccccctttatttctaccttgatcaatggcctctgcggagtgtagtgaaagacatctttttattatgatctacactttaaaaaaccaaaggctgcctgtattacattgctttggggagttgttaagactctgttttttctactgcttcacattaaacaataattttgttgaattttgaattcttaaaattctcactgacaaacattttaggtcagtgttgaggaaaatgtgtgatgcatgttagagaggtg

SEQ ID NO: 391038 - DNA, 832 bp, Homo sapiens
cttgggaatttcagtcctacccccatcctctgggaagacctggaggctggagattgagttaatgatcagtgatgttcaagtaacaaagtcttgtaagaatcccagaactctggggtttggggagctccagggctgctgaacatgtggagggtagcccacccggagagggcaaggaagcgcacttcccctcccatacacctcgccctgcatatctcttcatctggctgtcttctgtatcctttattgtattctttattacatagtaagctgggaaatgtgtttccctgaggtctgtgagccatcccagcaaattatgaaatccaaggatggggtcgtaggaaccctggtttacagctggtcagtcagacatataggtgacaacttggcacttgtatttggtatctgaaatggggggcagtcttgtgggactgaacccttaacctgaggtctgtgctaactccagttagtatcagaattgaattgaattgtgggacactcggctggtgtcattcagctggtgtcagagtattccttgacatcgcttcaatccctggtcacagaagtgtgtggagtgcaggtatagaaaaggaaaagtagggccgggtgtggtggctcacgcctgtaatcccagcactttgggaggccaaggtgggaggatcatgaggtcaggagatcaagaccatcccggctaacatggtgaaaccctgtctctactaaaaataggaaaaaattagccaggcgtggtggcaggcacctgtagtcccagctactcgggaggctgaggcaggagaatggtatgaacctgggaagcagagcttgcggtgagccgaga

SEQ ID NO: 391039 - DNA, 655 bp, Homo sapiens
ttgctggctgactcttgaggatccactctccctactgtatcctacccccatcttatttattgggcaaaactaaggcagtctgtcctgtccttttacctgccatatatccattcctctagaatagctcttttcattgtgttgtgactgtgtatttgcttggctgtaggcctcttaagagcagagatacttttctaaaattgcctttgtgtttcttatactccacacagtgcagcataatggaagacgcatcatacatgtgactgcataaacatgggggattccaagtagaagaaataggatgaaaataagtatagagataataaaggtccttgaatgttcacagagattaatcatttcgtgtggttgtaatacacagttagtgaaaggaaagagtagatgatgaggctggaaaaatagacacagaccttaatttacaaagtctgaaatgctggagtcaagaggctgccctctataccctcaagtaggcactgagtagaggagctatgaatgacttgtatgcttgaaagcagttctccacaaacgtcattctggagtggcaaacaaaatagaatgaagggtggaatctcttagaactcactgcatgtctgctagattaaagttgtataatatttcactaggatacagtaggtagaaa

SEQ ID NO: 391040 - DNA, 652 bp, Homo sapiens
cctcctgagggtaaaccgacgctactgcctactgtatcctacccccatcttatttattgggcaaaactaaggcagtctgtcctgtccttttacctgccatatatccattcctctagaatagctcttttcattgtgttgtgactgtgtatttgcttggctgtaggcctcttaagagcagagatacttttctaaaattgcctttgtgtttcttatactccacacagtgcagcataatggaagacgcatcatacatgtgactgcataaacatgggggattccaagtagaagaaataggatgaaaataagtatagagataataaaggtccttgaatgttcacagagattaatcatttcgtgtggttgtaatacacagttagtgaaaggaaagagtagatgatgaggctggaaaaatagacacagaccttaatttacaaagtctgaaatgctggagtcaagaggctgccctctataccctcaagtaggcactgagtagaggagctatgaatgacttgtatgcttgaaagcagttctccacaaacgtcattctggagtggcaaacaaaatagaatgaagggtggaatctcttagaactcactgcatgtctgctagattaaagttgtataatatttcactaggatacagtaggtagaaa

SEQ ID NO: 391041 - DNA, 603 bp, Homo sapiens
tataaaatgtatttcctactgtaggtttcaataaaaaagtttatggtgtgatacaaaataaattttgtgctgtgtatcttaatcataaattttgtgctgtgcatcttaatcggctctggattatgtacccagaatgggttagctgcatcacgggttacatagtattttgaatcttcctagacatagcaaaattactttccaaaatggccgtactgatttcactccccataccctaatcggtatttgacattctagtcagacttctacatttcctatgttcttgagggtgaaaattccattttgtttaaattttcattttaactggttaggttgagcctaacttcctcattactgaaaagaaaagtgttaagacctatctggttggtaggttactattgaaaatcatatttcttttcctttttttcttttttcttttttttttttttgagacgggtctcactcgattgcccaggctggagtacagtggcgtgatctcggctcactgcaacctctgcctcccaagttcaagtgattctcctgcctcagcctcccaagtagctgggattgcaggcacgcacctccaggtccggccgattttgtatt

SEQ ID NO: 391042 - DNA, 102 bp, Homo sapiens
cccacatggaaggcttctctgtgctcccagcgtcaggcaataagcaccttcatgtaggacctcccataacgctcaagacaacctcgagagacgaggaatctg

SEQ ID NO: 391043 - DNA, 653 bp, Homo sapiens
gttccgtttgaagacatcaactcattcctgagaaaaaccctatgaatgtccagaatgtgggaatgttgtcatttctctcatatctgctcaaggacatgtgaaaatgcacactgcagctggaccttgtaaatacaaaaatgtacacaggattacaactaatatttagaaactgcaagaatattttcagttttaacatttatttgaaaagtcgtgaaaactcccactggaaagaagttctataagtgaagtttttctaatttggaaagcctgatgcaaattaattatcgtgcggtgcttgaaaaaaatgtacatgtatgaaatgttacacaagttgcaagtatattgttttcatcagtggctcattcttaaagagtcttgagtatgcatttcactttattttgcaggaaaaccttgaggtgagagttctgtaaatgctttttaagcagtacttgaatttcatagtaatgatactttcttcagtttgttggtagaatttttgtctgttcatttgataatgtgctggattcatggttgaattttgatgtttttctaatatgtaggtaagtttaatttttttattttattattatttttttgagatggagtctcactctgttgcccaggctggagtgcagtggtgcggtcttggctca

SEQ ID NO: 391044 - DNA, 476 bp, Homo sapiens
gtgagtaggggatgaggtgggggctcagaggagggcatggtcagcctgtctgggagggagttgcatgtgtgcatctgaggtagggacaggcatgcatcttacaggatgaatatcgagcagagttacagagagggggaaactccttgaggtttcaggaatcacctaatccactgtgactcacaaattcctgcctcttggctttgcctgcagcatatctcctggaagtgtgctggggcaaaactcatcccagaccaccatctccatcctcccccaatacaccctggctctccctggctacccttgagcacggtgcacgtgtgcatgggtgcatgcctgcatatatagctatcccccatgtatttcccaaagccctacataatgcttcagtttgctaaggaaaaaatgttaattactgcaaatgtgtttaaaactgtaaaagtacattaaacaaactctgtaaagtgtgaaaaattagt

SEQ ID NO: 391045 - DNA, 566 bp, Homo sapiens
ggcaggccggcagcaggcggaagctgcacctcagggctgggggcgcgttggggagggctggccctgccaggaagtgtgctgacagggcaggagggctgagcggcagacacaaggcactcctggtccccaccagctgtggcctctgccaccccatgggtgccagtcttaagtttcagagcatcactggtactcaccctggtcctgcagctcctgggcccagagacaggatttcgtgttagcctcctcgtactgtgctggggtgatgataaaactaacaacccaggctggacgcagtggctcacacccgaaatcccaacattttgggaggccgaggtgggtggatcaactgaggtcaggagttcgagaccagcctggccaacatggcgaaaccctgtctctactaaaaatacaaaaattagccaggcatggtggtgcatgcctgtagccccagctactcaggaagctgaggcagaaaaatcgcttgaacttcgggaggcagaggttgcagtgagctgagatcgcaccactgcactccagcctgggcgacagagcgagactttgtctca

SEQ ID NO: 391046 - DNA, 686 bp, Homo sapiens
catggtggtgcatacctgtggtctcatctacaacaaagattgaggcaggaggatcacttgaggtgggaagtcagggctgcagtgagatatgatcatgccactgtactccagccaggacaacagagtaggacactgtctcaaaaacaaaaaagtcaaacgtttcaaaattattcttggaaagaaaagtgaaccaaacaaataaaaaggagccagtatggaccattacactctccctctcctttcctaaaggagagggctcatttgactagaataaaacctttcatgcctttacaaaacattatatacaaaatgttttgtatataaatagatttactgcctcattggattcaatatggcatgttatcatttttaagtagctaaaatgtcctactccaataaaaatgtcacattacatcatacaaatctataggttaaaatggaaagcctcacgtctttattgtcattttgctaaatgtcttaagtacttccttttttgtattttgagtaagtgaatactaaatcatgatagtagattaaaagttactaaaagtgtagtcttttatatttttaatagaaatgtattgccatctttcccttgcgttaaattgtatcatagaatcaacctaatatattgagatgaaaatatcattctttattattaatgtcctattataattgttcaatgc

SEQ ID NO: 391047 - DNA, 374 bp, Homo sapiens
cgtgagcacctcgtgggttgcatgtagtgactcggagtaccatgtgcagagcacacgtgtagcctcagcactgtatgaaagcacacaaaagaaaaccctgccctcgactaccttacacttgctagcagtctaatgacccataccacatgtggaaaatattattttgctttgctgtaatacaacattgttttgacaattcaggctaaatggttattatcaaatcatactatgtacaaggatcatgtcaggctcttcatgtggcccagacttaggatatatttttctccctcagataataagctccaaattttagctcttctcccttctctgtcctctctcctgccatctctgccctttcaccagccccagttata

SEQ ID NO: 391048 - DNA, 676 bp, Homo sapiens
tgaggtcgtaccctttgctgggagcaccgttttctcttttctttcactttctttcttttctttcctgccttccttcctctttctttctttctctttccttctttctttcttccttccttctttctctcttttctttcttcttttttcttctttctctctctctcatctctgccccccaaccccatctctctccttcattcctcccttttcttctcctttttgttttttttttggataacttacttttattcttgcaggccggagtgcagtggtgcagtctcagctcactgcaactttcgccttctgggttcaggcagttctcctgcctcagcctcctgagtagctggtattagaggcgcatgccaccatgcccacctaattttcgtatttttagtagagaccgggttttgctatgttggctgggctggtcttgacctgatctgcccgcctctgcctcccaaagtgctgggattacacttgtgagtcaccatgcccagcctattcttgcagtgttataagccaccatccacaattgatgaaaaatgtttaatcttggccaggcaaggtggctcacgcctgtaatcacagcactttgggaggccaaggcgggtggatcacaaaatcaggagttcaagagcagcctggccaacatggagaaaccctgtctctactaaaa

SEQ ID NO: 391049 - DNA, 169 bp, Homo sapiens
aaatatgtgctatatgattccatttctatgatgttctagaataggaaaaattaatctatggcagacaaaaaaatcagaacagtgactgcctctgggaggacagggcaggaagtgactcagaaggggcataatatactgtatcttaatacatgtttaaattacaaagatg

SEQ ID NO: 391050 - DNA, 342 bp, Homo sapiens
gagttaactgcaaagttggccagtagaagacaggttaagtatgatgcgatgctagaagtcattagaaagaatgaggtgggtctaagaactgtcgggatatattgtatacccccaactttcttaccactatgagccaaaaaaagtgcatgctttcaaaatttataaagattgtgcaaactgcccacagtggttatgtcttataaagaagtgaggttggagttaaagaaaaattgcagggcaggcgtggtggctcaagcctatagtcccagcactttgagaggatgaggtgggaggattacttgaggctaggagttcgagactagcctgggcaacgtagtgaga

SEQ ID NO: 391051 - DNA, 279 bp, Homo sapiens
atcgggagaagcgaaggcgcgtagggctgcctgcaatctgttccatactgctctcctgctatgccagggaaggtgtttatttttgcaagtgcctgaggttgggaagatcaggccccaagagagccagagcctctggccaacagtcagcgtcacctgaccccaagacaggagcacctgccaaaagccagggcagcctgacccccgcttcctgacccgccacatgtctccctcccggcacgcggccaccaccacctgcaaggccagtgcctcggaggcagc

SEQ ID NO: 391052 - DNA, 184 bp, Homo sapiens
ttaacctttctgtagcaggaagtagagaggaagtcatccaggcagcctcctatgtagtccagggtttgagctgtgctatactttagtctgtgtagtgtaggcactgtgtaaacactgggtggatggatatgattgccctataaatctttttcatttgttttgttggttctgggagccaaagaat

SEQ ID NO: 391053 - DNA, 435 bp, Homo sapiens
ttaaggagttgctaatttcaaatcaccattggcatctttctttgagcataatgtgatcctgctggaattcatggcacacctaaaccttatgttggtctcaagagaaatactactaccagcaattgatcttagatgtttggaccatcagtaaaaatttccactcatgaaaacattttaatgtttcctccaaatattttttgttactagagtcagaacataacatgaggtctaaactcctgacaactttttatgggaaaattacagtattacaaattgagcatcccaaatccagaaatccacaatctgaaatgctccaaaactcaacacttctgaccactgatgtgatgctaaaaagaagtgctcactggcgcattgtgcattttaaatttttcagatttgggatgctaaaccagtacatgtactgcaaatattcca

SEQ ID NO: 391054 - DNA, 411 bp, Homo sapiens
cctaattcctagcatgataaatagtaaccctttgtgcttgattttgtttaacttatttgagttgttttcaaaatacattctttttaatttaaaaaatcagctaagcttgtgtatggttaagtttttgttttgttttgtgtttgatttgttcttttagggaaaaaatcctataaaatggctattaaatttttagccaatgacaatgagattttcttaatattactttgaattctttacctcttaattcttagagtatgtggttttgttgttctgtagtgtcttactaaaatattcatttttttacagtgtattgcaagttccactgcattacatgcaaatatgattcactcatacctagctgtttgtggattcaaactcataaatgaaccatttttaagttgttaatagtgt

SEQ ID NO: 391055 - DNA, 192 bp, Homo sapiens
tttcaaggtctgtgaatagttagagccacattacaaagtcagtacaagatgtaacttactcatgcaaccaaaggtcaaaccaggactattaagggtatcactggagttacagtgacttgacacagttgtggcaaatggaaaaccaagagtttgcaatctggtttggaggtccttggtaaaatttccaagtgt

SEQ ID NO: 391056 - DNA, 597 bp, Homo sapiens
tccagttaaggtttagaaaatattgaatcatttgaaaccctttctatggagaacaaggtgctagggataaatgtcagaggagtgttaaaataagactgtgttaagacttttgaagaagaaaccagagatctctctatgacaatgacaaccagatactaacttctgacgaaacagtcgccacctccagctaagctccttcctgaccactagctgagttccttgtatttcagtttctactggcaccttctttttctaaaagggagcagtcacctaaatcctgaattaaaacatttgttctgaaacacacacacacacacacacacacacacacacacacagcgatacttgtaaagcattactcttcattgcagagatatcatggggtagtcagcaagtgtaatgtggccatcataaattcagatcaagtgagggcccttgtcttgggtttttggatatatactaaaaaatctttttaccagggctctgaaagagacccagaaagaaaaatagaaagcttaacttggggctgcaaatgtcctcacacagtagcagttaatgcttctgcaaatgcctatggctataaccccactgactctt

SEQ ID NO: 391057 - DNA, 510 bp, Homo sapiens
ctagagcctgcaggaaaagattcagctttgagataatcccaggcgcagggtggctaaagcaattctggaaactgggctgtggaagaaccatttttaagctgtttgccaccacctctgctatgctttactactaattccactcagttttacctttactccatgtagttttccagtgggtagacagagggcaccgtggcgctgggctttcagtaatactttctaagacacacactggccagtcgcaagatggccctctcctcagcagcttcgagcttgaagcttgaagcaagtggggaatgaatacaaattggctttaagcatcacctcggctactgagtccccaaggatcacctgcacaagtgctctgtcagcagaggcgcccgaggtacaggcaggatgggccttgtgggcctctcctggccagaaggagatcatgccccttcccaggctgagtgagctgcactgctgatcttacctcctcttgttctttcttgatgtggctgggccttg

SEQ ID NO: 391058 - DNA, 385 bp, Homo sapiens
ttggctgatggattggatgccaggtaagaaaaagagaagttactcttgactcaggtttttgagctgttacaggaagactatgtttactgttaccgaggtgggtaagactgaggacagagcatatttgcaagagtagcatcagaaacatggtttttgacaaattgaatttgagctacctacttgatatttttatccagtgtcaagcaggcagttttatatatgggtacaaagggagaattgagggctggagatacaaatttgagagtcatcaccagatagtagatggtatttaaagccgtaagtctggatgaggtaactaagagagtaaagtatgtggaaaatagaggacccaagaaaacttagggcagttcaacagttacaagtc

SEQ ID NO: 391059 - DNA, 707 bp, Homo sapiens
gggtagccacaggaggtgttcattaaggatatgattccatttatatagctatttctattgcataaccaggacagttttattgtttttgaggtcaatgttcttttaaaatttgattttctgtaagaagaggctttttggcccagaaagccttacttattttacatcttccagtttgtccatcccatgagttagagttcgtcttgactctgcaagctagaatcaaagaattatgaaagtaagatcatttagatttgaccaagggcaccattaaatggtgtcaggttttaggaagcagacgggtgtataaaaagaaaatgaacaaagatttcacttattggggatcaggcataactggatgcctggattgtcctgccacccagctgccaccaataaaatcattcatcactctgcaagagggaccagatgcttccatcatcagtactccttgtttttctgttatctcctttgaggtagctaaaaatggcagccaaaaaaaaatgttgaggcttttctcaagtatatactcatgttattttgcagaagatagggtcaacttcttcagttgagttatctgaaagtgttgggcagtgacaccatgccaaacactgttaaattcatgccattaaaaacagtggagtgttctgcaaagcccgattctctgcagctttaagactggacagtattgaaatattcacaggaatcttcca

SEQ ID NO: 391060 - DNA, 158 bp, Homo sapiens
aaaagatcctgtctgggacaggaagctgcacacggagcagacgcatccttggctttctttctaaatcgggttactcatttttccatcccgtccactgagtatgcaaaggatttgttgaaatttggccggtacatttccatcctccctgatgccaatca

SEQ ID NO: 391061 - DNA, 603 bp, Homo sapiens
aagaaaacggaaactagagtgctgcccaaattactctcatcccagggtgactgaaggcatacccaaaactgcctccctgaggagcaacatcagaggcttaacactggggggcgatagtcttcattaaaataatccagcttggcactaaacaaatagcaaataagcagatagcagtaacaaccctgggggagcagggaattgttaatagtactcagagttgctacagtatattatctgaaatgtgagtttttataacaaaatattatgaaatatgcaaagaaacaggaatatatgactctactggacaaaagcaggtaacagaaactgccttgtgattgcaaccagatatcagatataccagaaaaagactttagaatagccattgtaaatatattcaaagaactaaaataaaccatgattaaagattataatgtttccacttttattattcattggaatgcaattaaactatcagaaggcatttagctaaatcaagaattcagtaattttgcaggccaaataatacatcctttatgcatgtgatgtacttcatcttcatttttcatcatggataagaaggataataatcttggttgcattcct

SEQ ID NO: 391062 - DNA, 426 bp, Homo sapiens
agccagtctaggccacagcactgctagtaagtaaacatggagccacagagacttcaagaaaggcaaaacatattttaaaaccatgaatgctacttcttccatgctcctaaatgctaatttttgatatatcacaataaaaatacaaaggtagttattatatagataccgaggagaactagttaatcaaggggtagctcaagaggatctacataggaactttagcagatattcctgaaatgtttagacagttttaaacataaagttagaaagctataattcagagcactaatcagtgcctggcattaatgaatgcccaaatatttgttaaatggttaaaaataaacctgtatgagataaagtcactaatctttacctttagtcactttactcacatagtgctgtatgtatattattttttatagaaac

SEQ ID NO: 391063 - DNA, 779 bp, Homo sapiens
tgggctgggaaccatccaaatggaatttttagtgtttcgcctaggtactttagatttagtacacactaaatgagtttgagtgtgttttactactgcagtggctagaaagaacaaatagagtattatgtggaatacaaataatgcttattaagcttgcagttgattccttctgatagatgttccaaattgctgtcagactatatttacttactcataaacagatgtggttttgctttaaatcaggataactattccaaactgagttatgcatattttaaacaactgttacggattacattttaaaattattgttgattaagaagctgatttattatattttataaggttcatttttggtggtagttttagatgacagagagcttagatttttttttaattttttgaaatctgatttaaggtgggatatcaccagttaaaaattattttctggtctgtagtcaagaattgatatttaagatgagcaatttgttataattttaaaattttagtcactaggctgggcgcagtggctcacgcctataatcccagcactttgggaggccaaggcgagcggatcacctgaagtcgggagttcaagaccagcctgaccaacatggagaaaccccgtctctaccaaaaatacaaaattagccgggcgtggtggtgcatgcctgtaatcccagctacccgggaggctgaggcaggagaattgcttgaacccaggaggcagaaattacagtgagccgagattgcgccattgcacttcagcttgggcaata

SEQ ID NO: 391064 - DNA, 640 bp, Homo sapiens
ccatcatccatttaggccagagatctggaagtcaccattttcctcatcccccatgtccaatccactagcaggtttggttgataccctacaaatatgacctgcttctgaggtgggatgggagactggactctggaggcagggcttgggcatcggaccaaattaaggacaagtaaaacagggaaagggcggaagcacctctgcataagacacacctaccagtgtgcagtgacagtttaccattgctatggcaacatccggaagttagcgcccctttccatggcaataacctgacaatctggaatttaccactttttttctagaaatttctgcataatctgccccttaatttacatataattaaaagtgggtataaatgtaacagctgctattctgggctcactgcgtatggagtagccctgcgctgcaaggaacaggacctccgctgctggctgtgcactgccgcctcaataaaagttgctaacaccagccgggtgcagtggctcatgcctgtaatcccagcactttgggaggccgaggtgggcagatcacttgaggtcaggagttcaagaccagcctggccaacatggtgaaaccccgtctctactaaaaaattagcagggcatggtggtgcacacctgta

SEQ ID NO: 391065 - DNA, 249 bp, Homo sapiens
atcaccttaaatgtttactgtttctttgtgatgagaacattcaaaatcttctcttatagctgttttgaaatatgcaaaatgttattattaactatggtcacccgcctgtgcagtgatcagagatttctaattcctgtgtgtgccctggattcttgagactcctcccaccttgggtttggtgtatccgtgtctgtgtacactctcttgcccaagagccctgtgcccacctgttgccccagtccatcctgg

SEQ ID NO: 391066 - DNA, 353 bp, Homo sapiens
caagttccacccattaaacctttcagttccacagatacccataaattccctctatatatacggtgtaaaacatacacaatgttgaatgtactcaaaattcatttttgctttactaaacaaaaagtgaaagttttattaagtcaaatgaaacaaaaataattttatgttgttgtttttatttttttatttttttctttgagacggagtctcactctttcgcccaggctggagtgcaatggcgtgatctcagctcactgcaagctctgcctcccgggtccatgccattctcctgcctcagcctccctagtatctgggactacaggtgcctgccaccacgcccggataattttttg

SEQ ID NO: 391067 - DNA, 1016 bp, Homo sapiens
gcctaggattggttaggtgggcttttccttcccctttccctccaaagaaacccaggttctggttctgcacctacccctgcccaacagtggccattggcccatcacccgctccaatgtccttgacccgaattcttggaagcacaggaaacaacatgccacataggggttgagtaagcatctctggggccacaaattaaattaagctttcagggccgcctgccttgttattgctaatggttctagccctgctcagctcctaggtccctgtcctgtggaaatttgtggaccctgggcaccctctcttgctcccaaattttaatcggctcctggaaacctcaccccaaattggagataggcactcctcttgtagaacaaaaggctcaggttcagggagtgagggcctgaactgtgcccccaccctccaggaagggtccttcacggcctggctgcagggatcagtcacgtgtggcccttcattaggccctgccatataagccaagggcacggggtggccgggaactctctaggcaagaatcccggaggcagaggccatgctgaccgcagcggtgctgagctgtgccctgctgctggcactgcctgccacgcgaggagcccagatgggcttggcccccatggagggcatcagaaggcctgaccaggccctgctcccagagctcccaggcctgggcctgcgggccccactgaagaagacaactgcagaacaggcagaagaggatctgttgcaggaggctcaggccttggcagaggtactagacctgcaggaccgcgagccccgctcctcacgtcgctgcgtaaggctgcatgagtcctgcctgggacagcaggtgccttgctgtgacccatgtgccacgtgctactgccgcttcttcaatgccttctgctactgccgcaagctgggtactgccatgaatccctgcagccgcacctagctggccaacgtcagggtcggggctagggtaggggcaaggaaactcgaataaaggatgggaccaacc

SEQ ID NO: 391068 - DNA, 493 bp, Homo sapiens
agagctcattttctgaagagattaggttgatctagctctctgaaggggccatgttatcttgagctcatggtggttgcatatgaagtttcttcttcctggaatctctttgctgactttgcaaactggctgccatcccgcccatttcaactcacagagcatttcctttaggaagctttccctgaccacctccttttcctcttgcctgagttacatgtcctttcttagatcctgtgggtcctctgtcatcgagtctttacacatctttgccacaagaatacgagcagagttagagctggattttgtctgggtgatggaaaattaatgctcaataaatatttgttgagtgaatcaatggacaggcaaacctatttgggaacagtattcactttgagtttattaatctatatatgataaagaataaaagtatattttttctactcttttttattggagacattttgatggcttgaagcagttctggaatggtaaaaca

SEQ ID NO: 391069 - DNA, 129 bp, Homo sapiens
cgctctcatcctctcttgccttcccttaccctctctccctcttcctttctctccctacctctctccctctcttctccctcctccttcctcccttcctttctccctttctccttctctccttttctttct

SEQ ID NO: 391070 - DNA, 381 bp, Homo sapiens
ggaaagagccctggactatcataagactgagtaccagcttggccagtcagtcactttgtgaccttgattaagctatgtaaccttttcaaattgatttccctctctgtaaatagagctgataagatggcttgccctgtttcctgtggtttttaaagaggatcaaatgagtgcgtgaaagttctcatgaaaactagacgtctattcaaatatgaggtggtggtattctcagaaggtcatagatgaatgatgcatttattttagtgcttttcacagtttagtctcaatactgagtgcttactgaggggttgtatggaggcacactagttgtttctttaggagatgtctttagctgctagagtagagaacaaaagaatgagtaaa

SEQ ID NO: 391071 - DNA, 376 bp, Homo sapiens
tttaagacctacctgcattcggatggcgctgggagtgggggcctccttagatgtgggctcctggatgcttctctgtcttcacctggccccagcctcatgggtgcagctggaaagactctagaaggatgtgctgaaaccctggggctccctgagactgagtgagctggaggtcaccaaggccctcggcctatcgcgggagagagttccattgaaagccagtggtcaggtggccgctgtggagggtctctgggtggacaattgggagcagagtggtccctgcagtgaggcagggggcagggcgtgaggggtccctgaagtaaggcagggcagggcgtccactcataagcacacgaggagttgcagaagcagagccgac

SEQ ID NO: 391072 - DNA, 272 bp, Homo sapiens
ggatcacatgcgtgagccaccgcacccagaccacctgcacatttagaattgtgaactttttctctatacttcaataacttagttctaagatttatttgacacaaagttctcggaaatcgtagttatcattttagaacagaaaaaagaccacctgggccaggtgcgctggctcacgcctgtaatcccagcactttcgaaggccgaggcgggcagatcatttgaggtcaggagttcgagaccagcctgaccaacacggtgaaaccccgtttcta

SEQ ID NO: 391073 - DNA, 358 bp, Homo sapiens
ttagcttttaaaatgtatttttgtttttacttaagagttttaaaaagtagtcatattttaaatttacatattgttgggaaaattctgccaatggtaggataaaacaatagatttcaattgaaatattgaaagcaacttgtgttggtaaaagatgagaagtgaaggtggaagactgattaaaactaccaaaaatatcatagtgataacacttttatttttctttttttgtgggggtggggatagtaccattataaaaatacaaacataagctgcttttgtacatcaccaaataattcattgaaatttaaggaaatcaaccagttatgtgtgtacacacacacacacacacacacacacg

SEQ ID NO: 391074 - DNA, 312 bp, Homo sapiens
atgcttcaaaggaaaaagagatgctaacataattatttaagaggtacttaatttagattgagagtttcagtggaagacctgagagggtgacagtgaagatggtacttgaagtatggataaaaattggccagatgaagagtggtggtggagtacttaaaaaaagtacaatttggctaggtgtggtggctcacagctgtaatcctagtactgttggaagctgaggcaggaggatcgcttgagcctgggagttcaagaccagcctgggcaacatagtgagaccccatctctacaaaaaagaaaaaagaaaaaatt

SEQ ID NO: 391075 - DNA, 183 bp, Homo sapiens
tcaactcctgctcaagaccccccaggctcagccttactgtgccccatgacaaggactgtccatcctcttttccacggctgaacctcatctctgtgtctcacaacctcgaagacacagaatcatccctcctgcagcctcacaccccatgtagagacgcctcctgcaccctcgtcccactgcttc

SEQ ID NO: 391076 - DNA, 440 bp, Homo sapiens
tagactaaaagaacaaatcaagtcatgttaatacgccacattagttataggttgtaaggaagtaagatttttaaaataagtctagaccaggcatggtgactcatgcctgtaatcccagcactttgggagggtaaggtgggaggattacttgaggccaggaattcaagaccaacctgggcagcatagtgagaccccatttccatcaaagaaaaggaaaagtctgggtctaatgcttacaaattaaacaaaggagtgagtctcttgttgcagctaataatgtgatcaagatttttttcccctgggtaagactattgttatatctaataaaaatacattttaacattatattttatattttacagtcaatactttgttgttctgacaatcaagacacatattcctgattaaattagtaaatcatttatgttgatggtagacag

SEQ ID NO: 391077 - DNA, 155 bp, Homo sapiens
agataggttatgtttgtaatcccagcacttcgagaggcactgtgcctggcctgggacactcagatctttttaaaaattgtaagggaaggaggacttttgtggctattgttgccattttatagatagaaaccagtggttttgtgatcagccataga

SEQ ID NO: 391078 - DNA, 364 bp, Homo sapiens
tggagcatctgtaatctcctggtgacaccagagaccgtggccctggcattgttgaaattccatctgaaatgaatgacggaaaaatgggagcccactggagaacttgagtgagggcgaggcgggtggatcacctgaggtcagcagttcaagaccagcctggctaacatggtgaaaccccatttctactaaaaatacaaaaaaaaaaaaaattagccaggcatggtggcatttgcctgtaatcccagctactctggaggctgaggcaggagaatcacttgaacctgggaggcggagcttgcagtgagctgagatcgcgccactgcactgcagcctgggcgacagagcgagactccgtctcaaaaaa

SEQ ID NO: 391079 - DNA, 243 bp, Homo sapiens
aggaatatgtctgggaaggggaggagacaggattttgtgggagggagaacttaagaactggatccatttgcgccattgagaaagcgcaagagggaagtagaggagcgtcagtagtaacagatgctgccggcagggatgtgcttgaggaggatccagagatgagagcaggtcactgggaaaggttaggggcggggaggccttgattggtgttggtttggtcgttgttgattttggttttatgca

SEQ ID NO: 391080 - DNA, 252 bp, Homo sapiens
cctaccactggctatgtgttctgcacatgttatctcatttaatagtctaattaaccctagcaggtataaccaaccccctctctgcaaataagtaaatggtggctggcaaggctttaggtaacttccccaaagtcataggtctatgatcggacctcatgctcttgtctgctaaaacttgcaaaggtacatatttatgcatcatagtaaaaattaaaatcttctacgtcagccagctacccacaatcatactta

SEQ ID NO: 391081 - DNA, 134 bp, Homo sapiens
aaaaaggaaaaaagaaagaaaggaaagggaaggggaggggagggaaggcgaggggagggaaggtaagattatatggggccgggcgtggtgactcacacctgtattcccagcactttgagaggcccacccgtgaa

SEQ ID NO: 391082 - DNA, 361 bp, Homo sapiens
cttctccgagacagtttcccaatctataaaactgagtaaatctctacttatttcactgagcttattaaacattagttccttccctttgaggcaacagtgtttctgaaactgaagaccaatataaaatttataacaaagtttataacataaaaccccctaaattttttgttcactgaaagatgaagctccagctactaagaaaggcctatcagtcttattactcaatagggaaacctggaaaccagagtgcttaagggaaaggaacattattgaaagtggaaaagaatctgttctgatattcatggagccctttaggctccatacactgttatctgttttttgtttgtttatttgttttttt

SEQ ID NO: 391083 - DNA, 547 bp, Homo sapiens
ccaaagtgctgggattataggcgtgagccaccacacccagccatttttaaaactctttttaaaacatgatttgaaagataatttcattttcaatcgtagggaattatacaatcatttgttagccattcttctatccccctcccattttttttttgagaagagtcttgctctgttgcccaggctggagtgcagtggtgcaatcttggttcaccgcaacctccgcctcttgggttcaagcaattctcctgcctcagcctcccgagtagctgggattataggcacgcaccaccacgcccagctaatttttgtatttttgtagagacagggtttcatcatgttggccaggcttgtcttgaactcctgacctcaggtgatccaccggcctcggcctcccaaaatcctgggattacaggcgtgagccactgtgcctggctatccccctcccttttttctttttttgagactgtgtctttctctgcccaggctggagtacagtggtgggatctctgctcacaatcgaattcccgcgggcgccatgggggccgga

SEQ ID NO: 391084 - DNA, 587 bp, Homo sapiens
ttcaagccggtctcctcccttagcctcccaagtagctgggactacaggcatgcaccagcacgcctggcctagtttttgtatttttattagagatggggtttcaccatgttggccagactggtcttgagctcctgaccttaagtgatctgccctccttggcctcccaaagtgctgggattacaggcatgagtcaccatgccgggccagttgagatttcttaatctctcagcgtcctctgatcatgatcctgtggggatagtagtatgtccctctgtatctcacaggattgttgggagattcaattgagataatatgcgaaaagaaccgtgaactacaaagcactatatcaatgtaaggtgttttctgttcctcttgtatcacatttgtccactgaagtaatctatgcttgcaggttagcactctggacttaacaactgtaaaacgtgaattaacttgggttatttcacttctcatttggaaatgaattctgctcaggacactgtagcattcttctatctacttctgaaatgcagatagcctcacagttgtaactaacactggaagaggagaaagaagaagtaaaacga

SEQ ID NO: 391085 - DNA, 325 bp, Homo sapiens
  misc_feature (324)..(325): n is a, c, g, or t
agacagggtcttgctccgttgcccaggttggagtgcagtggcccatcagggctcactgtaacctccgactcctgggttcaagtgaccctcccacctcagctacacaggaggttgaagcaggaggatcacttgagcccagtaggttaaggctgcagtgaaaccctgtgaattaaccactgtactccagcctgggtgacagactgagaccctatctcaaaaatgacaacaagaacaacaaaagttaatgataatatagaagcataaatttcctgtgaatgttcaattacacataataaacattattgaattgtacacaaaaaaaann

SEQ ID NO: 391086 - DNA, 2047 bp, Homo sapiens
  misc_feature (2046)..(2047): n is a, c, g, or t
atacaatgcaacttggaccccacaaaatatttcatcacccaattcatcagacccagatgtcccattttccatctgtacttgggtcattgattcccctccgcatcagcaggtcaagataactgtgtgggcattacagctgacctcgcaagactgcacgcagaattacttacagcttcaggactcaccgcagggtcacggaaattcaagatttcagttctgtggcagaaatgcttcggctgtgccagtgttttattcttctatgagtactgcaatggtcattttcaaatctggagttgtaaacagaaactctagaatgagtttcacctatcagattgcagattgcaacagagactatcacaaggcatttggcaacctgagaagccctggatggccagataactacgacaatgacaaggattgcaccgttactctcacagccccccagaaccacaccatttccctcttttttcattcacttggcatcgagaactcagttgaatgcagaaacgatttcttggaggtgagaaatggaagtaacagcaattcaccattactgggcaagtactgtggaactctgctgccaaaccctgtcttctctcaaaataatgaactatacctacgatttaagagtgatagtgtaacttctgatcgtggatatgaaatcatctggacttcatcaccctctggatgtggtggaactctttatggagacagaggctcattcaccagccccggctatccaggcacatacccaaacaacacgtactgcgagtgggtccttgttgctcctgctggaaggcttgtcaccatcaacttctacttcatcagcattgacgatccaggagactgtgtccagaactatctcacactctatgatgggcccaacgccagctctccatcctctggaccatactgcggaggcgacaccagcatagctcccttcgtggcttcctcaaatcaggtcttcataaaatttcatgctgattatgcacggcgtccatccgcattccgattaacttgggacagctaagtgggtaacaactcgtgttcactcagcactttccctctgcagcacgctggacagcactctgccatcctgatacatgacccctgctgatgccacagagaataagctgaacttgtatggtttttcaccaaaccatggatagaatcaatatttgtaggccaggcgtggtggctcacccccctgtattctcagcactttgggaggccgaggcaggttgatcacctgaggtcaggagtttgagactagcctggccagcatggtgaaacctcatctctctaacaatataataattagccaggcgtggtggtgggtgcctgtaattccagccactcgagaggctgaggcaggagaattgcttgaacccaggaggcagaggttgcagtgagctaagatcacaccactacactccagcctgggcgagacggcaagactccatctcaaaaaaaaaagaaacaaaaaaaaccagaatcaatatttgtacattttctcgaacatagaatatagcttctttagtcttgagtgtgcatttcattctaatattttgagctgaaatttaaaaaaactttgaaagagttggaaatgattatggcatatgtgacatacatttttaaaagttaataataatagccaggggcagtggctcatacccataatcccagcacgctgggaggccatgatgggaggattgcttgaacctaggagtttgagaccagcctgggcaacaaagtgagacctgatttttacaaaaaatcaaaaaattagccaggcatggtggcatgcacccgtggttccagctacacaggaggttgaagcaggaggatcacttgagcccagtaggttaaggctgcagtgaaaccctgtgaattaaccactgtactccagcctgggtgacagactgagaccctatctcaaaaatgacaacaagaacaacaaaagttaatgataatatagaagcataaatttcctgtgaatgttcaattacacataataaacattattgaattgtacacaaaaaaaann

SEQ ID NO: 391087 - DNA, 359 bp, Homo sapiens
gctgggattacaggcgtgagcccactgtgcccagcccaggattgtatcttttaagcagaaaacttaatagctttgttcatgacttaaaaaaaataccatgagaatcattttaccaagtaatttactttatacaaataattagaaattatgctatcactaaaacatagtttaaatatttttgaaaataacttagtgttgtcataaaatagaattggaaaaggcgggtaaatcaacataattggtaactggcaaaagtttcaagcattctgcctaagaactggagcaagacaaggatgcccgttcttaccactcctattcaatttagtactggaagtcttaaccagagcaatcaggcaaga

SEQ ID NO: 391088 - DNA, 121 bp, Homo sapiens
cactgaacaatattcagaaaccgtccacctcttgccccttctttgctcccacctagtcatctcagtggcctccctgtgcctaccctcatgccctgcagtctgttcccctcacatagtcaga

SEQ ID NO: 391089 - DNA, 369 bp, Homo sapiens
gtcactgggattctggttcaagtcatggtagcaatgctaattgatgatagtcatctatattttcttaaatgttttcattaattgacatccttgtccaagtaacatctatattgaaccttaagggagatgtcatagttagtttttcccaccttttttatagtaaattttatgtttttacaatctgcacaggtgtctatgtacttcttgatcaaacagtggaatcttttagtcattgatatttctgtcagtaacctgtgggcacagcagaacccatccagagacccataagttcctaatttcaccctaacgggtctttaattgaacctcactgtggcaaattaagtagttcagcgtggcagggagactggg

SEQ ID NO: 391090 - DNA, 342 bp, Homo sapiens
tttggagggggagttaacagctttactgagataaaatttacatactgtacaattcacacatttaaagcatacaattcaatgatgtattcacagagttgttgcaactaccacagtcaatttaagagtattttcatcacttcaaaaagaaaccttgagcccattagaatttcccattatctgttttcctccagccccttcctagccacaggcaactgctaatctactgtcactataaatttgtctattctaaacatttcatataaatggattcatgcaatgtaagaccttttgtatctggcttttttcacttaatataatgtttttaaagttcattcatgtatc

SEQ ID NO: 391091 - DNA, 288 bp, Homo sapiens
caacaaacaaaaaaaagtaagaattagaaaggaaacacaaagtcattgattagtcagaattatgcctcaagtacacacataaatctgtgcatttacatgtttactcttagctgttcatacttgatttgcatatagttatagcagatcaagaagtcacaaacttgaaagagaaagagttgctgctgtggatggatccataaacaatggtctaaaattggcctaggccgggcgcagtggctcatgcctgtaatcccagcactttgggaggccaagttgggaagattgctt

SEQ ID NO: 391092 - DNA, 396 bp, Homo sapiens
tatacagatatgactcgatgaaatattcaggtcatagtttcttttccagtcacccagactggagtgcagtggcatgatcttggctgactgtaacttccacctcctgggttcaagcgtttctcctgcctcagcctcccaagtagctgggattacaggcatgcgccaccacgctcggctaatttttgtatttttcatagagatggggtttcaccatgctggccaggctggtcttgaacttctgacctcaagtgatccacctgcctcggcctcccaaagtgctgggattacaggcttacaggccttgtgagccactgctcccggccccaacttttgactgcattgtaggatctcacagagaactttctagaagtgccaacaacttgtgttcatcctcct

SEQ ID NO: 391093 - DNA, 340 bp, Homo sapiens
aaagaaaatgtcatcagactaatgcatgctacaacaggatgactttgaaaacattatactaagttaaagccacacacaaagagccataaattgtttcttccattcatatgaaatgccaagaataggcaaattaccagacacagaaagatcatggttgccaagggctgggaggagaggagaatgggggagcgggaggcggtgactgctaatgaacatgagctttcttttggggatgatgaaatgttctaaaatggactacggtgttagctgcaaaactttgtgaatacactaaaaaccactgaaatgcatatttattcaaatacacaaactccacagcatg

SEQ ID NO: 391094 - DNA, 308 bp, Homo sapiens
acagacacatatatgtatatgtagacatacctgcaaatacaaaatatttccagaaacttctatatttatgtgctatttcttcttactgtcaccttcaatgtaaatggacatttaaacatttagggagcaattaagtcttcaagatgagttgcttgatgaagtaacatttgggcacttgtttaagtacattttacagggcccatccagttctaattgccaggaacaccacaggtaggacaggtttagcagaaagaaaacatagtttggagcaggaagaagagtgccccagagagaaacagaaggctgtt

SEQ ID NO: 391095 - DNA, 157 bp, Homo sapiens
tcttcctgatgacaaccagcatgggcatctacctcagggttgttggcagatcccagcagagaagcaggtggatgtgagtttgtaaacttcccaatgctactgctgtaataactgtttggtaagcacctactccatgcgtggattgccagaagacact

SEQ ID NO: 391096 - DNA, 789 bp, Homo sapiens
gcctagtaggaagtgtctgggctgtggaggaacatccctcatgaatagcttggtgatgttctctggcttggtagtgagtttctgccctctctctcttgatgggattggttcttgtgggaatagattagttccagtgagagtcagttgttataaagccaggagcccctcagatcctcccctcattgcatatgcctgcttcccttttgatcatctccaccatgttttgacacagcataagagccattgccagaagccagggccatgcccttgaacttcccaacctgtgaaaccataagctaaataaacctctactctttataaactacctagtctcagatattcttttatagcaacagaaaacagactcagactcttcccttggtatttgctgcactaggaaaacaaaagcaatcaggggtcatatcttttcatcaccaaacccatcaaacttcttacatctcctccttaatggactcaccctttcccgccattgtaatgccctgctgtgtcccaagtggctagctcagggcctggcacacagtaggcactcagtatttttccagtgggatgaataaggccaacctctcaaggacttcatatttgcaattcatccctctctcttagccctaatcaattttctgtcttgattgcatcataaccatcattatacaaacatgctatattttctttcatcttgaagaaaccctactttgacctttcatccccctcaaatttctaccacattgttcagttcaactttataattaaacatgtccaaagaactgtcta

SEQ ID NO: 391097 - DNA, 540 bp, Homo sapiens
gattctctcagaggaaagcggtggtttacaaagcttacacaaccagaccctcggttagttctgacctcagctcctactaccctcccctccctcattctatttcaaacaatccggcaacctaagccctctaaatgatgaggaactaccaggagcaaaattctgagtttagggtcacacaatgctcttctgaatgaaactaaccaactggacgacttcaaataaagctatgttctcctgttgattagaaagctcctcatttcctcatttggataaccacatttggaaagaagaaaatcctgagatctcaggtttcaggcttccttttagccctcacccacagaagtggtccccatgggtcagggatctgccctcatagatgttcactggccactatgagaatcaccaagcactgaggacaggagagctctcctgctgatccagcactaccacagccagctctgaagactgaaaggtaaaggctgtttaaccaattaagactgccaaagcagggcacggtggctcatgcttgcaatcccagca

SEQ ID NO: 391098 - DNA, 379 bp, Homo sapiens
gaaaagagaaatggtgtttggctgagtcttaagctggcctgacaggtgaggaagctggaagacagtgttctgagaaaaggcatacaagtgtaagaccgtggtatggtctggaaatctcaaatactgctaatgttcacggtactaatggggcagcctcagaagctggctaaaaaggtgaaggctgaatcacaaaggatctcctatgctatgataaggaactcatatgtgatgcttagaagccataagtcatcactgagggtgtttgaacagggcttatgtgaactgatttccatattagaaaggctactcgtataactttaggaatgaattagggagtcagggtagagatgtggggactttaggggataaggccctgaac

SEQ ID NO: 391099 - DNA, 257 bp, Homo sapiens
cagcttcctgagtagctgagtaggtgggcatgcgccaccctgcccagctaatttttgtatttttagtacagacagggtttcaccgtgttggccagatagtctcaatctcttgacctcgtgatccacccacctcagcctcccaaagtgctgggattacaggcatgagccaccatgcccggccggttaaatttattcctaagtgttatgcctgtaactcttgaaaaagtaattcttaaataaacatcaattaatattct

SEQ ID NO: 391100 - DNA, 226 bp, Homo sapiens
gttttttttagtagagacagggtttcaccatgttgcccaggctggtctcgaactcctgagctcagtcaatccacctgccttggcctcccaaagtgacagaattacaggcgtgagccaccatacccggtcgacagtgtactttttaactgtcacctttcattctttaaagtacactggtctggatcataaaccaggtggccgacatactcctagcctactgaaaggt

SEQ ID NO: 391101 - DNA, 271 bp, Homo sapiens
acagggtgacaggttcgttctctatgcccagggagcatagtcttattttaggaggctatacggttatatttgaggaaatcacacttaattttcccaaatgtgttttaggtgcaacctatccagtcactttccttttgagagctgaagtacctgaagctttggagatggtaaaggaattattgagggtcatactggctaagaagagtgctaaaagtggagacctttatcacaaaggtatcttgtttatttgcttatctatcaagccccaata

SEQ ID NO: 391102 - DNA, 457 bp, Homo sapiens
ggcggtgtgaacactgggttcgagttccttaaggagtcgtgaactggcctctacttctctatcctagtgtaaacttatctgaccaccaaggtatatagcttgatgaccaacaaataatgtacccattgccccagagtacctttcttctgagcatacgactccagcattcattggatcggctagctagcatctcagtccacactctgagctgtgcagcagtgtgccctggtgctaattctcactctgtcctttgattctggccagggggtccttggtggtgctgccttctggtcaggaatgtgggtgaatgtcagaccaaatagtgtcactttcggcttggccctagagatcaggaaggaagtgttgttagagcaagggctttgggagtccttggagttcgtaacctttgaatctgaaaagtaactgtacctagtaaattagaataatttctctctgg

SEQ ID NO: 391103 - DNA, 336 bp, Homo sapiens
attgactgatgggctttgtgtagctgttctcctgaaacaggcagagacagcctaaacgtccctcagtgatttccagtgacttctcagcatggaccatgggagtgtcaaatgcttcctttattttaatttattttattattttttgagacagggtcttcctctgtcacccaggctggagtgcagtggcaccatctcagctcactgcagactcgactctaatgttcccttggatataacttagtaaaggccacctgtcctgttgtgtgggctctcctggggtcctgtctcaggcccactgtcctccaccctctgctggaggtcgttgttacacattct

SEQ ID NO: 391104 - DNA, 655 bp, Homo sapiens
catcacatttttaactgtcccagtattgatcaccctatagaggaatgagactgaagtctggtagttattagtataaagagggtcagctgcagagactggtaccgagtagaggctctcatggtaatgatgctgctatttatagatccccatttcattagttgcagagtttcaaggaagagattttctctaggggaaatggatacttgaagttcattttcttcctcatattaaggcaaaaatgtgaacaaccttcagtataggacatatgattacagtatttttgcaggggcagtttatattctaaatatatttgcaatagtgaatgttgtaaatttaaaacaatgtagagattcagaaatgttagttgctattctggctgagtgctactttacgtacattgttttattacccttcttgtcattttttttcttgtaaaaattactaaattttcaggaactgcaaagctgagtacaatcatgactgtattccctttctttagagtgctgtaaggcctttaagagagttaactgattgcaagaagtgtagttccccaaaaaatatagtccacccactatgtgtatctgtatatatttgtaatataggtaattgtgctttccttctcaaattctttacctttgagttatttttttccctt

SEQ ID NO: 391105 - DNA, 307 bp, Homo sapiens
ggcatcctcacatagcagagaaatggaaggtgaaaagggcctaagctagttccctccagcacttgtatgaggcgctggttcagagtccccatggcttaatcacttcccccaaaggccccacctcttaatatcactactgtggggattaagtgtcaacatgaaattttgagaggacgcattcaaaccatagcaattgttcttggtcattctcttgactggagcctgatagtcaagagagacattttagcgtgtgtccttataattattattggtgttgaaatctaaaagtggctaggctcgctgggcg

SEQ ID NO: 391106 - DNA, 429 bp, Homo sapiens
gcgctcgtagaggatcccgtcgcgaaggtgttttcctatctctatgtttccagatggatccatttctacatgcatttactatcaacattaaatctctgccaatgatgcgtttaaatcccaacaaacctgaaaaaccaaatacttcaagcccaatgccaaagaagagcctatgagcatgccagctgtttgccttttcaccttcacctaacaccactccctcctaatggaaaatttcaacatgcaaattgttatgcagatgcagaacacagataactggtaatggctggtacaatattccatgaggtttctaacttacaaaaccacattgtattcatattctgtatttgtgtcacagggaactgaaccccagaatgatcttaatcctcaaatgccattaatgaaaccattttcattaagtagcgaagtcca

SEQ ID NO: 391107 - DNA, 120 bp, Homo sapiens
gattaatacagaaaggtaacataagtcagttagatcaaaactgccaaggccccaggaagtaagcctcgccccagccaagggggatgacgagaagcttccaattcaccagcactatcggag

SEQ ID NO: 391108 - DNA, 479 bp, Homo sapiens
caattccaaatacactggcttacgatcttatttaatatattatattctttaaagacaaaatgctgtgaattagcccatattttagttttgaatatggaatggtgtgttgaaatgacatgttgtagtagactcacttaaaagcaacaaaactcaactagccaaagcaagccaaaactggggaaaaaaaaaaatccctagctcaaattagtctccatttgtttactaaaaaaagaacaatcaatacaatcaatgaagacttaattttacaagactaaatatactacaaccaacacaggaccaaaaactaagccaccttaaatataacccattatgtatttcttcataattatgaaggccaacaagtttttatctaacaaaacaatctcattttaagaaaaataggcagggtgtggtggctcacacctgtaaccccatcagtttgggaggctgaggtgggcggatcacctgaggtcaggagt

SEQ ID NO: 391109 - DNA, 1145 bp, Homo sapiens
tctcatacagactcaacaaaaggcgaagaaagtacggcaatttaggaggtgtgggctgcaccactgcttttcaaaaggaactccattgttgaaatcccatagaggttgtcattttctcctaagaggacttgcttctaaagatccttgtggctacataattccttaaacagatgaaaatgggagactggcttttctggttgtgtttcttttagggtagaaggaaaacaactgaatatgatgtgagactttatggacaagaaagtgaaaataagctgtgctcagcctcacacagcctgacgcgcttgtgggaggtgcctgtggtgcctgagctgtgtcatcaaggccccggacccctgagagcttgcacctccctatttaaacaatcaatgagcctgtccccgaaggtttcaggtcagctacagctgctcctactggatggaatgggaaatagaaggctttggtggtaaggggcggtgtgggctggcgcatgctgagaatgtgccaagcggcctttccacaccccaaatgcccacccccaacatccatcagccttcttgtgaagtccagcaggctgttcttgtgaagattctatggtggaacagtagttatgaacagtgacttaactaagatgtcaaatgctcttaataaattttagtaagttttttgaattgtgtgctatatgttgtttcatgtttcctcaagtttagtaacaactacctcttcctacaggacttcccttagactttaacaaaacgcaccatagaacagtgcccagcttggagaggtctgtggtcatcagggaaagagggactgaagaagacaaggggctgtggagtggatgcagggtgtaggtggggtagatgtactgctatagggagagaagaaaggtggtttcagctcagggcagttctggggaaggaaaaagaagacctgatctatgaatggcagagtgcaggcagcagcccaagacacactccactgacttcagatgtcaggttccttcccacaaactctgaactatcctgcctacctcgcctcctcctgatttgtatagagaagtggtcccaactgtcaggcatgtgtctggccactctctacacctcgccagccttctctcactggactctccatttccctttcatccc

SEQ ID NO: 391110 - DNA, 550 bp, Homo sapiens
tgagacagaatcttcgctctgtcacccaggctggagtgcagtggcgctatctctgctcactgcaagttccatctcctgggttcatgccattcttccgcctcagcctcccgagtaactgggactacaggcacgtgccaccacgcccggccgattttttgtatttttagtagaaacggggtttcaccatgttagccaggatggtgtcgatctcctgacctcatgatccacctgccttggcctcccaaagtgctgggattacaggcgttagccaccgcgcccggccgcatgttccttaaggttatccaaagcaaacatgaaggcagattcagaacaaatgcagaaatggctaacatatgatactgcgtctggaatttattccttccagtgggttcttggtctctctgacttcaagaatgaagccgcggaccctcgcagtgagtgttacagtttgtaaagatggtgtgtccagagtttgttccttcagatgttcagatgtgtctggagtttcttccttctggtgggttcatggtctcactgacttcaggagtga

SEQ ID NO: 391111 - DNA, 621 bp, Homo sapiens
tcaaagccaatatattttcctttatgcatatatgttctacctgcttaaattttgattttaaaaaataaaaaaagggaaccaggccaggtgtggtggctcaagtctataatcccagcactctggggggctgaaacaagcagatcacttgaggttaggagctcaagaccggcctggccaacatggtgaaaccccatctctactaaaaatacaaaaagttagccaaatgtggtgatgggcgcctgtaatcccagatacttaggactacaggtgtgcaccacacctggctaattttctaaaaaattatttttttcgtagagacaaggtcctgctacattgcccaggctgatctcaaacttttggcctcaagcaatcctctcaccacatcttccaaaggcactgggattacaggcatgagccaccatgcctggcctctcaaagttttaaggactattctttaaacttttcactgcttgattttgctttagtgggtttactttcaacacaacatttttacctgttgtagaattaccaatgccagagatgtatttgttagtgagatcaaactgctctcacacaatcataggcaaaatgtgggatgtatttgtatctctataggaaatg

SEQ ID NO: 391112 - DNA, 156 bp, Homo sapiens
taatgaggcggagtctcgctctgttgaccaggctggagtgcaatggcatgatcctggctcactgcaacctctgcttcctgggttcaagtgattcgcctgccttgctgggatgacagacgtgcaccacaatgtccggctaattttgtatttttagta

SEQ ID NO: 391113 - DNA, 581 bp, Homo sapiens
ctggaagggttaagggacttcaggttgggaattgatattcaaatttttattggtgttgagtggaaattctggttgggcaggattagtagtggtgtattctatttattttttatttttatttttatttttgaggcagggtctcactttgtaacccaggctggagtgcagtggcgccatcacggctcactgcagcctcgacctcccaggcttaggtgatccttccacctcaggctctccagtagctgggactacaggcacgtgccatcatgcccagctaagcttttgtagagatgagatttcgccattttgcctaggctggtctcaaactcctgacctcagatgatctgccctccttggcctcccatagtgctgggattacaggcacaggtgagccactgcacctggcctggctgtggtgcattctgaatagtaaattttaacaatgaagaacacttaacgttaggtattttggattgactaaaacaagtacagagcactttccatgtttaacctgctcgtaaaaagacctgtatttctatggagaaggaaagaacaaatgaaaaggtatgtaaacttctttt

SEQ ID NO: 391114 - DNA, 732 bp, Homo sapiens
cattgagttactgatcaacagtgagcaatggaagctgttcaaacagaaaggaagcccagccgtgaggtggtgctgccaacacactcctttgaagctcggctggcccctgtggggagtgcaggaggctgggggtctactccctacggttcccagagaaatggtagcaagaagacggtgttatttctaattggatgatgaaagtcagcctaggggacagagaccaaagggccatacgtaagaagaggaggaagtgaaaacatctgaatcaaaggttgaggtaaaactgagagacagtgtttgcagtgaaccatgcagtaaccttcatcttgccccctggtcttcaggaaacaagcaagtggggaaggaccgaaagagggtactaaatttccaaatgatcagacgtgaagtttcatggcccataatggctacacatttgaagactcaagcaaataaattagaaataaagcctaccagcaaaccaaaagataattacatgtaaaagcaagtctccttgatttctgatacttgcacttatgagaatgagaaaacaacgatagcacagagagatggtggacatggaggacaggtcctgtaggctcacttcatgggctttttcataccctgaccactttccacgctggattcattttactgtagtgaaacaattggctgtagataatgttaaaagataggactttggtaacaggagaattcatggattcttgaaattcc

SEQ ID NO: 391115 - DNA, 703 bp, Homo sapiens
aaaacattagagtggtgaagtagcttgaccaagactgcagaaagagcatatcctaaagccataattcaaacccagatgttctgacagttaagatactttaaaataataataagaaaaatagcaataacacaataacaataactagtgtcaggcaggtttatgttgttgaattctgtttgcttgtattttgctaaggagttttgcattggccaaagggcagtatttaataattggtgccaggaaaactggatatccatatgcaaaagaacaaaactatatttcattttttatcgtatacaaaaatcaaattaaaatggattaaagtcttaaatgtaagatctgaaactatgcaactactagaagaaaacactgggaagtgctgtaggacattggcctggacaaagatttttttgggtaagaccttaaaaacacaaacaataaaagcaaaaatagacaaatgagaatatatcaaggcaaaatgcttctgcacagcaaaggaaacaattagccaagtgaagagacaacccacaaaatggaagaaaatatttgcaaactagctatctgacaaaggattaattaccagaatatataaagaactcaaacaactcaataccaagaaaacaaacaatctgaattaaaaatggccaaaatacctgatagacatttctcaaaaaaagacatacaaatggctagcaggcatatg

SEQ ID NO: 391116 - DNA, 284 bp, Homo sapiens
ctaatagtgtcagctactcaggagtcttaggtgggaggattgcttgagctggggaggttgaggctgcagtgagccatgatcctgcccctgcattccagcttgggtgacagcgagatcctgtctccaaataaacaaatcattacctgctgaaatagtcattcccagtttatataatcagatagctagagggtaactatagacaagaaagcctgtggtttaatttgataggaaagactctaacctcattgagagaaaacgatcagaaaatattccttttctaatgg

SEQ ID NO: 391117 - DNA, 716 bp, Homo sapiens
atatataaaaagggaacagactctggtctgcccagctgaggcttgcttcatattacccccgaaatttaaaagaacaaaaagaagataatgtggaaagagatggctaaaacaaaatgacccaatgtgaatttctgaagaacagtgatggacacactgcggtacatcgtattattctctccacgttcacatctgtttgaaatgtgatccataatctttcatattaaaaacagtcaaattgaacactagccctaaagaatagcctctgatgggttccccatacatttgtctaggatcgataagggttaacaagggctaagagagtgagtgtgtgtgtgtgtgtgtgtgtgtgtatgcacacataggttttagaatagtgcaaaagcatgcaacagaatcaccaataaacagattctggtccctagctccagggattctgatccagtaggttcggtgtaaagcctgagaattagcctttgttttcttttctgttttgaggcagtcttgctctgtcgccctggctgagtgcagtggtgcaatcacgactcactgcagcctcaacctcccaaactcaagcaattcttccacctcagccttccgaacagctgggactacaggcatgcaccaccacacctggctaatttttgtatttttcatagagacggggtctcattatgctgcccacgctggtcttgaactcctgggttcaagagatctgc

SEQ ID NO: 391118 - DNA, 551 bp, Homo sapiens
gggtgggcctctcaggttgaaggtatggcctgctctggccatggagaagggaatgggggaacgaggtcctgcaaggccccctgtgtcatggggctctcaaggcaagaacaggatggagctgggagacaccccagctgtccagatgagagccagatggcctagagagagttcagctgtggccacagctgggagccagggcagaagcttaagacacagtggtaggccgatggattcaccagacaatccatcagcggttggggattttcttggaaaaagcaatcgatccttagtctgcattgccttccccccatttcctgaacacctgctatgcacaggcttcatgctaggctcagtaggaagagcaataaaccagatttgcacaccctggttggtgaggcatgcctggtggctcaaaataactaagccaagacagcttaagtgttcttgagcagagaggagcctcatggcctgaagctgggtgctccaggaggacttcctggagtaggcacaactagagtagagtcttgaaggaagggagacacaggctggag

SEQ ID NO: 391119 - DNA, 736 bp, Homo sapiens
gggaggatttcttgagcccaagagttcaagaaatttcaagacagcttctttcaatttctgtagctatccagttgcagactggtgaaatttgcaaaccattgttaaccacagaccacactttgagtagcaccaaagagaggcaacagaacagaatgtacatatgtggtccttagagcaggacagcagaaggcagaaaaagaagattcttttaagcaaacaggtaataatgacatcatcagtaactacagttactgatgtagttctctactaagttctctgtactcaatcagttctctgtactaagatatgggtaacccggggcagtgcaagtgcagaggaggcacctaggccagcctgggtatcagggaaggcataagacaggtaggagttgggtgggggaagcattagtgacgagtgggaaggacactccaggcagagaaacaagttctggagtcattctgcagcatatgggttagaggatgacctttcctgtgatttgatggctacttgtctctgcgcatcagcattagtttccatgtgtataaaatggatatgataatcctttctttgaatcacaaaaagataaagcatgagatgtacctgttataatgcctggtgcttgctaatattgctgttctgtgtgtaaaagatacaggagtcagagctgccacagacagcgagttacagcactttgcaggggacagctcatggacccaggactggagcccagaatgac

SEQ ID NO: 391120 - DNA, 234 bp, Homo sapiens
ttatacactgctgaggttctggccacatgctactccttgcagttctggctctcctttggaacacttgaattattcatgacacacagtgccatcactacacacaggcaagtggggctgcagcccggcacaaacaaaccgagggcctttggtgtgagaatggcagttctgtggctttaagaaagagctggtgcaccacactgcagaaagcctgtagattcagctgtacctcaccat

SEQ ID NO: 391121 - DNA, 448 bp, Homo sapiens
aatcatgagtgacttctcgtgagatctggccactgaaagctatgtcacctccctactctgcgtgttttcctcttgccatgtgagacaactcactctttctttgccttgtacaaagattgaaagatttctgaggcctcccagaatcagaagccctgtgcttcctgtccaccctgcagaaccatgagccaattaaacctctttttcaaaatgaatcaaacagaaaatggcaaatgacgattgcagcattgctataaagatacctgaaaatgtggaagcagctttggaactaggtaatgggcagaggttggaagagtttggaaggctcaaaagaagacagatgagaaaatttttggactatcttagagactggttaaatggttgtgataaaaatcctggcacaaacatggatagtgaaggccaggctgaggaggtctcagatagaaataag

SEQ ID NO: 391122 - DNA, 333 bp, Homo sapiens
gagtccagaggccagagctctagttagctggagacctctgccaagtcaccaccttgctgaccctcaatgtccttctctgtaaagcgccatgatacctgctctatctcacagagtaactatggagatgacatgagagattgaaggcagccatgatctgcaaactatggagccttatgtaactacacgtgatgtgatgtgatgtaatctagctatattatctctaaggaactagggaaactgggagtggccaagagagtcactccttatctataagaaacacgtgagcctatggcctatcccagggaacatgggtcgttataggggattaaaatc

SEQ ID NO: 391123 - DNA, 275 bp, Homo sapiens
cgaattaactctccagtgtgtctagaaggataccagttcttcacttggagaactgaggaaatagttgttcttgagtgtttttgttttgtggttcaaatgagaaacctttgttggaaaaggctgctggggtccttctgaatagtcaagtacataaactatctgctatgtctatcatgctaacacatgatactgatcaagtagttacataataatataattgattttgttaaagttggtttacttaaaacattttgaaagggagatgctcttcatga

SEQ ID NO: 391124 - DNA, 398 bp, Homo sapiens
catgaggagtaggaaagcctcatctacctggctcctctcatcccacactcagtcatttactctggcagctaatggctgccacgaggggcagctgtggctctgagcattgctctttgcccctccatatgggcaggagagagcccgtgtctaggacagggactgccgcagcctctctggccatatttattgacagctgttggtgtctggagtgagtgggaagaggcagggaagccacaccgtgcccttctagagaaggaccaaatgccctcttctgatgtggctgctgttgagcttcctgtttagggggtgaaacagggagtggcaggaacacaggccgagtttagtgtggcctaggagatgccattgtcttgggggtttggccagactgccagccctgg

SEQ ID NO: 391125 - DNA, 436 bp, Homo sapiens
ccggacgtggaccactgccgtatatcggatagcgaaataaactcacgatggattaaagacttcagcataagacctaaaaccataaaaaccctagaagaaaacctaggcaataccattcaggacataggcatgggcgaagacttcatgactaaaacactaaaagcaatggcaacaaaagccaaaattgacaaatgggatctgattaaactgaaaagcttctgcacagcagaagaaactatcagagtgaacaggcaacctggagaatgggaaaaataactgcgatctatccatctgacaaagggctaatatccagaatctacaaagaactttaacacatttgtcaagagaaaaagtgaattacttagcaattgaagagtgataaaaccactgataattttacaaatcatgaattttctttggtaattaaagggatgac

SEQ ID NO: 391126 - DNA, 591 bp, Homo sapiens
ggattggggaaaatagaaacgctagagtaaaaaattataaagtatgcatgcgaaggcacacttatacaggcacattgtctaggtggtataaggatcaaatggatatgataacattttgtagcattgtaaatgttcacaaatgtgagggttaccttgatatgaggtggagagctgattcccaatctcagctctgatcctcactatgtgtcctcatttataaaatgaaggtaataatacaccttgtagggtcatcccaagatcagacacaggaaagcagatgagcccactttgtaaactaaattactatgcaaatataagccatcacaaaaaaggttggctcaggagagaggatatacttattactctttcataatttaaaaaataaaatacccaggaccgcaggacaactcggttaacatacatttggctttctcaaatcttaccattttagaagcatttgcaactgcttataaatcacttctcaaaattgccctgagctgaaatgatatttctaagcgcatgttaaaagcctataagtgcttctgttcttgaacaaagtgaaatcagtttacgttaatagaagtattaatt

SEQ ID NO: 391127 - DNA, 412 bp, Homo sapiens
cacaacaaataatggcagttggagaatcacaagaaatggtaaactctgcctgtagtaactgctcaaattgccaaaaaaatacttgagactagacagacctattctcatatacccacttattttcctccctaaatgttcacttagaaattacctagtttttgtcttagcagtcagctttccagagagttgatttgactgaagcaaattcttggctactagagatctttgcctgtgggagatttgagtggtgtcagattgtaaacttttctggagcctgcctctggagttgttccacctccacgccaccccaccacgtgccccatgaccctgtccacagagagcttgcgccctggccacaagcagcctgcactcgccttacagttacttcctttgttctcatggtctttcttgt

SEQ ID NO: 391128 - DNA, 687 bp, Homo sapiens
ggtctggaagaagctgtttccctaaggcgtgttcgggtgtgatttgtgtggggggctgaaagctactgcatgaatcataatggctcattgaaatgtattgaccttgctttaaatccagggaccggctcccaaacacactctgaatgctggtgagactgttttagaagctaagatttgcactcttgagtataatactactggagtttgtttttatccatgttttataatcattatgtacgtgtaaaggcttcaacttttacgtttaaatcttttccatggaccttttacatgagtaaaaaattactgtgcctaggaatatgtactgaaattcagttgtatgtcattttatccttaagtgaggcatcaagatttcatggaaagcacggagctgagttgtgtgactttaagtgacttaaaccctgtgcttcagtttcctcaactgttaaaggaaggataatatgcctatcttttagagtacttgtaaggctaaatgtcacaacagaaatggtacagaggaagcattcagtagaggccagctcccttttattaagatgcaattttcagaatatgtagactggcttagatgaaatttgatcaatttatttagttgctcttctgcgtttgctaaaagtgcagtggtgggtggcatcacacagtggtcggagtcagaactggcttttgatacca

SEQ ID NO: 391129 - DNA, 411 bp, Homo sapiens
ttttgcaccaccttctatggttttatatttctggtagccttcaggatcttggtgtttattcctgattgttttgtgtgacacctagtggtaagagtaaggcacaggcgttccttgatttgtcatagtgccttttgcaaaaattgggaggtgctgagccttgatgacttgtccctacagtggagatttccaaggaggtacctattgttttcctgcgactctgggaaacagttttgaataatgtgatccaacaggttttctccccatcatctatagcgctatatggtttaagtcaacaaacattacaacgtgggtgaaaaagaatatacacttggaaattagaaccatgagcagactgggcagaagacaacaagagggtctggttttgatttagaaagacctttatgggccagg

SEQ ID NO: 391130 - DNA, 524 bp, Homo sapiens
agaaaacgttattaaaattttaaagctctaaataataaatcatcaaggccaattagtagagttagaaagaaacttgatgattgtctggctcaattctctgattctctgtacatatagtaaaattatgtccaaaaagatgaaataatatatggaaagttacacagttggttaaacccctcccatcttctaaaggtagtgaggaaaattcagaattagctgtatatgcaaattttctctctcttatcagtcaacaatttagacaagttttctagtaagaagggtatgaggacagacagaggcttgctttgtacctgctgtgtgctagggacacactcttgcaagtgatttctgtcctaatagagctgggggtcacgttctgttatgggagagcctataaagcatgatacaattaataaaaataatagctttatttgagggccttcctgttctacacactgtgctttttgagaggtgatggttgtttgtgagattcagtatctgggataataagataggcgttgaaa

SEQ ID NO: 391131 - DNA, 325 bp, Homo sapiens
tgggcacctctatgtctcagtcatagggctaagctctgtttatgcattatctcatcctcatgaaaacctttgagggaggtactattattaagcccattttacatgttagaaaactgaggttagagaggataagttacttaaggtcacgcaattcgtaagttgtacaattaggactcaaatttgggtctgtttgatcttaaagttcatgctcttaaatacttcatcacactagctcctctgggggctttgggtgtcctgggatttggaggtggcggcgcttcagggtcagtcactggattgcttttcggctttgctaaagtcctgt

SEQ ID NO: 391132 - DNA, 173 bp, Homo sapiens
acattttggaagccaaggcaagaaagtatttcagtaatgagggagaggatggccataataaaaaaggtagacagtaacaagtgttagtgaagatgtggggaaactggaacactcatacattgcttggtgaaaatgtaaaaatggtatggccacttggggtttttgtttttttg

SEQ ID NO: 391133 - DNA, 720 bp, Homo sapiens
tgccgttcaatcccaggtcgttttccctttcagctgcaatgccgggattttaaatagcagagatgaaaggcccctgcccccgcctccctcctcccctgagttcatgtattatgaatgaaacggcagcctcgctgcttcctgaggtgctccacttcaggctggggtgcaatggctcgatctcggctcagtgcaacctctgcttcccgggttcaagtgattctcctgcgtcagcctcccaagcagctgtgaatacaggttggagtgcagtggtgctgtgtctggagtttgttcctgccgttgggtttgtggtcttgctgacttcaagaatgaagccacggaccttcacgtccatcgccttggcttagtgcatgtcaccaaaaattctccaggaatttcatagtttggaccttggtggcatggctggccctggattatccatgcagggaggcctgatcctgtgacagctggctgcagcagggggctgcccatcttctgtgctttgtggtacatatctgtgtcaccaaagtagcggcctcggtacagcaagcctttcatctgctgcttctccgtccagcagttgttccagaggttggcgatataatcatctttcacattcggtttgactgtttggaggctggagcctgtgtactcctcggagaaaatgcctgccacatagtagatgacactcaggtggtcagtgactcgcctgtgatgtggccc

SEQ ID NO: 391134 - DNA, 435 bp, Homo sapiens
agtatccctgtaacagtgttcattttacttacctgtgttataacacttcgttgactggaatgaaagtgattaagttagtgttaactctctgggacttgtgagtagaagagaattttgtgtataaaaactacctatcaggctatctgaatggtcctaattagagacaaatactgccacttaaaacttacccagtgttcatctaattaaatgtaaacttttcatatctcatcatacttttctaatacataaattttttaaattacctggcaaacaaaaatattttcacaaattaggaaagtattgtctagctttggagtaagagagcccttctttagcaagacaggaaacccagaagccattaaaagaaaagaaacacctttgaccttagcaaaaagaaatagtggttataaaagatgaaattaaagccaggtgcag

SEQ ID NO: 391135 - DNA, 384 bp, Homo sapiens
gtcctggctgaggtaccttctaggactgaagtaagcccccagtgagatgggtggggctgtaaatgttaccgctgtgaaaaggccttaagagatgatttcttgtctcacattacagattgggaaacaggcctaaacgaattagtgcctgagctaggataagaactgctagtcagagcaatccactttaccacactgcccctgacacaaaatgactttgagttgttgggtgtgttagtcttggatgttttctgtgtcatgggatcagatctcaacaattgtgaaagattcctctgacaaactgactggttttgagcagtgtctgaaggctctgactgactgaatgaatgatactcttactttgagaaaggccaactgttgtgtgtc

SEQ ID NO: 391136 - DNA, 364 bp, Homo sapiens
atccaaagcccagatacactgacctccccaatgctatccccaccccaggcctagcaatgctccttgctgatcccatcttcccctaaagtagtctcacagtttgcatgaaactacccaggtccaagcaagactcaccatgaaaccctggtgagtttgtggagatgcctcaccatccatctcatggccactctcccctcaaaagcccttccttatactccacaggctgcccccaacataacacacaaacatacacacacatatgcacgcacgtgctcacacacaccctcatatggacacatgactacatatattcattcccacacacgtatatgcacacacatggttacacagcctcatacagaca

SEQ ID NO: 391137 - DNA, 254 bp, Homo sapiens
gtcagaagtgagcattccagccagaagaaactgtatgtgcaaaggccctggggccagagcatgtctgatgtgttcaatgagcaggaaggagccagaatcaggaacaaaggtggcaagggggcagtgctgggtgcagaccatataaagaattgtaggcctttataaggcctttggtttttattttgagtgagctgaggagcctttagagagttttgagcagaaatgtggcataatctaacttaggttttgaaaag

SEQ ID NO: 391138 - DNA, 285 bp, Homo sapiens
cttcaaggaacagacagctatggactgcctccctagaaaggtacatagtcactcagttttccattcagtttcaaggggtctgtggatcccggtggcgaacttagccggatgcccatgctagaccatgcattctaagcctctttgtcgtggcttgtgccattttctcttatatctttgttcctttgtctttgttcctgtgtttccatcagtatttttcttcagtgcactttcctgtcagagttaatttttccctctatcgtgcttgtacagcacattaccagaaca

SEQ ID NO: 391139 - DNA, 432 bp, Homo sapiens
tgcctcccgcacaatctgccttctatgcctgccccattcagctctccagccttgcagcccctcatgagtgtggctgcagacatgctgtccggcccctccctgtgctgctgaccccctctcatgggtcccccagtgttccgtccccatccctgagttacggagccgcctgccgatgccccgcccatccctgactttgggtctcctgctccccgccagcacctctgcgctaaccacaccctctacctgtaaccacctctcctgtccccagcccttgccctttctccatcccatggccatcatcctggtctatgcattcatctctgctcgcccaggagccagtcagttacaggggtcacactccagaccatggtagttcaggagcccagagagagccctggagacaggccgggtctgggatctgggcctcgatgg

SEQ ID NO: 391140 - DNA, 327 bp, Homo sapiens
acaaatatttactaacatctcttcaaggctaggtggagttccttgccttggaggtgaataggcactaaactgatccacatgtggcagactttaaaatgataagttcaacgaagaaaaatgaagcagtgaacaattgtggggagtgggagccattttagttaggaacattagggaaagcctctgtaagagggtgacattacagcagtgttagttttaatagaaaacataaattttcaaacatagggactgttgaataaattctggcacatccaggcaagggaataaacatagcagttgaaatagtaacaacataacaatgtttttctc

SEQ ID NO: 391141 - DNA, 464 bp, Homo sapiens
gtagctccagctactcaggagactgaggtgggaggattccttgaacccaggaggtagaggctgcagtgagctgagatcacgccactgcactgcagcctgggtgacagagatcctatctaaacaaacaaacaacaaacaaaccaaccattgttttgggaggaagttaagttataggaaatggctgaaagttttatctatttgtggaactagaactagacagagtgactctggatttgtctgtttattcagggtgcaaaggggttttgtttttgtttttcttttcctgacagagtgatgttatgtacatgcctaatgatcattgcagcaggggaaagtgtccttttagttttttcaagtctgataataatgctaataacaacgacaactattccttattaaagaacttctgtgtgccaggtcctgcttaaggtgttttaatatacaaggtgtccataaaatccctg

SEQ ID NO: 391142 - DNA, 362 bp, Homo sapiens
catgtgcgacctcaggccaattgaggggacagagaatcctgaggaaagacagatcacagagggctagaacggtcagatgaaggcttaagtgagtcataaagaggaacgaacacacagaaaacacaggtaccaaggaggcggagcttagctggggacccaaaacactttggcatgaaatgacaagaacattaaaaaaaaactgatgcatttagcatacaacaatgtattacttcaaatccctgtctgcagaataaaggtgaaataaacctaggggttatcagcgcctaatgagaatctcctaaaactggggaaaagaatcaatggttccattggaatccacccttaagtgactcaacagccac

SEQ ID NO: 391143 - DNA, 373 bp, Homo sapiens
taggtgaaaagccacggcaagtgggtcgactcggacggataccggtgcggctgccccgggaggtgtcgcagttcggggactcccttcgcactggtcgcgaggcaggagggagcagggtgggaggcgagtcagaggagggtgacttacctgaagaatacaggttggtagcctgcacacctgaactcaacgctggcgggcgagaaaaccaagcagcgctacctccaagtaagggcgctcccctggagaaatgaatgcctggcgagcttctggagaacccactattagggctggaccctgcgggagggatagtgtcagctcccttccccttcgcccttttttgtccataggtaggcttttgtagggctctaaccag

SEQ ID NO: 391144 - DNA, 528 bp, Homo sapiens
atttttaaaaatatctttatctcttttgatttctttccaataagctttttgcactttaaaaatgtagtagattccttctaaagtagggagtgccagttcctggtttcctgctttgttcctcttgcatcactggatctcctctcccttcaccatttgccccaagcccatttttggtatctctgccatcttactattgttttttttttttttttttggaagaacagagggctcttttttaaaatgggccgagtcctggggttctctggaaaactctcctgtgaacccctcgtgtgaactccaaacccaacctctagagcctctccgcaagattagctctctttgttgtgcccaagactgtggagtgcagtggcatgatcacagctcactgcagcctcaaactcttaggctcaagcgatcctcccaccttagcctctctggtggctgggactacaggcctgtgccaccacgcctggctaatttttaatatttttattagagacagggtctcattatgttgcctagggctgg

SEQ ID NO: 391145 - DNA, 338 bp, Homo sapiens
aatagggcagtaatcataataagtaaatggcagagtcagtattgccattgcttggtggcttcattgatgcccctttaataatatttctgtagataaggagcttatagtttagtcagaccttattactacccaattctgtcttttatttttccagaaatggtatgttaagagtagatgtacctgtattcaacacatctgtttccacgtttgtttcttttttacttgagactggcaaataagattaaaccaaaagataaaacaggacctcattttttcaaaagggctgtgtttcagttatcctttgactaagggcagaggtaggagtagagagtatgtag

SEQ ID NO: 391146 - DNA, 362 bp, Homo sapiens
ggaaggtggagagcttgtagaaaggatacatttcctgcacctgtatgaaagaaactctctgcacacaagcattgctttatgattttgactttaccaatgatgttccacaatcccaagtctttaaccttcttctctgtgtgtgtgtgtgttgttttttcacaagctcttcaaggacatggacgactttaatttccagcataagacaaaccctaataattcctactcatattgatcccttcctacttttcaaggttcttttagttaaccaatctatatgtattctgtccctggatgttgtactgtagcaactcttttcatctgaaccagaagttacttatttagtttgatatctccagcaatag

SEQ ID NO: 391147 - DNA, 893 bp, Homo sapiens
aggacttcgagaccagcctgggcaacacggcaaaaccctgtctctacaaaaaaatacaaaaaattagctgggtaaggtggtgtgtgtctgtggtcccagctattcaggaggctgaagtgagagaatcgcttgagcctaggaggtcgaggcttcagtgtgccgtgatcgtgccacagcactccatcatcatcatcctgggtgacaaagtgagaccctgtctccccaccaaaaaaaagagggagtttcatctcccaagaaaatgaattagataggaataatagaaaatttactctcagaataatagggttctagctcctgcaaccaaaaaaagatagttcttttttacaacctgagattactttttcaagcatttctccagttccactggcattgaaataatagttagcaatgcatctgagcttttcttcctctaatgagcaggcagagaagtcatagatcatcatttggaggactataaaataagacatagcttagcaaaaggaccaaaatacattcagaggaggatgctattggtgaatgtcctcaaagcctataatctggaaaaatacaaggcatatctctgaaactgtgaggattagcaaactagctaacctgaatctctgtcttctggtagtataaactaggtagtttcaaatctgagtagtttctccataaaagcatttcttcccaaacgtttcttaccaaactcccaaataaatgagaaaaataaaatacagttttataatttttgagaaagattatgggattatggtatttaaaaagaaaagcattctgtagagttggggaaatctggaagactcttgaggacatagctttgccgaaattgctggttgtcacaagactcttcaaaaactacttttcatcagacatct

SEQ ID NO: 391148 - DNA, 446 bp, Homo sapiens
accatagcattctacttgcaggaatttttcctagagatatctttgctcatgtgtatataagttactcaatgcagtggtttaataaagcaaagatttgaaaaaaacctaaataatcaccaacatgggctggttaaatacatatgatatatccaaacataaaatgcatacaaaaaaaaaagaataatacagcctggcaccaatctgcagaatacattgtatgaaaaaggccaagtatggaggaatagaagaaataggccaagtatagaataggccaagtatagagatgcaatcatttgtgtacaaaaagagataaacagtgtcaatgtgcttgcttttgtatgcacagaggatctctgtaaatacaccccagacattgagaccactgggtgactctggagagaggttctggtgcttgggagagtgacatgggaggaagaatcttctac

SEQ ID NO: 391149 - DNA, 479 bp, Homo sapiens
gccagttttccgagcatacacaattgtgtagtaaatcaggggatgttgcgttgaagctgcaaaattggtgccaagtttgttatgcaggaatagaaaactaatatgagcacttacaacactgtgctctcattagctattgacataatagtttccccaaatatgggctccttagatttaggctctaattatccttgtaacctcagggctcttcatgagacaggtactccccaaaacgccatggaatgaaagtttaaattagacaacagggatgcagatcagaacctggatagattctgaccatttccatttctcaagaatgggcagacggatactgacaccaataccaggatacaaggaggcggccccccttcagtccaaagctctaagacctattctagaggcaaggcaagtaatccaggctcagctgccccatctgctgctccagccttgcttaagtggacttccctccaaggaacatt

SEQ ID NO: 391150 - DNA, 447 bp, Homo sapiens
gaccggggaaatcccggtggggcgctgcaaaattggtgccaagtttgttatgcaggaatagaaaactaatatgagcacttacaacactgtgctctcattagctattgacataatagtttccccaaatatgggctccttagatttaggctctaattatccttgtaacctcagggctcttcatgagacaggtactccccaaaacgccatggaatgaaagtttaaattagacaacagggatgcagatcagaacctggatagattctgaccatttccatttctcaagaatgggcagacggatactgacaccaataccaggatacaaggaggcggccccccttcagtccaaagctctaagacctattctagaggcaaggcaagtaatccaggctcagctgccccatctgctgctccagccttgcttaagtggacttccctccaaggaacatt

SEQ ID NO: 391151 - DNA, 407 bp, Homo sapiens
tcttttaaatagatacgtgatcatttaacacacgggtgttaagttcattcttgctgcaaaagaaggccattgtacctcctgaccctgaaagcaagatgaagtcactgagacaccaaaggttaattgcttgcccaaagccatgtagcaacttggttgaagttactttagtgtcgaaagctccacatatgtgcttttcgcaaaatcaatagtcaccccatgcaaacgaagagatggtaattagagatgggacagaccccaacatatccttcatttgaagatagaataaattcagcaagatacctaattattatcatcatctttcacaaaaacatatgtgatttttcccccctacccaaatgttttagtgaaaactgcaactgtgcattaaaaggcagttttgcatgcat

SEQ ID NO: 391152 - DNA, 761 bp, Homo sapiens
aagacttatttatttagtgtatggccatctcatttccaagagtcaccaaagaagtgagaatggattagatagggaacaagctgaccattggattagtttatcagatgattagcatgccatgctaatttatcaagacatggaacatttaaagaaggggagagtaacatatacagggaagataggagatctttgtcccaattatttctttttttttaatgcatgaatagtcttttggtaaatatagtttatgtttgtttctgctttctaagttaggctgcaaaatattatttatcggtggtattctttgaaattgattggcatggcaagactgtaaaagagtatccataggtgtatttaaaaataaaagatcgtcttttcatctttgcagaaaaacatgtatttactattgcttggaatagaaagcagaattttgctgtagccattaggaagtgacaaacactacgccataattatagtgagaagaaagcatcaaaaagaaatgttttggttttttttatatacagttggcacaaaaatgtccacatatatgaatactctaaagaatgcaccataaaaagaaccttccaccactattaacaggattaatccgtgctcattaccatgggattggggatacatttttacatgttcttgattagattcaagagccaaagaataaggcctaattgatgaaagtgggctctaattttgtgcttttaaaataatggcctctggccaaatatgggcaaaagaaacagcac

SEQ ID NO: 391153 - DNA, 306 bp, Homo sapiens
ctccctacctccaggaccaaatttcgcacatctatgcccctactgatggcattgccctctttgttggccttctggtagaattcaccagtggctccttaaggctgatctgctttttctacaaagctgttttggaagtactgcctcctagcataagaggaaggtagctaactatggagttgcatctgcaccttggataagctgaggtagcttgtagactactgtcttgtcacctggctgtcgggctagtcggggctgtcgggctagtcggggctgtcgggctagtcggggctgtcgggcagtcggggg

SEQ ID NO: 391154 - DNA, 216 bp, Homo sapiens
gtagacgaatcctcctcctcctgaaaatgtgacctcttaccttagaaagaaaaggaaataggatataaaactctatggtgtggcacaggtatgcaaaaaaaaactaaaaacaaaatccaaagcaaaaactgtgcattggcctggcacggtggctcacgccctgtaatcccaacactttgggaggccaaggcaggaggaggagaggaggaggaggaa

SEQ ID NO: 391155 - DNA, 299 bp, Homo sapiens
tatgtatgtatgtatgtatgtatgtatgtatgtatttatttatgtatttatttttgagacggagtttcgctcttgttgctcagactggagtgcgatggcgcaatctcggctcactgcaacctccgcttcccaggttcaagcgattctcctgcctcagccttcctagcagctgggattataggcatgtgccaccgcgcccggctagttttgtattttcaattgagacgggatttctccatgttggtcgggcttgtctccaactcccgacttcaggtgatgcgtccacctcggcatcccaa

SEQ ID NO: 391156 - DNA, 357 bp, Homo sapiens
ccatgatagattttttttaaataagaacttgaaaaaaaataagtcatgcataaaatctttggtcacaagagtgaaagatgtgtgcctgtacagctgttataactattttcatgataaatacttaccttcagtacaggaatttagcagcacactttaatttggatttgaaaagttaacataaattgtctgactttgacaatagctgcctaatatttcagttttgtaaactacttccaggttctaccttcaattctaccttcaagatgaacctagtggacgtattcatttttaaaagctatattccagaccctgtaccctaaaaccagtttctgacttgatgtttagggaattacatca

SEQ ID NO: 391157 - DNA, 184 bp, Homo sapiens
ttagttttagggggagtgagagaaagcacctggttgctccaggctgatcaactggtcagtgtttccagctactccttctgctctgaacagatcagcaggtgtttcttgaccttgcctgggttagagtttagctgagcggtgaaggcaaagggtacagaaacgtggcctgtggctttgaagattt

SEQ ID NO: 391158 - DNA, 252 bp, Homo sapiens
  misc_feature (10)..(10): n is a, c, g, or t
cacccccggngttgcgctcccgcccggccgtgcgctcggagtggtctatgcagagatacgatgggaagcctgtgacaatgtgattgcctcagaaatgagatagataggcaggtcagcgggaagttcgggctgcagccctgggcacagctgaaacaactagggagaaacccaggaagagaaccaagaaagcaggagcccaaagccacatgtttagaggaagacgatcagccatctctataccgttaggagcct

SEQ ID NO: 391159 - DNA, 644 bp, Homo sapiens
gccaaaaacaaattaaacctaaaatcactggaagaaaaataatgactatcagcaaataaataatactaaagatcaataaaataaaaaaattatatttttgacaagataaaattgataaattactaggtagtctaaccaagaataatataaaaaatattcaaataaacaaaattagaaatgaaaaaggagatattaaactgatactacagaaatacaaagatcatcagagactattataaacaactatttgctaacaaactggaaaacctagagaaaacagaaaattcctgcatacatacaatctaccaagattgaattaggtataaatagaaaacttgaataggccagtaatgagtaatgagaattaatcagtaataaaaagtctctaccctgaaggaaaaaccctggactggatggcttcaatgccaaattctgccaaacatataaacaagaattaacaccaatgctcaaactattccaaaatttgaagaggaggaacttcaccctatctcattctaagaagccaagattaccctggtaccaaaagcatacaatgacacagcaaacaaagaaaactacataccaaaatccctgatttacatagatgcgaaagttgtaaccaaaatactagcaaaccctataga

SEQ ID NO: 391160 - DNA, 331 bp, Homo sapiens
tactccctggactcttgaagtaatagaaactaaggaaatcatgcgtggctgaaatggcaaatctaccctttgctgactataaaactgttcacccaaactcagggtgcctacagccaccttaccatagtacaaaccctgcagcctctctaatgaacccagaggttgtgaaatacttccctaaagggaaaacaatggtacttggagcaagatcagtgcctaagggtaagaggggaagcttctggaaacttaagtaaagattcaaacagtagaggccagaaggaggggaagcttctggaaacttaagtaaagattcaaacagtagaggccagaa

SEQ ID NO: 391161 - DNA, 254 bp, Homo sapiens
aaaactcttcacttcttctctgctggaaaatttctactcattcttcagtatgtccagatcacatttcaacttctctaagaagctcatttaataagactaagtcagtcactcccacttctttgtttcaacagcactaccatttacttctactagagtagttaaaatactgaattatgactattattttggatgtctgtctccatgtactagaataaaacttcaacaaaaaataacattaggatacagtagggaga

SEQ ID NO: 391162 - DNA, 340 bp, Homo sapiens
tctatcttgttctatttataactgattttttttagttctgtatgtattcgttgaacatatttttttacttccaattgtttttccagatttcacttttcctctttttccataacccgtgaagatagttttaatttgctagttcattttttgctgtatttgaaaatgtaattatttaatatagaaggcacagaattccctgcaaaatcttacatgtttaaacaacatataattttttggtatctgaatttaggaataaatcattttaatgcatcttaaatcacgtcacctaatcataatagttgtggtaactaatcattagtgcagagcatgcagataaaaa

SEQ ID NO: 391163 - DNA, 412 bp, Homo sapiens
cctagctatgctgccttgaacaaatcactttacttcattgagcctcagtttcttcctctgtaaaatggggataatagtccctacctcagaggctgttgtaaggatccaatgagataatgtctgtggaaactcttaaaatcacaaaatactttgcaaatgttatttccctccagtttctcctgagtttgagttactgggggataaggctacatattaaactgatgtttgcattccttcaagccagagcctggcatacggtaggtgcccaaggactgtctattgaaataatctggccaactgattagagaatgatgtctacaaaagggcctggaggcataagggctaccaagaagagacgctatgacttttgtcctagtaattcatctactcctttaccatccttctcctcccg

SEQ ID NO: 391164 - DNA, 173 bp, Homo sapiens
aaaactgagcacaaaactaaaataacaggctaattcaaaactatttccttggcttatgcttataatcccagcactttgggaggccaaggtgggagaattgcttgagcactggagttcgagaccagccttggtaacacagtgagatgccctctgctcaaaaaataaaaaattag

SEQ ID NO: 391165 - DNA, 197 bp, Homo sapiens
tctgactaagtttaaattctactctttcttgctgcctaccttggcgatgttcttatatttatttcattttccattcacctgacaagcccctggcagtctctgtggacagttttgaagtcacctgcctggtcactgtatctcagactcacacacaggtaacagcctgggaaaatcactgatgagtgaaaggcccactt

SEQ ID NO: 391166 - DNA, 830 bp, Homo sapiens
ctcttgcagtcctgagctttgtcaacatgatcctcctgcctgagacttcaatttgggaaagaatgatatgaagaagccagtaatgcagagaacaaatgctggcgaaggtggtggagggagatttagctttcaaaggaggcagagatatctcagtgagcctgctgacccttgtggtcactgcctgtggtctcgctctctttggcgtgtctctcttcgtatcttggaaactctgctgggttccgtggcgagaacgaggcctgccctctggtagcaaagacaacaaccaggagccccttaactacatggacacagagaccaatgagcaggagaacagtgaggacttcctagatcctcccacgccctgccctgactcctccatgaagatcagccacacctcccctgacattcccctctccacccagacggggatccaggagaactgtgcccatggcgtccgcgtgcagcgccaagtcacagagccaacctcgtcggcccggcataattcaatccgaagacaactcaacttgtcaaacccggacttcaatatccagcagcttcaaaaacaggaacagttgactggaattggtagaattaaaccagagttatataagcagaggtcattggataatgatgacgggagacggagtaacagcaaggcttgtgggaaactgaacttcattttaaaatatgactgtgacttagagcagctcatagtgaagattcacaaagctgtcaatttgcccgccaaggacttttctgggacttcagatccttatgtcaagatctatttgcttcctgatcggaaaacaaaacaccagactaaagttcac

SEQ ID NO: 391167 - DNA, 730 bp, Homo sapiens
agtggaaggagatggatttttagctaagacagtgaaactattccttgacatagttctagttctagcttttgccattttttttccctatcagagaagagtagggacctgtcgggattggcaggggtaagcagacaggtgagggttcctattttagagaagctacaggatttggtgcatactgaagctgactttggtgcatacagccactctttcaaatgttcctgaagacaactcatttctgctgggtattgagactgagctggtgcatgtaggtggacagacagttttaaacactactatctcagtaaagccaattaaagacatggaactggctggggttgtcctgagagcctaatttatggagcacctgcttggtgctggtgctgagctcaggatgagaggcagtggaggagtaaagagaacatggaaaacgtggtccatgcactctaaaacctttaaatatggcaggatcccatatgtccttttaaatagagccaggcagtaaaccgatagctaaggactgtagctgtggataaacaatagacaggtgacaaatactgatactggctacttttcatagagaacagagtgtgtgttcctggcactctgctgggtgctttatagatggcatttctaattaattttttgaaaatccccaaagcaggttttattatctctgttgtacaggtgaggaaaatgagactcagaaagcttgtcattggaagaactg

SEQ ID NO: 391168 - DNA, 538 bp, Homo sapiens
gtgtcaacttaatgactcacaggcattgtgggttactcaatttccagctacagttttgtgttttttgaactgatgatatcattcagccagacatttcctgacttggaagtttcctgatcccattggcaacaccacccaaatgttctgagcttaatcctttggaaaataaatggactccttgttcccactgagacctactcctatgttgaaacataggtttcaactcctatgttgaaaaccagggctaactaatttctaaagccagacagggcctaaattgctattttttgggtcaatgtctatctatactatttcctacctgttaaaagacctgtagaaatgcacctatataaaatataggtttattgttctttgtgtcaatggcatgtattattttggctattctagaaaagaaattacgttggaattccaatgtaaacatgtttgtgtgaatcagtaaccttctctttcttttgtatgtcataagaaagcaacaaatgagttgttaaatgctaaaattaaacaccatttagcaaaa

SEQ ID NO: 391169 - DNA, 367 bp, Homo sapiens
caggaatcagtagacatttgcttcatgtttggatggagaaatagattgctccaggataagcaggggtttaaaataaatgttaaaagtacagaacaggaaattatcaagcagaatatgtgcctgtcttcatgctgtatgttcatccagtgaaaaaatatgcctagttttatttcactagtagacctggatttcagtaggttgatttcatctgttagggatagaagagccggaaagaggatttcagtaggaattcacctgaccatgaggaaagtggtcaaggaatgaagacattggaggcataaggtcttcttctcttccttctggagatttggtctctcatgctctattcctatgacagtagtggtag

SEQ ID NO: 391170 - DNA, 702 bp, Homo sapiens
gatgagtggctggacgtggtggctcgcacctgtaatctcagcactttgggaagcgaggtgggagaatcacttgagcccaggagttcaagaccagcctgggcagcatagtgagaccttgtctctataaaaaataaaattagctgggtgtggtggcatatgtgcttgtagtcccagccatttgggaggctgaggtgggagaattgcctgagcccatgaggtcaaggctgcagtgagccaagatcacgccactgcactccagcctgagtgacagagcgagaccctgtctcaaaaacaacaatgacgacaacaacaacagtaacaaaaagaacagatggataatagaggcatagggattggaattgtaagaaaaggaaatgctagaaataaaatctataacagaaatgaagaatacctttgatgggcttttcagaagaacaaaataaatatttgaagtaataatgactgagaattttccaaaattaaacacctacacatatcatattcaaactgcaggaaaccaaagataaagagaaaattttgaaagaaaccagaggcgaaaaaacccaccttacttctatgtgaagaaagcaaaaattacatcggacttctgttcacaaacaatgcaagcaagaagcgagaggagtgaagtgttttaagtgttgaaagaaaaacaccaacctcgaattattctgtgtgcagtga

SEQ ID NO: 391171 - DNA, 141 bp, Homo sapiens
gaaccatggcctactgagctagatacaaaagaaaatgaagataggaggagatttatggacataggcaaagtggagggaccattggcttggaaatctcattgaggctggagaactgctgtagagagtacaacctgccggtgg

SEQ ID NO: 391172 - DNA, 342 bp, Homo sapiens
tttttttttttaggaaatcattctgtttgctatgcaggcagtgatctgtggaaagcaacacaagaagcagggaattaatcaggaggtaactgaaagaatccagataagagatgatggtgatttaaattgtggatttaatagtagtgatagagggttccgatttcaggatgtattttagaattgtgggattgctgctaatttgcatatggggaatgaagggaaaaaaggattggtgaatgaacctcaaattttcagagtgagctatctatctggtggatagtgatagaatttgctaaggagaggggccatgaagagttttgttgagaacatcgtgtctgagat

SEQ ID NO: 391173 - DNA, 591 bp, Homo sapiens
tttgagatgtcagcatcgcacgctttcaggcaaagtgcaacagaaggaactgtacttgtcattacaccaactgcctccttcccagtggagggtctttgatcctggtactatgactcactgggtcactaaggacttcagttgtccctccaccatggtgggtcttgggtttctccattcagtccagataacacatgtaaaggatctgaggtccctagataagaagcaacattcagtagaatttggcattcataggatgatgaaatttatgacatcattatcccagttctcacggttataatccacagaaagcttctctttattctcagaactagcccttgtagtggccttgaatgtgcaaacgttaccctttagtaatgtttgaggcagaatttgaaaatctgaaacatgattcaaagctaccctacaataactaagctgccatagttacctaaggctgcttcccaatatgttttctatgaatctgcctttccaatagagcacagtgcagggaaaaggggagggggcaattgtacaaaagacacaaaaggtccagttttagtttggcccatgactgccatgccctggaattct

SEQ ID NO: 391174 - DNA, 447 bp, Homo sapiens
agggggctttctgctttactgtttcagcgggaagtggtgggcaggggccggcctgagaaggggggtacgccaggcaggttgggatgtgaggacccagtgcacagggtccacccccgggcccgagggtcccagaatagtgggggccctgcagagagccccccattaggtccctcagcactcctgggcccctcatcaaacccctaggctcagctcagtagctggtccccaggagagtacagtgtgggggcccccgagagcacagtgtatgggggtccccggggggtacagtgtctgggggccccccaggaggatgcagcatgtgggggccccccaggagggtacagcgtgtgtggggcccccaggatcacagggtctcagctcctgggctcttggatttgcagcaccacgaccatcgcgtctggtctgttggaacgggaggtgctgctg

SEQ ID NO: 391175 - DNA, 333 bp, Homo sapiens
ggtggggtggggtagggagaagaatgtgggttaagaaggcaattcaggccagactaaggagaaatatttaaaaaggagaagagaagggagacccatttacattgtcagcaatggtattatttactctgaaaatgtgcagaatgactgaaggactggaatctgataaagggggatcctgaagccaagaagccaggagtctttctttgctcacactagcaattaatcctgaagatttagggcccctctgtgtatgggtgcagacactagctaataaacttgactgtttctttcttttgagacagagtctcactctgttgcccagactggagtgca

SEQ ID NO: 391176 - DNA, 417 bp, Homo sapiens
cagagggggctgaggagggctgcagggagatgacaggaaagccggtgttaaagtaggagtacttcccactctctgggcatgaggagaccaggaggacattccacagtgagaaacccaggcagaggccgtgtgcttatggcattgggggggagaatgacaccttagaattattctctacattggaattgtctattacagatacccatattgtagcttcacatagtgtggtggttaactgtgttatcatattgtcttatttgctattttccagccacccgcccatccctgatagtcactggcccagcacagggccttccaccttccatcaaacaaatgcctgagcttctcaccgaggggtaaatcacctgccagtagggaaggatccctgttataacccctctccaggcaggcttggtc

SEQ ID NO: 391177 - DNA, 415 bp, Homo sapiens
ccgagtagctgggattacaggcacctgccacgcctggctaatttcgtatttttagtagagacggggtttcaccatgttggccaggctgctctggaactcctgacctcaggtgatctgcccgccttggcctcccgaagtgctgagattacaggcatgagccactgtgcccagccttgctgctgatattcttatacatgtctcttggtacacatatagaaattttccctagcgtatggacttactggatcacaggatatgcacaccttcaactttattaggtattgtccagttttcccaagcatttggactggtttatacttccaccatcagtgcaagtgtcgtctccacaaaggcgctccttcttgcttcctcctagtataagtagctgttatgccacttatgaagaaatgtttgt

SEQ ID NO: 391178 - DNA, 747 bp, Homo sapiens
aagaatagagaaaatttatttatctagtatcaagatatatgctacataaatgatccaatccattatttggattattttaatttttatggtcaccaaatattaatttttgaaactttgaaggcataatagattttaggtataatactatttaaaaccccaaagaaatctaagctactttaggaaaactttctttttcatcttcagttatgtttcccaaagaatgaagtacagtttttcccaatttgtactcaaattatttgaatgtgaaatgaaaagttaattgtgtgaattaaaacacacactcatatcgttaatcactcaagcatgcattgaagagtctgtgaacggaataaaaatgatcccccttttctttgtttccactttttttgtagttttgacagaaccattaatgttgacacactagcacaatctgttggattttctagtagctacagcaccatggttttggagattcctcaattctaataacaataatggtggacagggttaatgtgccaagcactaagctacatgcttttcatgcatgacctaatacaacaattctatggtggcaggtactatgatctccattttacatatgtgcaaaatgtaggcaccagagatgtaaatagtcatttgatcaaagtcacacaatagtaaatggtaaggccatgattcccacccaggcctcactgtctccaggagccatgtgcagacaactgtggtacactgcctgtcaaaacacag

SEQ ID NO: 391179 - DNA, 436 bp, Homo sapiens
tatggtccccacttctcaggtgagggaaaaaaaacaatgcagagacttaaataacttccctcaaatcccacagttagtaaagattagagccagcatgcttagaaactaaactccagcacttctcttcttctcctacagcacattgaactcttgacagtgggtgtttgatcagcaccattgttgatatatatctctcaacactccctgagacaccaacattccatgcatatggagtaagatggtaatcctctgaaagccacttaggtgcttttggctaactggtgtggaaggtttgagggctatttagagttacatacttggtgcagtactggcaagaacctaacaataagctccctggaaataagagtcctaatttgtagcctttaccagtctctgtgatataaattctccaaccatggccaatttcaagctacca

SEQ ID NO: 391180 - DNA, 417 bp, Homo sapiens
ggcactgaggcaggagaaggcagaggaggttctccaggaaaagctctagggccggttcatggagcaggaaaaggacttctaatgcttaaagagagcagggggaattgcctattttttcccctttctctgttctattgcaccccagcacttaagcaatcctctggtggctgctgcaacagcagtgccactgcaagctgacaggagctcaaaaacatgaggagagggtccttcttccccaagcaagggatctgtggtcccaagaagggtagcaagaagccccacttcatcatcttttctttgtcctcctgctgcttggctctacatagggatggtcactggaagtcacagcagagcggggcaactacaggcccctgccttgtagccagaagagtcaaaaggacagccacagggaagctg

SEQ ID NO: 391181 - DNA, 929 bp, Homo sapiens
ggaataaaaatctagaaggtatgtgtaccttacaaactagtagagaagggaagtagaacaagaaacaatattcaatctgaaaaaaaggtaaagaagctgaagaaagaaaacatggaaaagagaagacaagtagcacaaaagtacatagcagcaataagtgcaaatatattagtaattacagtgcatatgagttgaaaaaatcctccacttaacagaaactggttattagatgggataaaataacaaaatatatttatatgctgtttacaagcaataccttaaaaagcatattctcgcttgaaagtaaaaaggatttaaaaagatattcctgacactactaaccaatagaaatgttgtatggctatatatatcatgtaaagttgactttgaggcagaaaacctgtccgagagagtgagggtcactcaatagttataaaaggaaggtataattttaaataagtgactacctgataatacactttcaaaatacattaagcagaaactaggactgcagaagaaataggtaaatttatcattattatagcttatttaaaataatctctgttaatgtgagaacaagcagaaaaaaattacgaaaaatatacgatgattttaataacaggacttacaagcctgctgtaatggacacgtatggaacattgtattccacaactaaagtagaggaggaacacttagaaaaactgatcacattctggtcaaatacagccagctttaacaaatttcagtggattggcatcacattacactttctgtttacaattccattaacttaaatagaaattttgtgtgtgtgtgttttggaaattaacatgtttatttcaaaataacttgtggatcaaagaaaaacttgtaatgatagcagtaaattattgtacacgacaacttatgtatagctaaaatgggaattt

SEQ ID NO: 391182 - DNA, 3779 bp, Homo sapiens
  misc_feature (2773)..(2773): n is a, c, g, or t
  misc_feature (3002)..(3002): n is a, c, g, or t
ggcgcgggcactcaggagccgcggcccaggtggtgcgggcggccctagcccggctgcggagcgctgcgcgagcggcgggctggctgaccccgagggacccccagcgcagcgggtgcggcgatgatcctggaggagaggccggacggcgcgggcgccggcgaggagagcccgcggctgcagggctgtgactccctgacgcagatccagtgcggccagctgcagagccgcagggcccagattcaccagcagattgacaaggagctgcagatgcggacgggcgctgagaacctctacagagccaccagcaacaaccgggtgagagagacggtcgccctggagctgagctacgtcaactccaacctgcagctgctgaaggaggagctggaggagctcagcggtggcgtggaccctggccggcatgggagcgaagctgtcactgtccccatgatccccctgggcctgaaggagaccaaggagctggactggtctacaccgctgaaggagctgatctcagtgcactttggagaggacggcgcctcctacgaggcagaaatcagggagctggaggccctgcggcaggccatgcggacccccagccggaatgagtcgggcctggagctgctcacagcctattacaaccagctgtgcttcctggatgcgcgcttcctcacccctgccaggagcctcgggctcttcttccactggtacgactcgcttactggggtcccggcccagcagcgtgccctggccttcgagaagggcagcgttctcttcaacatcggtgccctccacacgcagattggggcgcgccaggaccgctcctgcaccgagggtgcccgccgcgctatggaggccttccagagggccgctggggccttcagcctcctgagggagaacttctcccatgcgccgagcccagacatgagcgctgcgtccctctgcgcactggagcagctcatgatggcccaggcccaggaatgtgtgtttgagggcctctcaccacctgcctccatggccccccaagactgcctggcccagctgcgcctggcgcaggaggccgcccaggtggcagccgagtacaggctagtgcaccggaccatggcccagccacccgtccacgactacgtgcctgtctcctggactgccctggtgcatgtcaaggccgagtacttccgctccctggcccactaccacgtagccatggccctctgcgacggctcccgtgagtgcccaccgcacttgcccatggtactgccaaggcccccccgcgcagggctcacagcctctctgtcccccagcagcgaccgagggagagctccccacgcacgagcaggtcttcctgcagccccccacctcctctaagccccgaggccctgtgctgccgcaggagctggaggagcgcaggcagcttggcaaggcacacctgaagcgtgccatcctggggcaggaggaggcgctgcggctgcacgccctgtgccgcgtcctgcgcgaggtggacctgcttcgggctgtgatctcccagacgctgcagcgctcactggccaagtatgcggagctcgaccgtgaggatgacttctgtgaggctgccgaggccccggacatccagcctaagacccaccagaagccagaggccaggatgccacgcctgtcccaggggaaggggcctgacatcttccatcggctggggcccctgtctgtgttctcagccaagaaccggtggcggctggtggggcccgtccacctgacccgaggagagggcggctttggcctcacgcttcggggagactcgcctgtcctcatcgctgccgtcattccagggagccaggccgcggcggctggcctgaaggagggcgactacattgtgtcagtgaatgggcagccatgcaggtggtggagacacgcggaggtggtgacggagctgaaggctgcgggagaggcgggcgccagcctgcaggtggtgtcgctgctgcccagctctagactgcccagcttgggggaccgccggcccgtcctgctgggccccagggggcttctaaggagccagagggagcatggttgcaagaccccggcatccacgtgggccagtccccggcccctcctcaactggagccgaaaggcccagcagggcaagactggaggctgcccccagccctgtgccccagtgaagccagctccgccctcatccttgaagcacccagggtggccgtgagggccaggatccctgcacgcctcagccctggctccagctggcagcaagcaccgagcatgccctccccacccagaggacctccgggcaatgcctgtcccgcctcatgctggaggctgcctcgggcacctgcctgcccattaaagactggtcagacctgtctgagcccagtgatgggagctgtggcctcttcacccacacacagaaggatgccagtccctctgtcggtctgaggtcagcttcctggggctgccccaccctgagggctccttacagggtgctcctcacagccatcccatctgtacccccgggctctgtccaccctgctgctgccctgggcacagaccctgaggtctcagtcctgcctccagccaagtttctgcctggtgcccagtgattcctgctgggcaccccttcgctcactgcccctccaccatgcagcagccagacacacccacagcacccgcagacctctaggccgggtcccagacatggccttcccccaaaatacttcctgctgtcctgtctgtgcacagagcaagggactccccacctctgcgccctgtnctggtcatcatgggctctgtgctggtcaacccagcaagtgtcccgtttgcccaggagtccctggtgtcgtggcccaggtctcatggtggccctaagcctgccagccctgctgcccgccttgctgtcctgctctgagcatgggtgccaccctccagctcctgggcgtgtcacttctctctgagcctggggcctgcatgggcccccagccctccccagcctgcttgggccnctcctgctggcctccacaggccgtgagctgtcagtgtctcaagcaggggaagtgagggctgcctccaggcctccgtgtactgggtggacaatggcccccaaaggccgtcggcaagaacaccacctccaggacccctacagcagtgggctcaggacttgggcaccaagaggagagggtgggaagggctgcagagtcagggctgcacccaagaggagccacggagccggagccggagcggaggcccccaccgagggccccagggcctggcaggttccggaagagacagggccagcgggagtcattccctgcagccactagggggcagccgccacccgctcagcagccctgggaggcggcacgggcaggtgcgccttgggagggctgaggcaaagaccccgggtagaaaggcggcccccagctctgcgagacccctgccctcttgtccagtcccttccgagggtccgcaggtgagagcagcctgccctgcatcccaggctctggttccagggtccagggccctgcgctgccacctccctcgtgcttcagccaagaaaatgggggtgcaagtagggtgtttggggtcccagagacgcaggcgccgcggcgcgatcttcctgggcaggagggcagggctccccaacctgcctgagccggggtgggggtccaggtcccccacttgcccttgtgggaaaatccctgtctcagcagaatgggccaaggtcacgcaggtctccccagcacgtgttaatttggttaataaaactgtggatcaaggag

SEQ ID NO: 391183 - DNA, 2788 bp, Homo sapiens
ggcgcgggcactcaggagccgcggcccaggtggtgcgggcggccctagcccggctgcggagcgctgcgcgagcggcgggctggctgaccccgagggacccccagcgcagcgggtgcggcgatgatcctggaggagaggccggacggcgcgggcgccggcgaggagagcccgcggctgcagggctgtgactccctgacgcagatccagtgcggccagctgcagagccgcagggcccagattcaccagcagattgacaaggagctgcagatgcggacgggcgctgagaacctctacagagccaccagcaacaaccgggtgagagagacggtcgccctggagctgagctacgtcaactccaacctgcagctgctgaaggaggagctggaggagctcagcggtggcgtggaccctggccggcatgggagcgaagctgtcactgtccccatgatccccctgggcctgaaggagaccaaggagctggactggtctacaccgctgaaggagctgatctcagtgcactttggagaggacggcgcctcctacgaggcagaaatcagggagctggaggccctgcggcaggccatgcggacccccagccggaatgagtcgggcctggagctgctcacagcctattacaaccagctgtgcttcctggatgcgcgcttcctcacccctgccaggagcctcgggctcttcttccactggtacgactcgcttactggggtcccggcccagcagcgtgccctggccttcgagaagggcagcgttctcttcaacatcggtgccctccacacgcagattggggcgcgccaggaccgctcctgcaccgagggtgcccgccgcgctatggaggccttccagagggccgctggggccttcagcctcctgagggagaacttctcccatgcgccgagcccagacatgagcgctgcgtccctctgcgcactggagcagctcatgatggcccaggcccaggaatgtgtgtttgagggcctctcaccacctgcctccatggccccccaagactgcctggcccagctgcgcctggcgcaggaggccgcccaggtggcagccgagtacaggctagtgcaccggaccatggcccagccacccgtccacgactacgtgcctgtctcctggactgccctggtgcatgtcaaggccgagtacttccgctccctggcccactaccacgtagccatggccctctgcgacggctcccgtgagtgcccaccgcacttgcccatggtactgccaaggcccccccgcgcagggctcacagcctctctgtcccccagcagcgaccgagggagagctccccacgcacgagcaggtcttcctgcagccccccacctcctctaagccccgaggccctgtgctgccgcaggagctggaggagcgcaggcagcttggtaaggcgcccatgggtggagtgccctggggctcagatggtcaccaacggtggcagggtgtcccccaccaccctcatgctgtttgccacctgctgtccccgtgctgacgagttgggccacctacctatccctggatggcctgtgcctgatgggtgacggcccagcgcaggggccccaggagtgctgggcagcctctgagcaggtgggagaccactgggagcagctcatccctggcccctgctttgcacgtggcagagccctcctgcacagccagctcctcacccccgtggcgcgcacccccaacgaaagtggctgtgatgagccccacagccctggcgttgcccactccttctgccacgtcccagggcccacgggcccacatggtgtgtgacatcccagtgccccgcgtgcaggcaaggcacacctgaagcgtgccatcctggggcaggaggaggcgctgcggctgcacgccctgtgccgcgtcctgcgcgaggtggacctgcttcgggctgtgatctcccagacgctgcagcgctcactggccaagtatgcggagctcgaccgtgaggatgacttctgtgaggctgccgaggccccggacatccagcctaagacccaccagaagccagaggccaggatgccacgcctgtcccaggggaaggggcctgacatcttccatcggctggggcccctgtctgtgttctcagccaagaaccggtggcggctggtggggcccgtccacctgacccgaggagagggcggctttggcctcacgcttcggggagactcgcctgtcctcatcgctgccgtcattccagggagccaggccgcggcggctggcctgaaggagggcgactacattgtgtcagtgaatgggcagccatgcaggtggtggagacacgcggaggtggtgacggagctgaaggctgcgggagaggcgggcgccagcctgcaggtggtgtcgctgctgcccagctctagactgcccagcttgggggaccgccggcccgtcctgctgggccccagggggcttctaaggagccagagggagcatggttgcaagaccccggcatccacgtgggccagtccccggcccctcctcaactggagccgaaaggcccagcagggcaagactggaggctgcccccagccctgtgccccagtgaagccagctccgccctcatccttgaagcacccagggtggccgtgagggccaggatccctgcacgcctcagccctggctccagctggcagcaagcaccgagcatgccctccccacccagaggacctccgggcaatgcctgtcccgcctcatgctggaggctgcctcgggcacctgcctgcccattaaagactggtcagacctgtctgagccc

SEQ ID NO: 391184 - DNA, 2299 bp, Homo sapiens
ggcgcgggcactcaggagccgcggcccaggtggtgcgggcggccctagcccggctgcggagcgctgcgcgagcggcgggctggctgaccccgagggacccccagcgcagcgggtgcggcgatgatcctggaggagaggccggacggcgcgggcgccggcgaggagagcccgcggctgcagggctgtgactccctgacgcagatccagtgcggccagctgcagagccgcagggcccagattcaccagcagattgacaaggagctgcagatgcggacgggcgctgagaacctctacagagccaccagcaacaaccgggtgagagagacggtcgccctggagctgagctacgtcaactccaacctgcagctgctgaaggaggagctggaggagctcagcggtggcgtggaccctggccggcatgggagcgaagctgtcactgtccccatgatccccctgggcctgaaggagaccaaggagctggactggtctacaccgctgaaggagctgatctcagtgcactttggagaggacggcgcctcctacgaggcagaaatcagggagctggaggccctgcggcaggccatgcggacccccagccggaatgagtcgggcctggagctgctcacagcctattacaaccagctgtgcttcctggatgcgcgcttcctcacccctgccaggagcctcgggctcttcttccactggtacgactcgcttactggggtcccggcccagcagcgtgccctggccttcgagaagggcagcgttctcttcaacatcggtgccctccacacgcagattggggcgcgccaggaccgctcctgcaccgagggtgcccgccgcgctatggaggccttccagagggccgctggggccttcagcctcctgagggagaacttctcccatgcgccgagcccagacatgagcgctgcgtccctctgcgcactggagcagctcatgatggcccaggcccaggaatgtgtgtttgagggcctctcaccacctgcctccatggccccccaagactgcctggcccagctgcgcctggcgcaggaggccgcccaggtggcagccgagtacaggctagtgcaccggaccatggcccagccacccgtccacgactacgtgcctgtctcctggactgccctggtgcatgtcaaggccgagtacttccgctccctggcccactaccacgtagccatggccctctgcgacggctccccagcgaccgagggagagctccccacgcacgagcaggtcttcctgcagccccccacctcctctaagccccgaggccctgtgctgccgcaggagctggaggagcgcaggcagcttggcaaggcacacctgaagcgtgccatcctggggcaggaggaggcgctgcggctgcacgccctgtgccgcgtcctgcgcgaggtggacctgcttcgggctgtgatctcccagacgctgcagcgctcactggccaagtatgcggagctcgaccgtgaggatgacttctgtgaggctgccgaggccccggacatccagcctaagacccaccagaagccagaggccaggatgccacgcctgtcccaggggaaggggcctgacatcttccatcggctggggcccctgtctgtgttctcagccaagaaccggtggcggctggtggggcccgtccacctgacccgaggagagggcggctttggcctcacgcttcggggagactcgcctgtcctcatcgctgccgtcattccagggagccaggccgcggcggctggcctgaaggagggcgactacattgtgtcagtgaatgggcagccatgcaggtggtggagacacgcggaggtggtgacggagctgaaggctgcgggagaggcgggcgccagcctgcaggtggtgtcgctgctgcccagctctagactgcccagcttgggggaccgccggcccgtcctgctgggccccagggggcttctaaggagccagagggagcatggttgcaagaccccggcatccacgtgggccagtccccggcccctcctcaactggagccgaaaggcccagcagggcaagactggaggctgcccccagccctgtgccccagtgaagccagctccgccctcatccttgaagcacccagggtggccgtgagggccaggatccctgcacgcctcagccctggctccagctggcagcaagcaccgagcatgccctccccacccagaggacctccgggcaatgcctgtcccgcctcatgctggaggctgcctcgggcacctgcctgcccattaaagactggtcagacctgtctgagccc

SEQ ID NO: 391185 - DNA, 2640 bp, Homo sapiens
ggcgcgggcactcaggagccgcggcccaggtggtgcgggcggccctagcccggctgcggagcgctgcgcgagcggcgggctggctgaccccgagggacccccagcgcagcgggtgcggcgatgatcctggaggagaggccggacggcgcgggcgccggcgaggagagcccgcgggcagatccagtgcggccagctgcagagccgcagggcccagattcaccagcagattgacaaggagctgcagatgcggacgggcgctgagaacctctacagagccaccagcaacaaccgggtgagagagacggtcgccctggagctgagctacgtcaactccaacctgcagctgctgaaggaggagctggaggagctcagcggtggcgtggaccctggccggcatgggagcgaagctgtcactgtccccatgatccccctgggcctgaaggagaccaaggagctggactggtctacaccgctgaaggagctgatctcagtgcactttggagaggacggcgcctcctacgaggcagaaatcagggagctggaggccctgcggcaggtacgactcgcttactggggtcccggcccagcagcgtgccctggccttcgagaagggcagcgttctcttcaacatcggtgccctccacacgcagattggggcgcgccaggaccgctcctgcaccgagggtgcccgccgcgctatggaggccttccagagggccgctggggccttcagcctcctgagggagaacttctcccatgcgccgagcccagacatgagcgctgcgtccctctgcgcactggagcagctcatgatggcccaggcccaggaatgtgtgtttgagggcctctcaccacctgcctccatggccccccaagactgcctggcccagctgcgcctggcgcaggaggccgcccaggtggcagccgagtacaggctagtgcaccggaccatggcccagccacccgtccacgactacgtgcctgtctcctggactgccctggtgcatgtcaaggccgagtacttccgctccctggcccactaccacgtagccatggccctctgcgacggctcccgtgagtgcccaccgcacttgcccatggtactgccaaggcccccccgcgcagggctcacagcctctctgtcccccagcagcgaccgagggagagctccccacgcacgagcaggtcttcctgcagccccccacctcctctaagccccgaggccctgtgctgccgcaggagctggaggagcgcaggcagcttggtaaggcgcccatgggtggagtgccctggggctcagatggtcaccaacggtggcagggtgtcccccaccaccctcatgctgtttgccacctgctgtccccgtgctgacgagttgggccacctacctatccctggatggcctgtgcctgatgggtgacggcccagcgcaggggccccaggagtgctgggcagcctctgagcaggtgggagaccactgggagcagctcatccctggcccctgctttgcacgtggcagagccctcctgcacagccagctcctcacccccgtggcgcgcacccccaacgaaagtggctgtgatgagccccacagccctggcgttgcccactccttctgccacgtcccagggcccacgggcccacatggtgtgtgacatcccagtgccccgcgtgcaggcaaggcacacctgaagcgtgccatcctggggcaggaggaggcgctgcggctgcacgccctgtgccgcgtcctgcgcgaggtggacctgcttcgggctgtgatctcccagacgctgcagcgctcactggccaagtatgcggagctcgaccgtgaggatgacttctgtgaggctgccgaggccccggacatccagcctaagacccaccagaagccagaggccaggatgccacgcctgtcccaggggaaggggcctgacatcttccatcggctggggcccctgtctgtgttctcagccaagaaccggtggcggctggtggggcccgtccacctgacccgaggagagggcggctttggcctcacgcttcggggagactcgcctgtcctcatcgctgccgtcattccagggagccaggccgcggcggctggcctgaaggagggcgactacattgtgtcagtgaatgggcagccatgcaggtggtggagacacgcggaggtggtgacggagctgaaggctgcgggagaggcgggcgccagcctgcaggtggtgtcgctgctgcccagctctagactgcccagcttgggggaccgccggcccgtcctgctgggccccagggggcttctaaggagccagagggagcatggttgcaagaccccggcatccacgtgggccagtccccggcccctcctcaactggagccgaaaggcccagcagggcaagactggaggctgcccccagccctgtgccccagtgaagccagctccgccctcatccttgaagcacccagggtggccgtgagggccaggatccctgcacgcctcagccctggctccagctggcagcaagcaccgagcatgccctccccacccagaggacctccgggcaatgcctgtcccgcctcatgctggaggctgcctcgggcacctgcctgcccattaaagactggtcagacctgtctgagccc

SEQ ID NO: 391186 - DNA, 1785 bp, Homo sapiens
atggcacaaagcagcaggaactgaggtgccagggaggctgctgggatggtggtcggagcaggtggaggctgggtagggagaagcaggcaccacctggagagtgggaggccctcgcgtgcctgccacatccaccggcaggtggcagccgagtacaggctagtgcaccggaccatggcccagccacccgtccacgactacgtgcctgtctcctggactgccctggtgcatgtcaaggccgagtacttccgctccctggcccactaccacgtagccatggccctctgcgacggctccccagcgaccgagggagagctccccacgcacgagcaggtcttcctgcagccccccacctcctctaagccccgaggccctgtgctgccgcaggagctggaggagcgcaggcagcttggtaaggcgcccatgggtggagtgccctggggctcagatggtcaccaacggtggcagggtgtcccccaccaccctcatgctgtttgccacctgctgtccccgtgctgacgagttgggccacctacctatccctggatggcctgtgcctgatgggtgacggcccagcgcaggggccccaggagtgctgggcagcctctgagcaggtgggagaccactgggagcagctcatccctggcccctgctttgcacgtggcagagccctcctgcacagccagctcctcacccccgtggcgcgcacccccaacgaaagtggctgtgatgagccccacagccctggcgttgcccactccttctgccacgtcccagggcccacgggcccacatggtgtgtgacatcccagtgccccgcgtgcaggcaaggcacacctgaagcgtgccatcctggggcaggaggaggcgctgcggctgcacgccctgtgccgcgtcctgcgcgaggtggacctgcttcgggctgtgatctcccagacgctgcagcgctcactggccaagtatgcggagctcgaccgtgaggatgacttctgtgaggctgccgaggccccggacatccagcctaagacccaccagaagccagaggccaggatgccacgcctgtcccaggggaaggggcctgacatcttccatcggctggggcccctgtctgtgttctcagccaagaaccggtggcggctggtggggcccgtccacctgacccgaggagagggcggctttggcctcacgcttcggggagactcgcctgtcctcatcgctgccgtcattccagggagccaggccgcggcggctggcctgaaggagggcgactacattgtgtcagtgaatgggcagccatgcaggtggtggagacacgcggaggtggtgacggagctgaaggctgcgggagaggcgggcgccagcctgcaggtggtgtcgctgctgcccagctctagactgcccagcttgggggaccgccggcccgtcctgctgggccccagggggcttctaaggagccagagggagcatggttgcaagaccccggcatccacgtgggccagtccccggcccctcctcaactggagccgaaaggcccagcagggcaagactggaggctgcccccagccctgtgccccagtgaagccagctccgccctcatccttgaagcacccagggtggccgtgagggccaggatccctgcacgcctcagccctggctccagctggcagcaagcaccgagcatgccctccccacccagaggacctccgggcaatgcctgtcccgcctcatgctggaggctgcctcgggcacctgcctgcccattaaagactggtcagacctgtctgagccc

SEQ ID NO: 391187 - DNA, 1992 bp, Homo sapiens
ggcgcgggcactcaggagccgcggcccaggtggtgcgggcggccctagcccggctgcggagcgctgcgcgagcggcgggctggctgaccccgagggacccccagcgcagcgggtgcggcgatgatcctggaggagaggccggacggcgcgggcgccggcgaggagagcccgcggctgcagggctgtgactccctgacgcagatccagtgcggccagctgcagagccgcagggcccagattcaccagcagattgacaaggagctgcagatgcggacgggcgctgagaacctctacagagccaccagcaacaaccgggtgagagagacggtcgccctggagctgagctacgtcaactccaacctgcagctgctgaaggaggagctggaggagctcagcggtggcgtggaccctggccggcatgggagcgaagctgtcactgtccccatgatccccctgggcctgaaggagaccaaggagctggactggtctacaccgctgaaggagctgatctcagtgcactttggagaggacggcgcctcctacgaggcagaaatcagggagctggaggccctgcggcaggccatgcggacccccagccggaatgagtcgggcctggagctgctcacagcctattacaaccagctgtgcttcctggatgcgcgcttcctcacccctgccaggagcctcgggctcttcttccactggtacgactcgcttactggggtcccggcccagcagcgtgccctggccttcgagaagggcagcgttctcttcaacatcggtgccctccacacgcagattggggcgcgccaggaccgctcctgcaccgagggtgcccgccgcgctatggaggccttccagagggccgctggggccttcagcctcctgagggagaacttctcccatgcgccgagcccagacatgagcgctgcgtccctctgcgcactggagcagctcatgatggcccaggcccaggaatgtgtgtttgagggcctctcaccacctgcctccatggccccccaagactgcctggcccagctgcgcctggcgcaggaggccgcccaggtggcagccgagtacaggctagtgcaccggaccatggcccagccacccgtccacgactacgtgcctgtctcctggactgccctggtgcatgtcaaggccgagtacttccgctccctggcccactaccacgtagccatggccctctgcgacggctccccagcgaccgagggagagctccccacgcacgagcaggtcttcctgcagccccccacctcctctaagccccgaggccctgtgctgccgcaggagctggaggagcgcaggcagcttggcaaggcacacctgaagcgtgccatcctggggcaggaggaggcgctgcggctgcacgccctgtgccgcgtcctgcgcgaggtggacctgcttcgggctgtgatctcccagacgctgcagcgctcactggccaagtatgcggagctcgaccgtgaggatgacttctgtgaggctgccgaggccccggacatccagcctaagacccaccagaagccagaggccaggatgccacgcctgtcccaggggaaggggcctgacatcttccatcggctggtgagcacacccgtccccaggcaccgcccagcatgggcagcttgggctgtgtggctctgaccagcacatggcctcagacaggccattgatggtggtccagccctccccacccaccttgtggaaccccacggtgtccctcggtgcacaggttggatggatgtgctagtcaggcggggtctcctcagtgtgtggcccagctgggcctctgacctctgagcccctgccaggggctgcacgcctcagccctggctccagctggcagcaagcaccgagcatgccctccccacccagaggacctccgggcaatgcctgtcccgcctcatgctggaggctgcctcgggcacctgcctgcccattaaagactggtcagacctgtctgagccc

SEQ ID NO: 391188 - DNA, 2016 bp, Homo sapiens
ggcgcgggcactcaggagccgcggcccaggtggtgcgggcggccctagcccggctgcggagcgctgcgcgagcggcgggctggctgaccccgagggacccccagcgcagcgggtgcggcgatgatcctggaggagaggccggacggcgcgggcgccggcgaggagagcccgcggctgcagggctgtgactccctgacgcagatccagtgcggccagctgcagagccgcagggcccagattcaccagcagattgacaaggagctgcagatgcggacgggcgctgagaacctctacagagccaccagcaacaaccgggtgagagagacggtcgccctggagctgagctacgtcaactccaacctgcagctgctgaaggaggagctggaggagctcagcggtggcgtggaccctggccggcatgggagcgaagctgtcactgtccccatgatccccctgggcctgaaggagaccaaggagctggactggtctacaccgctgaaggagctgatctcagtgcactttggagaggacggcgcctcctacgaggcagaaatcagggagctggaggccctgcggcaggccatgcggacccccagccggaatgagtcgggcctggagctgctcacagcctattacaaccagctgtgcttcctggatgcgcgcttcctcacccctgccaggagcctcgggctcttcttccactggtacgactcgcttactggggtcccggcccagcagcgtgccctggccttcgagaagggcagcgttctcttcaacatcggtgccctccacacgcagattggggcgcgccaggaccgctcctgcaccgagggtgcccgccgcgctatggaggccttccagagggccgctggggccttcagcctcctgagggagaacttctcccatgcgccgagcccagacatgagcgctgcgtccctctgcgcactggagcagctcatgatggcccaggcccaggaatgtgtgtttgagggcctctcaccacctgcctccatggccccccaagactgcctggcccagctgcgcctggcgcaggaggccgcccaggtggcagccgagtacaggctagtgcaccggaccatggcccagccacccgtccacgactacgtgcctgtctcctggactgccctggtgcatgtcaaggccgagtacttccgctccctggcccactaccacgtagccatggccctctgcgacggctcccgtgagtgcccaccgcacttgcccatggtactgccaaggcccccccgcgcagggctcacagcctctctgtcccccagcagcgaccgagggagagctccccacgcacgagcaggtcttcctgcagccccccacctcctctaagccccgaggccctgtgctgccgcaggagctggaggagcgcaggcagcttggtaaggcgcccatgggtggagtgccctggggctcagatggtcaccaacggtggcagggtgtcccccaccaccctcatgctgtttgccacctgctgtccccgtgctgacgagttgggccacctacctatccctggatggcctgtgcctgatgggtgacggcccagcgcaggggccccaggagtgctgggcagcctctgagcaggtgggagaccactgggagcagctcatccctggcccctgctttgcacgtggcagagccctcctgcacagccagctcctcacccccgtggcgcgcacccccaacgaaagtggctgtgatgagccccacagccctggcgttgcccactcctttgccacctccctcgtgcttcagccaagaaaatgggggtgcaagtagggtgtttggggtcccagagacgcaggcgccgcggcgcgatcttcctgggcaggagggcagggctccccaacctgcctgagccggggtgggggtccaggtcccccacttgcccttgtgggaaaatccctgtctcagcagaatgggccaaggtcacgcaggtctccccagcacgtgttaatttggttaataaaactgtggatcaaggag

SEQ ID NO: 391189 - DNA, 1128 bp, Homo sapiens
  misc_feature (146)..(146): n is a, c, g, or t
  misc_feature (148)..(148): n is a, c, g, or t
  misc_feature (153)..(154): n is a, c, g, or t
  misc_feature (156)..(156): n is a, c, g, or t
  misc_feature (160)..(162): n is a, c, g, or t
  misc_feature (165)..(166): n is a, c, g, or t
  misc_feature (170)..(170): n is a, c, g, or t
  misc_feature (172)..(172): n is a, c, g, or t
ggcgcgggcactcaggagccgcggcccaggtggtgcgggcggccctagcccggctgcggagcgctgcgcgagcggcgggctggctgaccccgagggacccccagcgcagcgggtgcggcgatgatcctggaggagaggccggacgncncgggnncnggcnnnganngccngnggctgcagggctgtgactccctgacgcagatccagtgcggccagctgcagagccgcagggcccagattcaccagcagattgacaaggagctgcagatgcggacgggcgctgagaacctctacagagccaccagcaacaaccgggtgagagagacggtcgccctggagctgagctacgtcaactccaacctgcagctgctgaaggaggagctggaggagctcagcggtggcgtggaccctggccggcatgggagcgaagctgtcactgtccccatgatccccctgggcctgaaggagaccaaggagctggactggtctacaccgctgaaggagctgatctcagtgcactttggagaggacggcgcctcctacgaggcagaaatcagggagctggaggccctgcggcaggccatgcggacccccagccggaatgagtcgggcctggagctgctcacagcctattacaaccagctgtgcttcctggatgcgcgcttcctcacccctgccaggagcctcgggctcttcttccactggtacgactcgcttactggggtcccggcccagcagcgtgccctggccttcgagaagggcagcgttctcttcaacatcggtgccctccacacgcagattggggcgcgccaggaccgctcctgcaccgagggtgcccgccgcgctatggaggccttccagagggccgctggggccttcagcctcctgagggagaacttctcccatgcgccgagcccagacatgagcgctgcgtccctctgcgcactggagcagctcatgatggcccaggcccagtgcacgcctcagccctggctccagctggcagcaagcaccgagcatgccctccccacccagaggacctccgggcaatgcctgtcccgcctcatgctggaggctgcctcgggcacctgcctgcccattaaagactggtcagacctgtctgagccc

SEQ ID NO: 391190 - DNA, 2530 bp, Homo sapiens
ggcgcgggcactcaggagccgcggcccaggtggtgcgggcggccctagcccggctgcggagcgctgcgcgagcggcgggctggctgaccccgagggacccccagcgcagcgggtgcggcgatgatcctggaggagaggccggacggcgcgggcgccggcgaggagagcccgcggctgcagggctgtgactccctgacgcagatccagtgcggccagctgcagagccgcagggcccagattcaccagcagattgacaaggagctgcagatgcggacgggcgctgagaacctctacagagccaccagcaacaaccgggtgagagagacggtcgccctggagctgagctacgtcaactccaacctgcagctgctgaaggaggagctggaggagctcagcggtggcgtggaccctggccggcatgggagcgaagctgtcactgtccccatgatccccctgggcctgaaggagaccaaggagctggactggtctacaccgctgaaggagctgatctcagtgcactttggagaggacggcgcctcctacgaggcagaaatcagggagctggaggccctgcggcaggccatgcggacccccagccggaatgagtcgggcctggagctgctcacagcctattacaaccagctgtgcttcctggatgcgcgcttcctcacccctgccaggagcctcgggctcttcttccactggtacgactcgcttactggggtcccggcccagcagcgtgccctggccttcgagaagggcagcgttctcttcaacatcggtgccctccacacgcagattggggcgcgccaggaccgctcctgcaccgagggtgcccgccgcgctatggaggccttccagagggccgctggggccttcagcctcctgagggagaacttctcccatgcgccgagcccagacatgagcgctgcgtccctctgcgcactggagcagctcatgatggcccaggcccaggaatgtgtgtttgagggcctctcaccacctgcctccatggccccccaagactgcctggcccagctgcgcctggcgcaggaggccgcccaggtggcagccgagtacaggctagtgcaccggaccatggcccagccacccgtccacgactacgtgcctgtctcctggactgccctggtgcatgtcaaggccgagtacttccgctccctggcccactaccacgtagccatggccctctgcgacggctccccagcgaccgagggagagctccccacgcacgagcaggtcttcctgcagccccccacctcctctaagccccgaggccctgtgctgccgcaggagctggaggagcgcaggcagcttggcaaggcacacctgaagcgtgccatcctggggcaggaggaggcgctgcggctgcacgccctgtgccgcgtcctgcgcgaggtggacctgcttcgggctgtgatctcccagacgctgcagcgctcactggccaagtatgcggagctcgaccgtgaggatgacttctgtgaggctgccgaggccccggacatccagcctaagacccaccagaagccagaggccaggatgccacgcctgtcccaggggaaggggcctgacatcttccatcggctggtgagcacacccgtccccaggcaccgcccagcatgggcagcttgggctgtgtggctctgaccagcacatggcctcagacaggccattgatggtggtccagccctccccacccaccttgtggaaccccacggtgtccctcggtgcacaggttggatggatgtgctagtcaggcggggtctcctcagtgtgtggcccagctgggcctctgacctctgagcccctgccaggggcgggcccctgtctgtgttctcagccaagaaccggtggcggctggtggggcccgtccacctgacccgaggagagggcggctttggcctcacgcttcggggagactcgcctgtcctcatcgctgccgtcattccagggagccaggccgcggcggctggcctgaaggagggcgactacattgtgtcagtgaatgggcagccatgcaggtggtggagacacgcggaggtggtgacggagctgaaggctgcgggagaggcgggcgccagcctgcaggtggtgtcgctgctgcccagctctagactgcccagcttgggggaccgccggcccgtcctgctgggccccagggggcttctaaggagccagagggagcatggttgcaagaccccggcatccacgtgggccagtccccggcccctcctcaactggagccgaaaggcccagcagggcaagactggaggctgcccccagccctgtgccccagtgaagccagctccgccctcatccttgaagcacccagggtggccgtgagggccaggatccctgcacgcctcagccctggctccagctggcagcaagcaccgagcatgccctccccacccagaggacctccgggcaatgcctgtcccgcctcatgctggaggctgcctcgggcacctgcctgcccattaaagactggtcagacctgtctgagccc

SEQ ID NO: 391191 - DNA, 2485 bp, Homo sapiens
ggcgcgggcactcaggagccgcggcccaggtggtgcgggcggccctagcccggctgcggagcgctgcgcgagcggcgggctggctgaccccgagggacccccagcgcagcgggtgcggcgatgatcctggaggagaggccggacggcgcgggcgccggcgaggagagcccgcggctgcagggctgtgactccctgacgcagatccagtgcggccagctgcagagccgcagggcccagattcaccagcagattgacaaggagctgcagatgcggacgggcgctgagaacctctacagagccaccagcaacaaccgggtgagagagacggtcgccctggagctgagctacgtcaactccaacctgcagctgctgaaggaggagctggaggagctcagcggtggcgtggaccctggccggcatgggagcgaagctgtcactgtccccatgatccccctgggcctgaaggagaccaaggagctggactggtctacaccgctgaaggagctgatctcagtgcactttggagaggacggcgcctcctacgaggcagaaatcagggagctggaggccctgcggcaggccatgcggacccccagccggaatgagtcgggcctggagctgctcacagcctattacaaccagctgtgcttcctggatgcgcgcttcctcacccctgccaggagcctcgggctcttcttccactggtacgactcgcttactggggtcccggcccagcagcgtgccctggccttcgagaagggcagcgttctcttcaacatcggtgccctccacacgcagattggggcgcgccaggaccgctcctgcaccgagggtgcccgccgcgctatggaggccttccagagggccgctggggccttcagcctcctgagggagaacttctcccatgcgccgagcccagacatgagcgctgcgtccctctgcgcactggagcagctcatgatggcccaggcccaggaatgtgtgtttgagggcctctcaccacctgcctccatggccccccaagactgcctggcccagctgcgcctggcgcaggaggccgcccaggtggcagccgagtacaggctagtgcaccggaccatggcccagccacccgtccacgactacgtgcctgtctcctggactgccctggtgcatgtcaaggccgagtacttccgctccctggcccactaccacgtagccatggccctctgcgacggctccccagcgaccgagggagagctccccacgcacgagcaggtcttcctgcagccccccacctcctctaagccccgaggccctgtgctgccgcaggagctggaggagcgcaggcagcttggcaaggcacacctgaagcgtgccatcctggggcaggaggaggcgctgcggctgcacgccctgtgccgcgtcctgcgcgaggtggacctgcttcgggctgtgatctcccagacgctgcagcgctcactggccaagtatgcggagctcgaccgtgaggatgacttctgtgaggctgccgaggccccggacatccagcctaagacccaccagaagccagaggccaggatgccacgcctgtcccaggggaaggggcctgacatcttccatcggctggtgagcacacccgtccccaggcaccgcccagcatgggcagcttgggctgtgtggctctgaccagcacatggcctcagacaggccattgatggtggtccagccctccccacccaccttgtggaaccccacggtgtccctcggtgcacaggttggatggatgtgctagtcaggcggggtctcctcagtgtgtggcccagctgggcctctgacctctgagcccctgccaggggcgggcccctgtctgtgttctcagccaagaaccggtggcggctggtggggcccgtccacctgacccgaggagagggcggctttggcctcacgcttcggggagactcgcctgtcctcatcgctgccgtcattccagggagccaggccgcggcggctggcctgaaggagggcgactacattgtgtcagtgaatgggcagccatgcaggtggtggagacacgcggaggtggtgacggagctgcacagtctgtctctgtccctgctgcagggggaccgccggcccgtcctgctgggccccagggggcttctaaggagccagagggagcatggttgcaagaccccggcatccacgtgggccagtccccggcccctcctcaactggagccgaaaggcccagcagggcaagactggaggctgcccccagccctgtgccccagtgaagccagctccgccctcatccttgaagcacccagggtggccgtgagggccaggatccctgcacgcctcagccctggctccagctggcagcaagcaccgagcatgccctccccacccagaggacctccgggcaatgcctgtcccgcctcatgctggaggctgcctcgggcacctgcctgcccattaaagactggtcagacctgtctgagccc

SEQ ID NO: 391192 - DNA, 1841 bp, Homo sapiens
ggcgcgggcactcaggagccgcggcccaggtggtgcgggcggccctagcccggctgcggagcgctgcgcgagcggcgggctggctgaccccgagggacccccagcgcagcgggtgcggcgatgatcctggaggagaggccggacggcgcgggcgccggcgaggagagcccgcggctgcagggctgtgactccctgacgcagatccagtgcggccagctgcagagccgcagggcccagattcaccagcagattgacaaggagctgcagatgcggacgggcgctgagaacctctacagagccaccagcaacaaccgggtgagagagacggtcgccctggagctgagctacgtcaactccaacctgcagctgctgaaggaggagctggaggagctcagcggtggcgtggaccctggccggcatgggagcgaagctgtcactgtccccatgatccccctgggcctgaaggagaccaaggagctggactggtctacaccgctgaaggagctgatctcagtgcactttggagaggacggcgcctcctacgaggcagaaatcagggagctggaggccctgcggcaggccatgcggacccccagccggaatgagtcgggcctggagctgctcacagcctattacaaccagctgtgcttcctggatgcgcgcttcctcacccctgccaggagcctcgggctcttcttccactggtacgactcgcttactggggtcccggcccagcagcgtgccctggccttcgagaagggcagcgttctcttcaacatcggtgccctccacacgcagattggggcgcgccaggaccgctcctgcaccgagggtgcccgccgcgctatggaggccttccagagggccgctggggccttcagcctcctgagggagaacttctcccatgcgccgagcccagacatgagcgctgcgtccctctgcgcactggagcagctcatgatggcccaggcccaggaatgtgtgtttgagggcctctcaccacctgcctccatggccccccaagactgcctggcccagctgcgcctggcgcaggaggccgcccaggtggcagccgagtacaggctagtgcaccggaccatggcccagccacccgtccacgactacgtgcctgtctcctggactgccctggtgcatgtcaaggccgagtacttccgctccctggcccactaccacgtagccatggccctctgcgacggctccccagcgaccgagggagagctccccacgcacgagcaggtcttcctgcagccccccacctcctctaagccccgaggccctgtgctgccgcaggagctggaggagcgcaggcagcttggcaaggcacacctgaagcgtgccatcctggggcaggaggaggcgctgcggctgcacgccctgtgccgcgtcctgcgcgaggtggacctgcttcgggctgtgatctcccagacgctgcagcgctcactggccaagtatgcggagctcgaccgtgaggatgacttctgtgaggctgccgaggccccggacatccagcctaagacccaccagaagccagaggccaggatgccacgcctgtcccaggggaaggggcctgacatcttccatcggctggggcccctgtctgtgttctcagccaagaaccggtggcggctggtggggcccgtccacctgacccgaggagagggcggctttggcctcacgcttcggggagactcgcctgtcctcatcgctgccgtcattccagggagccaggccgcggctggcctgaaggagggcgactacattgtgtcaggatgcaccatcagtgtggagcactcgcgagtagaggatcctctaaccgcaaa

SEQ ID NO: 391193 - DNA, 344 bp, Homo sapiens
gacgtggggagacgggcgcaccaggggccctgtgtgtccagacccagccagggggcgtggaggggctcccaggtggctccggtgccgcatgctgctggccttcgggagtcacggctgcccagggccccactggctttgcctccccgccccccatggtgctggtgcccatgggacttcccagggcagtgtgtgtgagtggggtgggccagggcggtggggcccagtggctcctgccctgcaggccatgcggacccccagccggaatgagtcgggcctggagctgctcacagcctattacaaccagctgtgcttcctggatgcgcgcttcctcacccctgccagga

SEQ ID NO: 391194 - DNA, 538 bp, Homo sapiens
tcattccaagccacagagataaatttttcaaaattggaaacgcagagacaagagcagaagagtcaatccacaaagacttgcagagtccagttttatcatagtcttatcagatgggccctcccttcttgggtgtagggctgagcacatcatctctgcagtcagactacctgggttccgggccaggctcaccagttcaactcattggctggcactgggcagttcacttctgcatctcgacttcttgacctgtaagttgggtataataaaccctatttcgaagatttgcggtaaggattaaataagattatataaagcacttagaacagtaaatggcaccttatcaatgctcagtgaacgtaagctctttttaacatcctcatcatggtcattatttcagtatgtcttccccctccactgtctctggatcatcgtgggtccatctgcttcttaatgcctaggctcagacattcttcctggatcctttcccctaagtactggaagctactaaagcaggtaccatgtttccccatggcagctc

SEQ ID NO: 391195 - DNA, 1092 bp, Homo sapiens
agtataacggtacataaggcgcgtctgcgtaactcaactttaattagaatgacaactaattgaaagtaatttaatgctagttcatgaaagattaatggaattcatgttttggagatgctgaatgcaacacagatttggcctgaaacacaaatctaacctttattcactttaattattcagtcagaatcatttcctgggagcaagtctagtctctggacggctctaatcaaacaccactgaactttgaagacatcaactcattcagctgcaactcaattttcaaattaatctgccacataacatggaggctttgtggcctaagcagggggcaggtgggaggggaagatggggttaaagccctcccaggtatgaactgattctagagcatctgaccttccccaccctctctagtggcgaggcacttccggaactggtgccaggtcttcctatgagaggctgagctgagcaaccacgctgcctccatgcttgagctcagggctccacactcacaactgaagcctaagcctggtacagctggaaccctgaagggggccctggaccagcagagcctgcctcttccaccctagcctagctgcccttccctgctctctccctctccctaggagagctgagacgagggacttgagctctctgcttggcaagatgccctcagaaaccaccccaatttctgcacccacttattccttggcccttcaggcaggcaccaggtacggcccacacagactcagcctctccttccctgccttggaaaacccaggtccctaactccatctgctttactttacagcccttccaaggcttcttcctaaaaccttctctgccaaaggggaggcaacgccaccatttctcacagcctggggcagcttggaatgtgatatttggagtcagcaaagattccaatctggctaatacacattaggcagtgtagagacctgtgctttggccctgaggcacagccatgtgaccatgactaatctatgtcatagacgaggtcagaacaagagaaggcaggatgtcccaggagggctgtgtcagaactcaaggaaaaaaatatgacctaaagaatgctct

SEQ ID NO: 391196 - DNA, 751 bp, Homo sapiens
ttcaacataagtaataaatatattcacattataaaatgagttctgaaagtatgcaagcatatacgttaaaaagttaaagtttgtttggcattacttgtgacactcccttcacatatttcttgctatgcacctacatatacaaatgggtacatgtacaaataccttttttctaacaaaaggattccaactgaatttaataattcattcatacatttatatattctttcaaaaatatttattgagtgtctacaatgtgccagatacttttgaatgagaagtggaaaaaaagtccctgcactcatgtgatttacctcctagtaggtagagacagcagagtaaccagcagatatatatctagtacatcagatggtgataagtactatggagaaaaataaagcaatgtgagtttggaggcatgctgttttatatagggtagccaggagaagctttgttgttaagatgacgttgagcagacagttgaaagatgagggagcaagccatgcagctgtcttggagacagacggtcttccagacagagggaacagcaagtaaaaaacccaaaggcaggaacctgttggccctttcaagaaagaacagagatgagcatagctaaaacagtgttgtgacaaaaagcagggaaatttcttagggaactattgctggaatccatatggaaggtggcgatagtgcagatcagaggggaactttgcaagagatagttaaattctgaatatattttatatgtattgac

SEQ ID NO: 391197 - DNA, 380 bp, Homo sapiens
cttcaactgacttgcaattctgtggttttagatgcttaagagtcctaaattcatattttcagcctagcctaaatttgacacatctttatctatctgcctactcaacatctcctctcagtcagccaataggcatctcaaactaaacatgttccagactgaattctgaatttccttctccacttgtcacaaatctactgctctcccagtgctctatattttattaaacgtgtattagttcgttttcatgctgctgataaagacatacccgagattgggtaatttatacaggaaaaggggtttaatggacttacagttccacatggctggggaggcctcacaatcatggcggaagacaaggaggagcaagtcgcctcttacat

SEQ ID NO: 391198 - DNA, 822 bp, Homo sapiens
gttcccaggaaaatgaaagcagttccttctggttttttcctttcatatgaaagtcatagttcccagcagatggctttcatcagccctgtacatgtatctgtaaattcaaggccaaggaattattttcaacttcattagggaacaggtgaagaaaccatttgtagtgtggcactattttattaggagttgaaattaagcatagagattatagtagtatgccattctgggtcaaaatagtttttaactgtcagcaatttaaagaaaaaaaaagactgctaaggaaaagtaagtctggctgtagtgttgattgaggtatcttttatggttgaattgtattatgcttacgaaacatagattattagaaaaaaagacttgtatcttctgcattgtgtagaatgttcagccagtagcaatcttggatcacagtgattctaatctgatttcacaaataatagggaaatttgagagccaaagaggttgaagtgtcttgtccagtgccacacagccagttaataccatctggaagaattggtcaggcccttctcaattttgtgcttttttcattatgctgtagtactgctttatagtattagagagcagtgagcctaaaataatttagttagaattctcttccttaatggaaaccatagaataaaccttgtctagagaatattggtggtatcgtaaaccacaaatatataaatctgctatttcagtgtgtgaaaatagctatacactcttgttagagttttgaaacaactttttgggaaaagactgctttcttatggcccaagttagaggaatcaaggttttcttatgttg

SEQ ID NO: 391199 - DNA, 177 bp, Homo sapiens
gctgttgtggaagacacagtaacagtaggaaccatggacagctgctagagtaacaggtgggacactgtcattgctgtaaaccatcaaaacagtggcaggagctgtattgggtagggcagctctgaatacttctccagggaatctcaccataatagcaacctaaagtaatcaaaagaa

SEQ ID NO: 391200 - DNA, 390 bp, Homo sapiens
tttctccgtctgtagccacaataaagggagaggatagatacctgctgctaactggaccaacctcatttactttggacatcagagcctgaggtgattacagattctggtcctaaaagaaagaccactataggatctgcacaagctaaccaaccatctaaagcagctggtacaggaaacaacataaatgtacaagaaaacaaaacacagagacccaaaaaactcctacccttgactccctcctgacttcttacagtaaattatttcataatttcctaagcatctgtatgatttgcaactaagaaaactttagagtagcaaacttgccacacaggttaggaggagaatgtgcctgtgaaaggctcaaaggaaacaaacagtccactgaagagt

SEQ ID NO: 391201 - DNA, 400 bp, Homo sapiens
cagactgggtggcagttgttgtgggggtggaatcccagagcctagtcaggcctcaagacccacagggccacgtgctgaatgaacacaagacagtcggtctaaagacttgggcctcagcagaaacccattttggaatctgtctgcctgtgtagcctggggatagtcagcttgcggtgggaggaaagagcatgaactctagagtcagacggatggattttggtctttcctcagaaagaaaccaactgttgagaccctgtcaaagagatttaatctctacttcttcatctttaaaatggagctacttctacttatctcacacagtggtttccttttttaattttaaagactcaaatgagataagatgcctataaaatatgggggaggtgttcagtaaatacca

SEQ ID NO: 391202 - DNA, 329 bp, Homo sapiens
ggagattcactgtgtaatcgatccaccctgtggcacagcagctctctccctccccgacagcccctggatgcaggccttcccatctctgtgttcctccccaaccacctcctgctgcccaagagctctttctgaaacacccccaactcctgtcaggcctcagcacccacacaaccgagttcaagtttctttgcatgtcatgcaaggcctgtgacaacctgacccgcagctctccagctctatccgccccgcagggcctttgtacaagccgctctccctctgggttcttccccacatgggtgggagctttcccgcccccatcagccatttcc

SEQ ID NO: 391203 - DNA, 922 bp, Homo sapiens
aggctggtctcgaactcctgatctgaggtgatccacctgccttggcctcccaaagtgctgggattacaggcgtgagccaccgcgtccagccgaacattgacatttttaaagagacttctattagttttatagaatgttccatattctgcatttgattatttccttctagaatgtcccaccttctggatttatctcattatttctttgtggtgatacttaatttgttcttttattgctgtatttcttgtaaacgcaaagttacatttaaataatggatttgggccaggcgcggtgcctcacacctgtaatcccagcactttgggagactgaggcgggtggatcacctgaggtcaggagttgaagaccagcctgaccaacatgatgaaaccccatctctactaaaagtacaaaatgagccaggcatggtaacgcatgcctgtaattacagctccttgagaggctgaagcaagagaatcgcttgcacccaggaggtgaaggttgcagtgagctgagatcgcgccattgggctccagcctgggcaacaagagtgaaactccatctcaaaaaattaaaaaataaataaaataaataaataattgatttgattcaggttaaatattattgtcagtaatacttcatacattgtttttggcttttcttgtgtatttgtttgcaaaaaaatgccatagacaaaacagctgataactaatgtgaattattagtcagtagtttattggttaatgtttttcttttttctttccctttgaggcagtctcctgtctcagcctcctgaatagctgggattacaggcgtgtgccaccacacctggctaatttttgtattttttttttttagtagagacggggtttcaccacatctctggtcatggtcatggccaggctggttttgaactcctgacctc

SEQ ID NO: 391204 - DNA, 489 bp, Homo sapiens
ttgcaccatctcggctcactgcaacctccacctcccgggttcaagcaattctcctgtctcagcctcctgagtagctgggattacaggtgcccaccaccaccctgggcaacaagagtgaaactccatctcaaaaaattaaaaaataaataaaataaataaataattgatttgattcaggttaaatattattgtcagtaatacttcatacattgtttttggcttttcttgtgtatttgtttgcaaaaaaatgccatagacaaaacagctgataactaatgtgaattattagtcagtagtttattggttaatgtttttcttttttctttccctttgaggcagtctcctgtctcagcctcctgaatagctgggattacaggcgtgtgccaccacacctggctaatttttgtattttttttttttagtagagacggggtttcaccacatctctggtcatggtcatggccaggctggttttgaactcctgacctc

SEQ ID NO: 391205 - DNA, 328 bp, Homo sapiens
cccatttgggtccctgggccggggcttcctgtggatgagccgggatcacacagcgatgtggggttgctcagggcgccccgttcactccagagtgacccctgacccaaagccagtgctgggtgtttgccgaaactgaaaccagggcaggtctgaatcagaccctgcagaacaatgaggccttttgtgcgaatgaggcgggggagggactggaggagaccaggagcttcctgacggggtccgcagcacaggtcacagcgattgaattcaggaggtgaccctcgaaggtcaggtcacagccgagcagcacaggcgctgagctaagtgtcca

SEQ ID NO: 391206 - DNA, 418 bp, Homo sapiens
cctgcctcggcctcccaaagtgctgggattacaggcatgagccaccacgcctggcctgttgtactgtttaaggaccaggcatggaagggagaaggggctgacctggtactgggggtttcacatttacatttatggattgcagcacccttatttgcttccagaaggcttatccttgcttagaaaggactcttccagtgggagagagataaatggctatcttcaatctccagcttgactgcttccctctctgcctctcactttccacaaggctccttctgtccaagggacccagttctgtgccatggtgtttgcttcctggcttgccctgcgtgacaggtctggctcctggcgtgaccgactggagagcgtctctcagcctagagctggggcaagatcccgagggcatgggtggctcaaa

SEQ ID NO: 391207 - DNA, 723 bp, Homo sapiens
gtgatcctcccacctcagcctcctgagtagctgggactacaggctcaagccaccatgcctggctagtttttgtattttttgtagagacagtgtttcaccatgttgtccaggctggtctggaactcctggattcaagctatccccccgccttggcctcccaaagtgctgggattacaggtgtgagccaccacaccctgacaaaagaattctaatacactaaaaatctcttttcttaaaccatttcactcatgaaactcttactttcctgtatattaaccataattgccagaaaattttctgctggaagttaaaatgatgttttcccctgaaatatcattataaaaccctatgaaatatttcagtgatatgaatcattcacttagtcatatgggtagacatttagataatagaagtagttaacagaaatctgtgagaaatatatattgttaattcctgtggaggaggaaggaagaaatcctactgaaatattttaattgtagttaaattcagtgttccctgccattttaaaatatcaagattattctgttctactcctttccttccaagaggatacatgaaataactttgataaaatcatgaatcagtttttgtttgctgttaacctcttctgtattctatttcatgaaaatagcaattggtggccaagaatacccttattcttatcaaccttgcactacataaatgagacattattaccaagca

SEQ ID NO: 391208 - DNA, 359 bp, Homo sapiens
caaggacagcccccctgcggccccctcgtccttcctaaggcaattttgcaggcagcttcctccaatcaagcatgcagccgccctgtgtgttcattcattttgcgtcagtggccatttcctccctcagcagtcaggctgcatctccatgaggggtgctccttctaggggagtaggcacaggaagcaacagctggggatcggggtcctgccttcctgcatctcccacgatgaggacggaggccgccgccccgggcctgttttgagcgccagcagcagcgaggcacccctcaaggaagcagcgccctgcagctcctttatctttttgcaaaagcgaatccgactctccctcaacgagccagc

SEQ ID NO: 391209 - DNA, 180 bp, Homo sapiens
ttccttcttctgcatgtcgatatccagttttcccaacaccatttattgaagactgtccagtccccaccgtgtgttcttggcagctttgtcaaaaatcaattgatttgaattgcgtgggtttatttctgggctctcttttctattccattggttaatgagtctatttttatgtcattatga

SEQ ID NO: 391210 - DNA, 187 bp, Homo sapiens
gcttaagaaaacgtttcctatcatgaattcatgagatattgtatattattaatagaagtctgttgcctatctttcatagttagctcttatagtatacttgtattgatgtttacatatattatagaaatcaagtttaacaatttttttcttctgtatttcttctaaaaaataaaaccccaaaatggta

SEQ ID NO: 391211 - DNA, 776 bp, Homo sapiens
cagacactgacttagggaaaatcattcacagggttgaatattttacacatgaaatttcatttggttctcacaacagccctatggaacggtttattatcccccattttaccaaccaggaaactaagctcagggaagttttagattcagagagtcacagagaatttaaactcagatctgtctgactctaaagccatgcttaattcatctctttcatcaaaaattaactcattgttctaaaaaagaagaccagaaaaaaaagaacaaccaaatcattattttagagcaaattggcatgtcatttgctatcattttcactcatcttgcactttctatcattcccttatcccaactcctagcttggagtcagctggggctgctgctttccttgcagcttgcctcatccctgagcaagctagtcacactgcctgggttatctgaagataatagaagacaacagagaaggccctttcaaaactctcgtcagcactttattttctgcatacaccttaaaaagagatagacagatgaatagctacagaaagcggagacaatgggcctgagttcaaacctccgcttctcccccttccagctcttggactctggacaaacacctattatgtgccagtcactgtgctatgtattttataaatgttatttcatttaaataaattgcacacttgctatgtagtgatatggaaagatctctaaatacactgttaagtttaccaaacaagcaatggagggaagagtgggcataatatgctactctatgtatt

SEQ ID NO: 391212 - DNA, 940 bp, Homo sapiens
ctttctatcgatggagaaaaccaagtgtaagctaattcatttggtagagaagttcaataccacttattgaatgcaaggcatgacacttggtgctataaaactgttgatgggattcccatatcaaaccatatgaccttcaagatcgcatacaagatagaagttctcgagagtaaagttttgccccctctatggctagatgagtgctgacccacttatacaataatttaataacagttttttgaaccccttcaatgtgttaggcatttctctgggtatggagttagagaaataaatgagtaaagtcatagaagggaactgaaggcatggggacagtaagaggaactctccccttagaaaggtgacatttgaaatgagtccagagtgactctggcatgaaaatcaagaggaaaaaacacccggcaaaggacataactggtacaaaagtttggggctggaaatacttgtgttccaggagcagacagaaaggaaagggaatgaatattggggaaatgcaacttggcctttgcgtatgttacgtatttagtctttccactccctctatgtatctagacttcacctgaagaaactggcactcatagggcttaacatagttgcctccagtcactcagctgatgagtgacaccactaggcctaggctcatgggctctggaagtaggaaatttgctgtcactatttcactagcctcccattgggtcttcccacgtcccacctctcccgggagtggagagagaaagcgctgcaggaataccgcaaaaagcaccgggaggagtgagatgtggatgttgcttttgcacctacgggggcatctgagtccagctccccccaagatgagctgcagccccccagagagagctctgcacgtcaccaagtgaccaggccccagcctccaggcccccaactccgcccgttctctcccact

SEQ ID NO: 391213 - DNA, 819 bp, Homo sapiens
tgtcttggcacactggtaccccagcacccccaaatgtgcagtgtctgtgtgtacagtgggcacaccagtattgagtcagctgtagcacagatcggcatggggatgctgtactaagagtccgacccagaaaatgagttagaatttttctcttaaattttccactccctccgccccttacccccaccctaccccctcatcattttataaaacatatgtagccatcgcctgtaagatagattggccacgcacggtggctcacacctgtaatcctagcactttgggtggctgaggcagcctgattgctggagcccaggagttcgagaccagcctgagcaatgtgacgaaacccagtgtctacaaaaatatataaaaattagctgagtgtggtggcacacctgtagttccagctactcaggaggctgaggtgggaggatcacttgagcctgggaggttgaggctgcagtgagccaagatcatgccattgcactcaagcctgggtgacagagtgagaccctgtctcagaaaaaaataaataaataaaaagttatcttaacttctcccggacaccccatgttttactaacagggtcttctctggagctacacaggtagcaaagtcagtgtttgctaattgcaaagcacaaatcatttatctcagaaaaaaaaaaaaaaaaaaatttggggcgcgcgcccaaaatttaaaacatcttgggccgggcccggggaatgaaaggcaaaggtccaaggacaccggcagcagggggtcccaaaaaccgggccgcgttgcaccccaggttggctcggcacaggcagcaaccgg

SEQ ID NO: 391214 - DNA, 383 bp, Homo sapiens
tctgggttgcaatgagctggttgtactactgcactctagcctgggtgacagagtgcgaccctgtctctaataaaataaaaaagccaagcaaactaagacaaccaggtaattctgtttgtttcctgaattggcaaaaacttaaacgaaccgtgttaatatgtccaccttctgggggcagcctggctgcaggcaagagcagccctggagcttgcaccttccaagctgatcgtctacctctccaagcccggggctgtccacctctccaagcccggggctgtccacctctccaagcccggggctgtccacctctccaagccccgggctgtccacctctccaagccccgggttgtcttacctctccaagccccaactgtctacttctc

SEQ ID NO: 391215 - DNA, 230 bp, Homo sapiens
agcaagactccatctcaaaagtaaaataaaatataaaactccaacctgactcctccccctcaccagtgtaatcttggtgcctctaattctgttcaatgtttcccttttccattgtacccatcaccttttaatataacatataacatatttattaaatataagctctggcatggcacagtggctcacttgagaccagaaaattcaagaccagcctgggcaacatggttaaa

SEQ ID NO: 391216 - DNA, 279 bp, Homo sapiens
gatggagtctcattgttgcttaggctggtcttgagcccctgagcccaagagatcctcttgcctctggagtaactgggactatgagtgtgtgtaatcatgtccaacctctgccataaatatttctaacaaacttgattatattagctttctagtctatggtatcttaaaatttagaggtgtgagatgaattggtgcagacaggagaattagatataaaagccggtgagtatgggtgataaaacctaaaaagccataggaactggagcatgcaactcacac

SEQ ID NO: 391217 - DNA, 413 bp, Homo sapiens
attacttgatctcagctctgcacagaggagctgcccaagtgaacagttatctatgattatttgcttccaagacagagggccctgggcctgatccctggtggacatggagctgccaggagcatcctctcttctctgttcctccccttggggactctgaacttcccagggagtaacctgtgtcccccaggtcagtgggctcatgcactagtaattttttccatctgtcctttccatgctgagcctcaagtgaaggaggaggccctatcctcagctagatgaggctctgggtgctcggacctggctggtgaccaactccaggagtcatggcccttggatagctcacatccttgctcccagccagccctgcccaagaggccaccacacagccctggcacagactccccaggatcacc

SEQ ID NO: 391218 - DNA, 140 bp, Homo sapiens
cttcttttccttgcaagattagggacaaaatgtaaagtttatttgtgtaaattatcatttggatataaaaccagacaatgataaactgagttgtataatacctattcctggaaaacctctgattttgaagtacattattt

SEQ ID NO: 391219 - DNA, 375 bp, Homo sapiens
ctggataaatatactgagagttatcaggatacagatgtcatttaaagccatgggctgggaagattaccaaggatgagagtattgggagaaaatagcaatgatcccaggtgtgagccgtgggacatttctccatttagaggctggagagaaaaacaggaaacccagagagtgtagtaacctggaagccagtgaagagtgtctcaaggaagacagtgagcagattaggattgagatttggccatttggttcagcaatatagaaataattgtttgattgagcagatattctccccaagaatgtaaaatttataatttcaaggaattatgtgccatatcttagactatagtgctcaacattttaatagatgttagaaaa

SEQ ID NO: 391220 - DNA, 449 bp, Homo sapiens
ttaacatatttttatttcattccattccttccctcttttctcatcatctcgataatatgagactaaaccacaactttaaatgtcttctgtttattgaatataaagttggtttccctacagaatcaaaagttctaaaaaagaaaacttaaaaaaatttaagttggcattttcagaaacagaaaatcaattacggcatgttcctcacttctaagtgggagctaaacaatgggtacacatggacatgaagatggaaacagtagacactggggactccagaaggggtagaaggaaggaatacaaggactgaaaaactatctattgggtacaatgttcactatttgggtgataggttcactagaagcccaaaccccagcatcgcctattatatttatgtaacaaacctgcacatgtaccccctggatctaaaataaaataaagttggcatttta

SEQ ID NO: 391221 - DNA, 558 bp, Homo sapiens
atctaaggacagtactttgggtgaatactgtcagattcctggagggaaaaaagactttattcctcctcctgttgtggctgtgactctttggttttctagatcagagaataccgggaagcatagcacattaaccttgtgttccctctttaaatcaatatgcatcacccgttaggaaccaaagagtgtttggggggctttgaacacagtggtgaccaacactgtaaatctccctgctctcagaagtctccactctactgagagacaacaataaagaggacaatttcagcaggatcaactggaagatgataaactaaggcaaagcatagctctattataacacaaaaattgttgagatgttgccgatgcttttatacttaaaaaaaaaaggaacaatctaaattagtatgaagtagatgtttctagaagtgacaaatttttatttaaatctttaaatactttgtgctattattcttttgttgtcatgtggcttatagcacagaaaggaaagcttctgggacagagactttcctttgacaaacccaatgtagctattgaaca

SEQ ID NO: 391222 - DNA, 401 bp, Homo sapiens
tgtttatcgatgccacccaaacactctttggttttctagatcagagaataccgggaagcatagcacattaaccttgtgttccctctttaaatcaatatgcatcacccgttaggaaccaaagagtgtttggggggctttgaacacagtggtgaccaacactgtaaatctccctgctctcagaagtctccactctactgagagacaacaataaagaggacaatttcagcaggatcaactggaagatgataaactaaggcaaagcatagctctattataacacaaaaattgttgagatgttgccgatgcttttatacttaaaaaaaaaaggaacaatctaaattagtaagtaagatgtgtctataatttataaatcaagaaattaaacacgcatctgaacatcg

SEQ ID NO: 391223 - DNA, 220 bp, Homo sapiens
ctggtataatcacatgagtcctttcaaagcagggagttgtcttggctggtagtagaagaagtcagagacattggaggcatgagagagtgcagtcttggcactgatgactaggctggctgtgcttcttgttcctgccatgccctttgccttggttttgtctcttgaccttttccaagctgccacactctttactgcatcccagcctccagccctgtgccta

SEQ ID NO: 391224 - DNA, 781 bp, Homo sapiens
gcagttttagactccagtcatgttggacagatcgtctgggagaagagggaccatctgttccttatgtcccttttccctttcagctttttattttgaaaagtttcatacctactgatactctggaaaaattgtgcaattgaacatatacccttcatgtagattttctcattattaccattttattacatttgctcactcacattctttatgtgattttttttttgctagaccatttgaaaatttgaaaagtaagctacagatgttttgacacttcatctctaaatactttagcatgtacctcttcaaaacaagaacattgtcttacataagcacagtatcattacatgcaagaagtttaatattagtaaataacatatactttataatctttattcaagcttcctcaacttttttgcattttggcaagtggtggttctggtaagatgtctagagttcaattcaggatcatgcattgaatttaattgccttgtctctttatattccttaatctagaacagatccagtcgttacattgacatttttcgatgagtcttaatagaatgtttcacaatttgttttctcaccattttttttggagagacaagagtctcactctgtcgcccaggctggagtgcagtggcgtgacctcagctcgctgcaacctctgcctcccgggttcaaatgagtctcctgcttcagctgcccaagcagctgggactacaggtgtgtgccattatgcctagctaatttttgtaatttttagtagataatgggatttcac

SEQ ID NO: 391225 - DNA, 494 bp, Homo sapiens
ctggaggattaagtataaagccccatagcacagagcaggcgttcagcacctggtgccttatccccctggtgggtgggtcctcaatgattgtttgtggaggtccccttgagggttcagctgactgctgatggtgactgagaggaaattgcccaaggctggggacaccatctgaggggattagaggaaacagcctctcacacagtcctgggaagagtgcctgttgctacgagccagactggaaagcctcataattcacagagcatcggtcagattcttcagaagggtcttgcctgagtagtgggaaataattagccctaaatgaaatgcagccctgagtctgtctaacactcttaaaagcaatgatttaggagcacagtttggcgttcagaccccagttcaaatcccagctctgcctgctgtattacctgctgtgtgacttacagcaaatcagtcctctctaagcctcagtttcttcacctctcaaatgggcatgc

SEQ ID NO: 391226 - DNA, 515 bp, Homo sapiens
caaatcataataagacggcgagttagagaccatgctgacatccacatgctggctgacctcgtggggacatacaccacacacagtgaacgcacattcgcgtgttgcatttgcctgagagacgaacatcccagactccactctgccaaacccttccacctgtccctggggctcaaagaacagcagaaaaccgcacttcccatttcctagggcgtcctggctgcaactcccaactcaggcacaaagaccccttcatgaagcctggaggcccaggctcaaggagcaggaagcacatgctgacaggggacagagagcgggaaaacactcctcagagcttccaggcacagctgcccttgttcccagaagcactgccttctgagtaagagcttctggcagggagccggcagtagccgcccttgccaaggtttctggaaactggcaggcccccacctcctggaaccacagggggcagctggactgctgcccttcatgactggctcgagcgctgcctcccagca

SEQ ID NO: 391227 - DNA, 358 bp, Homo sapiens
aacctgtatgttacttctgaaagccagacagtgacgctaagaataacaaatagattcagatttgtttttcagaaacttgagctatttcggccaggtgcactgtctcacacctgtaatctcagcactttgggagagcgaggtgggcggatcacctgaggtcaggagttcgagaccagcctggccaacgtggtgaaaccctgtctctactaaaagtacaaaaattagctgggcgtggtggcaggcacctgtgatcccggctacttgggaggctgaggcaggagaatcgcttaaacctggaaggcagaggttgcaatgagtcgagattgtgccactgcactccaacttgggtgacagtgag

SEQ ID NO: 391228 - DNA, 734 bp, Homo sapiens
cagggttcaaaatcatacaggagtgatatgttgttggtttgttttttagttctattgcacagcatcgttaatgtagttaacaatggagtattatacatctcaaaatggctaagaaaatgagtatctaatgttctcaccacagaagtatgttaagtatttgaagtgatggatgttaactagcttgatttaatttttccacattgtattcataaatcataacatcactttgtactccaaaaatttatacaattataaattatcaatttacaattttaaaaaatactagaaaatgtttgaaaggcatcaaacttagctatatgatttaatttagatgctagctaagcaataccaagtaaaaatctttactcattttaattcaagatgtattgaatacttactaagtgcaaggaagtatgcagaatgctcatttatttgatactttgttggaaagttaactatattgaatttatctcactcgttttcttttgtcttttaaaggtgagaattctaactcttttagaaactaataacagtttcaattaagttcttgaaaccagattttcagaaaagtttataaacaactatttcagtgtatgacatagcctttcagtataatttggagagcatgatattgttacctgaattacttctctttctactactagtagataataatcttctactagtattaaaacacagaaatgttcttagagagggaaacataagtaactggt

SEQ ID NO: 391229 - DNA, 468 bp, Homo sapiens
aggaattgggagagatgtgttaaaagataaaaaattacagctagataggactaagttctatatttctgtggtctataccagtgtaggatgactatagctaacaataacatacaatttcaaatagctagaggaggtactgcatgttcccaacatcaagaaatgataaatgtttgagatgacggatatgttaattgccctgatcactatacattgtatgtactgaaacaccactgtgtaccccatgaatatgtacaattatgtcaatttaaaaaacaattttttaagaaaagcaacaatcagattgagagaccaactgatgccccaccaccaccaccaaaaaaaaaaaaagtacatgatttcttcatcatgtcactgaattaatttttgccactcaagagaaatgcctgcactgcagtttttccacactcttcctggggatctctctcctcattgcaaaagagatgtgcc

SEQ ID NO: 391230 - DNA, 335 bp, Homo sapiens
tgacacattgtgactttctaaaaacctttttggtgcccaaccaagttccactagtgacccagaaggcccgctgagattgtgctgattctgaggtcacggtggacctggcttctcagtcctttattttggcctttggaaaggggcgcacgatagctctttattaaagacacttgtaaggagcctaggcaaatcattcaaacttctgggattcagtttatctaccttataaaaattgcgtatttatgcctgtgtcttttactcacattaagattaagaacaaatggcctctaaataatatattataaaattggcaataaagttaatgatctagttga

SEQ ID NO: 391231 - DNA, 248 bp, Homo sapiens
ccacttcaatgtcctacttcaatttcccctttctaaaagaacctggtagtaacagtgaaaagataatcatcatgacattataaaatactgctttaagaaatctgaacactgatcatttatccttctaaactgcctcaagtatgaggtaagcctgaaacaaattcaaagcctcttatttctctacaaccaagagaccttaaaaacaacaggatctatatgttccagagctaacgaatgtataaatggaa

SEQ ID NO: 391232 - DNA, 720 bp, Homo sapiens
atgcgcggcgccgcggggccttagcggacggaggggagcgcgggggtcaccgggccgggccggcagccctagagctcggcctggcggggaccctgggccagccccgcgcctccgtggcccgggcgtctcgtgcgtgtccgcgaactcgcgtgcgcgcgtcacctcggaccgcagcatggctcggagggcggccctactcgcgccgccctagtgctgcgaagggcctcggagcccaaacccggaaccgccatctgggactgggaagacgacatggccagaagccgactggacagccggcaccaccccatgattcaaggatggccatagcccagtgcaggagcagatttgcttccagtttgcccttcctcctagagttttgctcttgtcgcccaggctacaggacaacagtggcgttatctccgctcactgcaacctccgcctcccaagttcaagcaattctcctgcctcagcctcccaccaccacacctggctaattttcggatttttagtagagatggggtttcaccatgttggccaggctggtctcaaactcctgcctcaaactcccaaagtgctgggattacaggtgtgagccaccacgcccagctgtttaatctctttttaataaaatatttcatggttatcattggattctcacagcaccatttgaggtatacgagcgaggttagtccaaatttaacacacgtgctcaactcgtgg

SEQ ID NO: 391233 - DNA, 1242 bp, Homo sapiens
  misc_feature (1242)..(1242): n is a, c, g, or t
atgtaatggcagttatattttgcagttcccacattaaagaagacctgagaatgtatccccaaaagcgtgagcttaaaataacaagacaaagccaaaaaaaaatattataagaagacatataaagaactcaagagaagacaattgaaaagaactaggacaatagaaaacaaaacccaaaaaacaaaaaagagaagcaacacagaaaacaaaacaaaccaaaacaaaaaaaaataaatataaataaaaccaaccataaacaaacaaaaataatgccacatacaaacatacagtgttataaatttatcctaaatattaaacaggtataagccccccatagaataacatactacccaatgatacgaatatgtgaaactgaaaactaaaggactaatagcttaataggcatcttcaggtatagaatatatatcaaattatatattgaactggatatttttcttaatagcaagaacaaatctctattcattaagttcatggtattatactagggctataggaaggtaataggagagaaccaatattgaggcaagaaaaagataaagatatttcaagatatgacacttgaagcgaaaagatatgttatgcccagttaaaatgagaactgataaccaagaactatagggaagtaaaaacacctgcttgaaaatataaaacggaacgattataaaagaaatagaaaacaacttataaagagcttaaaaacgaacagaggcgcagtttacctaagggataaaattgtaatcagtgaacattatggtgaagaacaaaaaccaaaagcgatatattacccaaaagaactagataacctaaaagaaattaccgtatataaaaatttaacccaaaatttttttggaaaacttcgcgcggaaaagcggcttctcttctaacagtttccttgaaaacacacgaattttttttggccacccttcttcgtcggccgcgaaagaaaaagggttggctaaaagacccccagacaaggagaagttgtcgcgaggccccgccagagaaatcagaaggagacgccgtagtcgcaaaaagctagtgttccccggaagaaggggaccgcaatgctcgagcacaacatgacggtggagaacccgccgccgcaaaagagacagcccccgggtggacagcacacgcgtgatagacctcatacacaaagatagtgtgcagagggggcgaacagggcgcatgcgagcaaaatacggtgggcctgaagagacn

SEQ ID NO: 391234 - DNA, 480 bp, Homo sapiens
gacccacgcgtcagccggacgcgtgggtcgaccacgcgtccggaacaggatcctatcaggcgaccaagaaggaagatgtactttcagttaggtgtcagagaatgtctctgaggaactgacatcattggaggcctaaagtgtgaatgagagggccatccatgcagagtatgtggtgtgtgcaagtgtgtagaacttatctgaaagagcacactgtataaatataggccctgtggtgtgaaagtattgacctatttgggcagctatgataaggccagtgtagctggcatggaataagcaacagagacagaaacatgcacagtgaaattggaaagataggcaccaaatcatgccggagcttataaagccaggatgaaaaatttagattttgattttataagctcagtggaaatgatctgcatttataaaatattttttggctcccatataaatgattggaggaggcagaaggagagtcaggaa

SEQ ID NO: 391235 - DNA, 529 bp, Homo sapiens
gcactggctgtatgatcctagagctcaaagcagcagcctgaatatttcagcatgtaggtgatataaagctgtggaccaggacgagctcctctggggaaattggtataattgagaacatctcagggtccaggtacctttgactctgcctaccctaacacacctggaagctgttctctcagtaatcaagttatttgaggccagtggagagaaaagtgtgactattattctcacctatcaccagttctaccctttgggcagacgatgcacttggctccctgattgcccttctcactgataaagttacataaatgtcaccttggataaaaaagaatgttgcctcagctgcataattcttctacaaggagaattcttctacctacatagcctcaatttttacccctccttgttgtgttacctatacagaaataattttctgtcttcttctcttacccctattttctttgctgtatttcttttttcttttcttttccttttttatgttttatgttttagagatgggggtctcact

SEQ ID NO: 391236 - DNA, 372 bp, Homo sapiens
gaaaggggataaatgggagtgacgtccaggcatgttgggcttggtgtgtggcccccaggatcttaggaggagccagctacagaggggtccgaagcatggtgggaggaggagactcaaaaggaacatagccccagtgagttccggagggcaaagtgggacctccagtgacgacgacagcctgggagacccaagttcaagacaaaatcaggatctgctcagagaggagactggcagagagccagaatcaacaggagggaacatgaggccatgcagccgatgggcagcgcagctgggccggggtgacccagggctggacaggctggagactctcactttcacaaaatgctggctggctttccagaaaagaccctg

SEQ ID NO: 391237 - DNA, 366 bp, Homo sapiens
gccctgtggatattgagggatgactgcaacaagcagacttcgctttagaccgagttggccagagccaggtcacgtagcaccccaggtgtggttgaggggtgactaaagggagtggacttgggggtggctgtgagatgatccaatgaggaccatcagccacattacctgggtaatgtcatcattctaaccacatccattatcgatagtgtagatatggaattttaggcaattttcactcttccagtggtagccctgttactccttgcagtggatgagtagatgttcttgataagtctgccacctccatccagataaatgccataagaggaatatttatagtcatcgtacacagtatatgtattgact

SEQ ID NO: 391238 - DNA, 146 bp, Homo sapiens
ttcatggttgggggagcagcgggagacggggagggtgctaggaggagagggcgggaaaagagggctctctcctcttccaatcctctgatcttcctgctgttgggaggtgcagattcattgtgccccagcccacgtccccccacgac

SEQ ID NO: 391239 - DNA, 428 bp, Homo sapiens
  misc_feature (385)..(386): n is a, c, g, or t
  misc_feature (412)..(412): n is a, c, g, or t
  misc_feature (420)..(420): n is a, c, g, or t
gctccgccctctctgcctcccaaagcgctgcaatacaggcatgagccacctcacccggctggcccaacccatgagtttttaaaagtcccacagatggtttagaatgtttctaatttatacctactgccccacccctcacactcactcctgatttgaggacctctgttaatggttagatgaattggagaaatctgtgcttgaaatcaatccgctccatactagcttggttacttagacaacattttaaaacaatgtgcaccttccacttctcatcacaaagcaagggagaaattattcagcaaacatttattgagctgagcagtgaacagtagacaagatccctgacctctcagagcagtcaacagataccagacagtagtagaanngccgtggagacagaaataaagcaagngataaggngatggtga

SEQ ID NO: 391240 - DNA, 409 bp, Homo sapiens
aagatttctttacaaagagatgtgaatataaagattaattcattgtttatgtccacaatgtggacattaaaatccctggatcaccatcaaacctaactttcgaagcattcatttattgtacacatattaattgtttgaaatttaaaatatacagtatttcccaaccaaattattttgagagtaaaatgtcaaaattgaaccaaagtcctatttagaaagtattcaagcttttaatgccaaaagccatttttaaagaagttcttaccaaagtaagttcaactgccagtttttttgttttattttgttttgtttcttgagacagagtctcgctctgtctcccaggctggagtgcagtggcatcatctcggctcactgcaacctctgcctcccgggttcaagcaattctctg

SEQ ID NO: 391241 - DNA, 459 bp, Homo sapiens
ctcttcaccccaaatttttaaacaaagcttctcctccttaaccagctgcaaatcagaaaacctttgaatccacctataacctataaggccctgcttgcagataccgcccttctaggccaagccgacatgtaacctctgtgtccttatgcacgactctgcctttcagttctgctttcctgagatctacccccgctttacaagccttgcctgtagccagtgggggaggccaggatttatacatgagcctcctggcccaccttgcttggcgccctgcaaatacacacgtcctttctatgacaaaacctcggcatgggtgtctgggtttactgcaccaggcatgtggaccccagttcatctgtaacaagcacagatgaaaccgtcaggtcaagggactgacccctccttgggagccatgagccaaacgttctcagagcctgggaaggacagagactcatccga

SEQ ID NO: 391242 - DNA, 560 bp, Homo sapiens
aaacaccctcttcctcactggtcagtgataccctgtgctcacagctctactccccctcggaatctcctgtctgaagcccctgtaggactctgggatcctccgaatcggccctctccagctccaagcacactgggatccttgccgcaggaggttgctgttggcttctgcccatgctgtgggtcaggatctgcagccaacaggcgtgggagcttaggaaggcacctggtggtttctcggtaggaaaatagtgtggagtgtgtgcaatcatgtttgaggaagcgtcatgagagggtcactgtctctgtggtagtgtccttagggaaccgtctttgcctggatcctggggtcaggtttggcatgaactctgaacttcctccctccgcaggatcttcagtagaaaggtcctgtcctgaggaaatgctcagaggcacttctcttgctgaggaagcctgcctggatgtgtgtttttgtcctcatggagatgcacatgacaaattgtgtgcaatgcctcagcacagcccaacaggttttttctgtttacacttaactagcctacgaca

SEQ ID NO: 391243 - DNA, 363 bp, Homo sapiens
ttatttatttatttatttattttcgagacagagtctcgctctgttgccccaggctcgagtgcagtggctcagtttcggctcactgcaacctccacctcccaggttcaagcgatttctccctgcctcagcctctggagtagctgggattacaggtgcccgccaccacgcccagctaacttacgcattattagtagagatggggtttgaccacgttggccagggttgtcttgagctcctgatctcaggtcatctgcccacctcagcctcctaaagtgttgagagtacaggcgtgagccatggcacccagccaatttcatattttgtcaggccacagttttaaaggtctcgttccatttaatcatg

SEQ ID NO: 391244 - DNA, 384 bp, Homo sapiens
gagtctggattaatgaagacctcttgctcttaggagggtctttcctctttattgttttagaattctggacttgacccagacttaaattcccatctgtgatgcattttgcaataagtgggtttgatgccagcactttgaaagatatccctcataaaacaaaaggacaagaatcaccagctcccacacaaagtaaaaaacgtgaacctaattttagcagtgttaataaggagcaactatccacaagtcactgcatcaataatgcttgtgttataacatcctctcctccctaaggcacaggagcaagtgacacatacttgtctgggaaccagtttcattaatacttttattgtatccgtccaaagatgagtagcaatatctgttacc

SEQ ID NO: 391245 - DNA, 470 bp, Homo sapiens
cctgagtttcctcctccctcataagctgctttctcaattttttcttacaagttatatctcctttgaccactaaatactggcattcctcagggcttagtcctgtatcctcttcccaggtgatctcattcattttcatggctttaagcaaatctacatgccaacgaattttaagtatctgtctatagaccaaatctctcctctaatttccacgtgtctacattccacatatctacattcagttgccaacttaaaatcccctatggaggccaggtgcggtggctcacacctgtcatcccagcactttgggaggccaaggcaggcaaatcacttgaggtcaggagtttgagattagcgaggccaacatggtgaaaccccacctctattaaaaatacaaaattagccaggcgtggtggcaggcacctgtaatcccagctactcaagaggcagaggcagaagaattgcttgaacct

SEQ ID NO: 391246 - DNA, 489 bp, Homo sapiens
tgtgcatgagtggggagggcggcatgcataccatgaacgtgccactcgagccagcctggggacaggacacatgcttgcccttgagctcacctctgtggatagacagtcccacaggaatgcctgtccccacgggttgccggtgctgtggtggaggaccgtgaggcctctgctaaaaggcctgggggctcggaaagggctccatggaacaggggacccatcctgaggcccttggggacagagcagtgcagaatcagtgatctggaggaagagcagcagccctctctctgcagaggtacagcagaggctggcaggacccagcatgctaggggaggccctgtggcgtggcgggcggtgggtgaccggggtgggcgagcgcggtggctgagctcagaccctggagccagggcgcctctgggggtccccgttctgcctgcactcactgcagctacctaatggggccatcatagcgcctgcctggggaggctgcga

SEQ ID NO: 391247 - DNA, 684 bp, Homo sapiens
accaaaaaaatggattttgggggcaaaaatacaaatattaaagattgcaatcttaacagtattattaagtatcacctgcttattgtaaaatgcgtattgtgttcattattgcttgaaatttaggagcccccaaaaataacaagtccctgtctgtggtggtttgccttaaacacttacatcaaacttagcattaacttctggtgcacagtagtgtgctatgtaattttctttgataagttctgttagtatgttgccaaagtatgcagtattgacttctagagtgtaaatacttttacttggaaaagcctaatgtatcttttaacaatattaaggatagcttgaacgttttctcttattgattgtctacattaaacatttaaggtgctttggttttagctgctgtcattaaaatcaaccaaagtgtgttaggaatataatgttccttcttaaattgaggattggctgtaaatgctaagtgcctgtggcgtggatggtgtccctaaccatgaagaaaatgtgcacagtcacttctgtgttcctgtgggccaaatcacctgtttcttctatttggaagatcagttcgatgacctaaaaaattaagttattgtctgtgtacccaattgaccttccacttaaagccaaagtattcagctaaaaatacctttatagtttactggtaggttg

SEQ ID NO: 391248 - DNA, 516 bp, Homo sapiens
gtccaacatctaaaagacattattttatatgttttgtccaatttgctagttgtttaaggtgggagtatcaatcatgttcctcttactccatattttcccaaagtggaagtcaacataccatgtattgggttgtataagagaatctccttattcttaggatattcatgatgaaatgtttgggttaaagtattattatgtccctaaattactttctaatatttcagaaaaaagaaagtaaatattagaaagtattaataattattgaatgttgaaggaatgtatatatgtccatggtgctattttctcagcttttctgtatgtttgaaatttttcaagataaaaagttttaaaaaaaagactagggataaataaaatgttatagctaaatatggagagttgaattatgagtatataatttattgtttttcctgttttaaattctaaaaatgaattctaatttaaaatataatatttataatagaatctaaaactataagggatctaaaaataaaatta

SEQ ID NO: 391249 - DNA, 254 bp, Homo sapiens
cagacagagtttttaaatggtttggatgtatcttcaggacaaattaccatatttgaagattttcctaaataaaaaaaaccaaatagatgtaaaaatctatgacattctttaacttttattcttgaaattatgttttcagatgaaatatctgtaaaatatgtaaatataatatttaaaacctgacctaggtattatataactttgagataaatgatgaaataaatgagaacttaaatgttctaaactctttaagg

SEQ ID NO: 391250 - DNA, 143 bp, Homo sapiens
agtaaacatcagacagggcacgatcggtgcatcacctttgaacacatagagtgtgcttgtctggcacacggggcagggctgactgaaatgatgactaggaggatgagaaaaattcctgagggaggctgtctgcatcatcgggg

SEQ ID NO: 391251 - DNA, 470 bp, Homo sapiens
aaagtcttttaccaatatgtctgtgtagacattctggatttcttagatatcttttctgtggttgtggttgtgacctctctggatttttgcctgtgaatttccaattagagaagttttgctggtttattttctcatagtttataatcttttgatccctggtatctgtaggttatccctggtgtctgtagattatctggagctgccataagctatccaactcttttgtttgtttgttttgagacagagtcttgctctgttgcccaggctggagtgcagtggcacgatctcagctcactgcaacctctgcctccctagttcaagcgattctcctgcctcagcctcccaagtagctggaactacaggtgcccgccaccatgcccagctaattttttgtatttttaggagagacggggtttcaccatgttagccaggatggtctcgatctcctgaccttgtgatccacctatctt

SEQ ID NO: 391252 - DNA, 374 bp, Homo sapiens
ccagttctgacacatactagattacttgggttcaaatcccagttctgacactagattacttaactagcaagttgcttaacttctctgtgtctcagtatcctctttcataacaataaggctattgtggagattaaatcatatcagttccttcaaagaacttagcacatatgagggtgttaaatgttcataagtgctcagcacatggtaagtgctccataaatgttagcttttatgagtgttggctgtttgttaggactcacattctgtacatggaaacatttatcaggactctgattttgtaagtggaaaaattttcagattttctcaagccttgcacgctgtcataaaatttcatgaggataaagtcatcagtt

SEQ ID NO: 391253 - DNA, 229 bp, Homo sapiens
tatgaagaaaagagtgtgttgtgaacgaagtcagaatttcctgtgttccctttgccgctcctggagttcactggttctccttccagggaacccagccttagatgattaaaaaaattgaggagggcctgaagaagcagggcagcagtgctctggaggtggcagaatcacagctggtgttaacgagttccagtagttaatcttccatccacctctgtccttatccacctgg

SEQ ID NO: 391254 - DNA, 326 bp, Homo sapiens
aattactagattcctataatgtattagcacttttctttggttggataacaagggaagcacagatttgaggcagagatctctcagaggcttattgggagtgctcttagaactatcattgaagccatgacagatgcagggttggggagagtgagaaggcgaactccagtgcagtcgcaacaaaagcccagcaaattcctcagggcgggagctctggagttggcagagaccttcagagatgtccctgaaatgaagcaaagatgaagaagccaatcctttgtactctggcattcattgggattcactgggggctgcctctggggagaaga

SEQ ID NO: 391255 - DNA, 777 bp, Homo sapiens
ctcgtccaagaaagcaagaccctgtctcaaaagaaaagaaaagaaaagaaaagaaaagaaaagaaaagaaaagaaaactgaaatatgagaaggaatcccaggtgacaaacgggggtaaggaaagtatgtttgaagattttgcagtgggaaggggctttgtgagtccagaaacaaggaagcccagtgcacctgctgtgtagcagcaaaggggaaagtagcacagggaagaagcagcaggagccagaccttccagggccttaagcaccacgaataataaagcatgtggattttatcttatgaaattagaagtcattaaagggtgaggcataaaataaaaattcttgccagacacagtggtgcatgcttgtagttccagctactgaggaggctgaggcaggaggattgcttaagttcaggagtgcaaggctgtggtgtgctatgattgcacctgtgaagagccacttcagcctgggaaatatcatgagactccatctctaaaaaaaaaaaaaaaaaaaattaaaagtctgaatattttaagtactgaggagggccaggaagatggatggcattaatcatagtttgtcatgtggatcatgccctagagcagtaaaagaaaactagtgggaaaaaagagaaagtcctgtgaaaattatgaagttttcccacaaagtattgtaccacaataaatatcttgagaagaagaaaaaaagtctaagtaaacttggtggactgataggaaagcagaaaatagctaaaagcaaaacattaaaaaaaaaa

SEQ ID NO: 391256 - DNA, 699 bp, Homo sapiens
  misc_feature (672)..(672): n is a, c, g, or t
caggttgaggatgtgtattggaatatcttaattccatcgtgcacttaacttcatgttacttagcttgtaaaaccaaaagaactttgttctttggattacccacccaaacaattaggtgaacactggaataaacatgtattttccagaaaagtttaccttttcattttttatgcatttttgcaaataagaaaacaactatatttctgaactttttgtaatgtttaatttttgggggtacacagtagatgtatatatttatggggtacatgaaatgctttgatacaggcatgcaatacataattatcacatggaaaaatggagtatccatcccttcaagcatttgtcttctgtgtgacaatccagttacactttcagttatttttaaatgtccaattaaattattattgactgtagttaccctgtgtgctatcaaatatcgggtctaactcattttttctgtacccattaaccatctccacttccctaccactacccttcccacctccgtactggcccgaagaagctgacagggatcaagcatgaatggcaagcaaactgctacgaggaggtcaaggaccgctgcaccctggcagagaagctggggggccagtgcgtcatctccctggagggcaagctttgtgagcccttttggccctgtctgggcattggggnccaatcgtatggccggtacgagtcgag

SEQ ID NO: 391257 - DNA, 491 bp, Homo sapiens
caatacccatgggttattttggcagtttctgaatgcataaatggaatagacatattcagtttctggcagaactttcacagtgatttctaacctttagagtgccaactgaaaaatcacatgatttataaatttagaaaggagactttcttttctttagagatagtctcagttgcccaggctggaatgcagttgtgtgctcacagctcactgcagcctcgacttactgggctcaggtgattctcccacctcagcctcccaagtagctgggaccataggtgtgcaccaccacacctggctaatttttgtagtttttgtagagacagggttttgccatgttgcccaggctggtctccaactcctgggctcaagtgatccgcctgccttagcctcccatcctgaccgtgatattatactacaggattttaccattgggggaagctgggcaaagtatataagtgatctctctatattacttcttacaactacatgtg

SEQ ID NO: 391258 - DNA, 314 bp, Homo sapiens
tggcggtattattgggagaaatcacttaataccatcttatattaaatggaagaaaggttttaaataggattttcaaagatctagaatacaaacacattttcaccatgggtttttttttggactaggaaataaattcatttgtgtgctaccaaatatcataaacatctaggtctactaaccactaataactagaaaactggctttaaagttgttgaaatgaagatgattataaacacttaaggtattgatttgtacaaaccttcctgtttctgagtgcctttaagaaaattaaagggattttggaagtgtgcaaa

SEQ ID NO: 391259 - DNA, 551 bp, Homo sapiens
ctgcaacctccgcctcctgggttcaagcgattctcctgcttcagcctcccatgtacctgggattacagacgcccgccaccgcgcccgcctaatttttgtatttttagtagagacaaggtttcaccatgttggccaggctggtctcgaactcctgacctcaggtgatccgcccacctcggcctcccaaagtgctgggattataggcgtgagccaccgagcctggccgacctcctcagcttctaaaggacacagtaccttggaggaatgtgcacggagggatggagtcctacactcctgggatgccgaaatgctgagagtcaagagactgggatttggggggacaaggcttccagggttccgcctgagcaagggagtttttgacttcttagacaggaggttctttcacttcctttggagtgggtctctgacctgggaatgtggggtctgggtttgatggtccggagaaggaataaatagccctaggatgggatgggtaaaggccaaggtttcttgggatgggggtttctgaatggagcaggggcctcctgaga

SEQ ID NO: 391260 - DNA, 190 bp, Homo sapiens
ggcctaaaaattttgattattgtattattttattttagaagttctgttaggttattttaaaatttgttgtcatgtgatataattttctatactttggcaatgtttctaggttatttatttatttaaacgcagtaaactttttttttttttagacagagtttcgctcttgttgcccaggctggagtgagat

SEQ ID NO: 391261 - DNA, 460 bp, Homo sapiens
cacctgtattcccagctacttgggaagctgaggcaagagtatcacttgaacctaataggcacagggtgcagtgagacataatcgcaccactgctatccacccagatcaacagagcaagaacctgtcttcaaaaaaaaaaaagatcagctgggcatgatggcacgcacctatctatggtacatatcccaactactcaggaggctgaggggggatgaacacttccgcctgggaggcggagggtgcaatgaaccaagatcatgccactgcactccagcctgggcaactagagtgaaactctgtcttaaaattaaattaaataaaataatttatccaggtttggttggcggcaatgcacctgtggtcccagctacttgggaggctgaagtgggaagatccctttatcctggaaggttgaggctgcagtgagccacgatcatgccactgaactccagtctgggca

SEQ ID NO: 391262 - DNA, 568 bp, Homo sapiens
agcggggaggatttactcgtgtctgagatacatgtcttggtgtaaaaaaaataataattcaaaaaagcaaatattagctatcaaaaaatcagtagattatgtctgtgttttagaatatggtttccaatctaatttttttctttctttttcttttttggagatggagtctgtctctgtcaccaggctggagtgcagtggcatgatcttggctcactgcagcctctacctcacaggctcaagcgatcctcccacctcagcctcctgagtagctgggatcacaggtgcacaccaccaagcctggctaatttttatattttttgtagagatggggtttcacgatgttgcccaggctagtctccaactcctaaattcaagtgatcctcttgccttggccttccatagatatgagccaccagacctggccagttggagggatttataatcacctgaaattttctttactcctctggttactggaaattgcagatttaagtaccttttagaaaactggtaggaacctatgagagtaaatgctaagctgaagcagtgactctttaaaaattaagcc

SEQ ID NO: 391263 - DNA, 947 bp, Homo sapiens
  misc_feature (15)..(15): n is a, c, g, or t
  misc_feature (34)..(34): n is a, c, g, or t
ccccttgggaggtgnatccacatgtgcaacaaancaaaagcctcatgcttctgcagttgacattaatgtactcacacttatgaaagtttgccaatccctgatctctgtttaatacattctcgcaaatctctataaaagtcagtagtttgttcttctagaagttagtgggtctacacatgaaattcgttgtaagaaatatcaaagaatgtccagatcctccaaaaagaagagaattaattattgaatttgatttaaaataagcaggtcattgggtgggatttagaaatctgattctaataatatttgacctacagctctattaggaaaaataaaaaggcatgtaactatcttgaaattcaaaccatatccacagttattatgttaaaggagtggttttcaacctagagtggtggcaacttctttctcaaattaaaacaagataaaaggtaagctattctccctcaagaggatggaggatgggaaaaatgtttaaaaaaaaaaaaaaaaacactccaactatggagcctttctcccttcataaagcagctcggcagtcactctgtgcaacctaaggctttggagatcacagatggaaagccacctgtttgaggtaacagaaggaataaggtcactagttcgtagatgcaatataatgacacaggtatactaagctctcataaatggttatatgagaaatataaattaaggctcatgtaaatatacaaagtagctgattacaaaaaaaaattatgaatatctttgtaaagtatcatttccaacatatttcctatgtaaaactttttttaaaaaattaggtttgctgaaattgaaagatacacatacttatctctgaactctttctaactaatggtcagtgaagaaaagtgcaaaatcctttagtttattagctaatgcttggaaatgtaactgttcattaatccttaatt

SEQ ID NO: 391264 - DNA, 377 bp, Homo sapiens
cagactttctcagacttatttgaccatgcaacttttatagcttctgtttagtgggtctacacatgaaattcgttgtaagaaatatcaaagaatgtccagatcctccaaaaagaagagaattaattattgaatttgatttaaaataagcaggtcattgggtgggatttagaaatctgattctaataatatttgacctacagctctattaggaaaaataaaaaggcatgtaactatcttgaaattcaaaccatatccacagttattatgttaaaggagtggttttcaacctagagtggtggcaacttctttctcaaattaaaacaagataaaaggtaagctattctccctcaagaggatggaggatgggaaaaatgttt

SEQ ID NO: 391265 - DNA, 342 bp, Homo sapiens
tgagacagggtcttgctgtgtcacccaggctggagtaaagtgacacaagcaagtctcactgcagccttgacctcccgggctaaagcaatcctcccacctgtagctgagactacaggcatgcaccaccacgcccagctaattgtgtgtgtgtgtgtatatacacagtcagggtctcactatgttgttcaaactcctgtgctcaagtaatgcacccacctcagcttccaaagtgctgggattacagacatgagccaccatgcctagcctccacaacttttaaacagcctgacatgagcacatttcctaaccatgactacacagacacaaatgcatttcctaaag

SEQ ID NO: 391266 - DNA, 367 bp, Homo sapiens
gaggttgcagtgagctgagatcacgccactacactccagcatgggcaacagagtgagactctgtctcaataaataaataaataaataaaatgaggctgagcattttattatcttgtagagcttttggctttggattttggcatctttgggatccgtggtagcctggtgtttgctggttacccattgactcttttgcacacatacaggcagggtagtaatacctcttccctggtgttcacaggtcaacacccaagcagttttgggtgtaggccatggaaggtggtgtcaaaagacaaaatcacagcaaatttgatttaaaactcgaattggcttttatttacaattctaggatcatgcagcacctcat

SEQ ID NO: 391267 - DNA, 243 bp, Homo sapiens
aaggaaagaaagaaaggaaggaagaaaggaagggaaaataaagaactttggaattgtccctgacccagaacttgaatacggtcaaaatttatactgtctatctcattcaaagaggtaacaggtatgcaagatttctctttagttgttaccaatttcagtatgtattaatagtgtttttttgtctttccacatatttttatagttggacaatccttaatcttatccttccttatttttttcttt

SEQ ID NO: 391268 - DNA, 306 bp, Homo sapiens
agtagagacggggtttcaccgtgttagccaggatggtctcgatctcctgacctcgtgatccgcccgccttggcctcccaaagtgctgggattacagatgtgagccaccgtgcccagcccagagttcttttatcctctagaaaattcttcattccatagagctttttcatattattagcttaattatgcataatgttttataattaaaaatttctctttattttgttctatcccctgtttcctgtaaactgctgtttgtggtttactcgttattagatttgtcaaaggtttatctagcttactattg

SEQ ID NO: 391269 - DNA, 245 bp, Homo sapiens
ttaactggcccagtgtgtcgagtaaggttagataaggggaaaagtgaactcagcatttcccaggcagaggcaaggacctaaggacaagttggggatgtgggggtggaaaatcacatttgagaaatggaaataattcagacaggtccaaggtatttgagaagagaaggaaaagggggcttgctatgctctgaatgcctgtgtcccccaagcttatatgtgtgaccctaacaaaaaacccaccgagt

SEQ ID NO: 391270 - DNA, 150 bp, Homo sapiens
ggctctgctctgaaggaatctgctgctggcagaagtggggccagtttctttcctgaattgtagacacctatggactcatggtgacaaaccacagaggcttcaaatgaaaagtggggcccctgagagacaggacagtcaggaaaggaagga

SEQ ID NO: 391271 - DNA, 353 bp, Homo sapiens
gggtcaggagcccagagaatagttaaacacattgagataagctttgtatattttcctttggtgcatttcccgattctcagtgcatggcataggggctacacagagagcagtagcctagagcagtcattcaaccagggagacaaaattggagtttggggttaccaaagagccaggggttgcagagccgagatcctgaggaatatcaggggtgaatccaactttttttttttttttttgagacaggatctcactgtgtcgcccagactggagtgcagtgcggtgatcttagctcactgcaacctccacctcctgggttcaagcaattctcctgcctcagcctcccaagtagctgg

SEQ ID NO: 391272 - DNA, 305 bp, Homo sapiens
ctacaccttgccttcggaaaacctatatgatacagtgattagcttgggcttttctaacttcttcaacaacattgagaatgattcctgaaaaactacagatcaaaaatggatacatgatttattcctcttttccttgaatatgaaaaagctgaaattgacttcaaaaggattctctgggagttataactatgctctagcaagaggttccaataaatcaaagatggctatctgtgttgaacaaaaatccaggaagaaaactcatgacccactccagagcaatctgagcaactttctcaatctttaga

SEQ ID NO: 391273 - DNA, 370 bp, Homo sapiens
agtcccttccacatcatccaaaatctgtcccatcagcacctccccccactcctgcccaagccgtgtcccctctggcctggatggctgccccagcctcctccttcgcctccttcctcttattccctcccgttcacctcactctgcccccaccatcacacacctcattctctaactgcagcagcaggagtgcgtctaactttacaatgcaaacttactgctgcccagctgagaagccctcaacagcttcccatcacacttagagcaaaccccgcaaccctcccctggccctcaaggctccctgtgagctggtccctgcaggcctctccaatcccactctccctgccccttgcagtaagttactcccttcctg

SEQ ID NO: 391274 - DNA, 326 bp, Homo sapiens
ccgaaaatgtctctagacattgccaaatgtccccttggggtcaaaactgcaactggttcggaaccactggcctactgggtgaggaggggttggggaatcggtggtagtgaggactgcaaagcacattcctgcctgtcatcctcccagccaccctggggctggatgggattagagaggctgcttgcagcattgcttgctgaaacttgctgagaagtctcttaactgagctggccattgatgagatgtctcaggggaatccattccagggcccctccactgggtcggggactgttggcattttgttctgacacctccagttcttaaat

SEQ ID NO: 391275 - DNA, 439 bp, Homo sapiens
aggcatgtggatggactatttgagtagctaggaagtgtgaagaggaccaccagaaagcatctaacttgaaagaaacaccaaacaaccagctagacagaatgatttagccaatttgatgtcaaccagatgccatcagccaccccagaactgacacaacgggcatgtgaaggagcaactgtggtggcagggatggggacaaacacatggaccgtcactcacaagggctgatgtagctaccaccactgctgaatgttcagcctgccagcaatgcatcagtgctgatcctcggaaatggcagtagctctcaaagtaaataagtagccgcttggtaataagttgactacaatgggtcccttccatcctagaaatggcagaaatttattttgactagaatggacacatggtttaccttttctgcctgcagggcctcagccaacgc

SEQ ID NO: 391276 - DNA, 324 bp, Homo sapiens
actgagtgaacactggcttttcctggctctgatgtgccaggcattgggggcatgagaccagatcaggtgcagttctgggaccctagaatcttggagctgcttgtccagtggggagaagccaatgaacaaacagcagtcaccccactggtcagtgctaggctaaaagtagtgatggcgatgacagcagcgcctaccgagggccagcattgtcctaagcacaactcattttgtctccacagcgaccccatgagggatgtaatagtagtaactggcctgtacagtggctcatgcctgtaatcccaaatctttgggaggccaaggcag

SEQ ID NO: 391277 - DNA, 472 bp, Homo sapiens
gggcacagattcgtcttctccatcatcgtatcctcatgtgacatagtgcccaccacatggcaggcactcactgggtattacttcagcgaatgaaggaagaaatcttattgccaataccactacctggtgtagaactcagcagtttccaaaatgctctcagatacacatatattatcatgtttattctaagcacttaattcatcaactcccacaataggaggggctgagaacacaactcattcctagtctaaagtggtcattttggctgggtgtggtgactcatgcctgtaatcccagcaccttgggagaccgaggcaggtggaggcttgagcccaggagttcaggaccagcctgggcagcatggtgaaaccctctctaccaaaaatacaaaaattagctaggcgtggtggtgcccatctctgtagtcccagctactcaggaggctgacatgggaggactgattgagctggag

SEQ ID NO: 391278 - DNA, 483 bp, Homo sapiens
atgtgactacaaaaggacagcatgagggattcttgtgatggaaatgttctgctcttcactgtatcaacgtcagtatcctggttgtgataatgtactacagttttacaagatattacattgggggaactgggtaaagagtgcatgggatcattctgtattatttcttaaaactacttgtgaatctagaaatatctcagaataaaaagtttaatttaaaaatgtggctaacatccatatggccttaacacagaatggattcttaagtacagattatttccaccatcacatgttgatcacaagacaggcagtcagggtgctaccgcatatgcttcaggcttgtcatagtgaatacagagagagccaagagttacactgcaacaggatgccacatgttctctctccaaaaggaagagaacaagatgaaataacatcaatgctaattttataatgagctacatctaatacttccctggacccagagtt

SEQ ID NO: 391279 - DNA, 387 bp, Homo sapiens
tcagtgaagtgtcagataagcaatctacgttaagttcctctggcttcaaggtgcaggaccaattggaagggggtaaaattagaagtagagtgacatctgcaatagttcagatgagagttgagaagagcctacattaaggccatggcaaagatgatagatagaaaaggccagatctgagacatattaggaaataaaaatcaagaggtataagtaacaggatatggggatgggaagaacaaattcaggatgactcctgtgtttcttgcttgtccactgggtggatggtgctattgtcaactgaaatatgggttagggaagaaagagcaggtttgtggggaggggagaaagaaatagaaaatgaattgcatttcagacatgtggagtttg

SEQ ID NO: 391280 - DNA, 560 bp, Homo sapiens
ggcatttactgatatttagtgggtgcaaaccagagtacctatacatgctacactacacagtatagttttaaacaagaaagaaatgttccatgtcctacattaatttgaacatctggctggacatccatctgagcctggaacccaactttgcttaaatgaaatgacagagtaggttttgtaatatatggcatttttgcagagttttagtactcacaaaatattaaatgttagcatccacccctacctctgcttcttgattttactatactgctgtataaaaggttgaaagacttctgatctgattttattgctcctgaattctgactttttcatgctaaataagtgcaagcatataaacccttttttatatcctttagtatagtcatagactgaacatttacttagtaaacagatattatatgtttactttcctatttcccctttttatcctaaatagaccattttttaatatttaatccttgatatttttaaaatctgtgtaagttatattatccagggatttctagatttaaagagaaaattacagaatgcttgttatt

SEQ ID NO: 391281 - DNA, 486 bp, Homo sapiens
acagaatgtaattttgagactatggacagagatattagaggagaaaactgtgattctcctaaatccaagggctggtggtattggatgggttggctgcaccagcgggagtgggaagacccctttgtggaccttggtgctgtacgggagaggtgataagaatagccaccaacctagcacatcctgcaggctagatcctaggctgggtaccgtgcatatgagtcccgcaagaacactatgaggaaggtcttatgagtccagtattgcagaacaacaaattaagtctcagaaatattttacaaatcgcccaaggtcttccagatagtacatgacaagtgaaattacaatgtaggccttccctgtgtcccactctatattagcaggaggtaggtggtccaggtctttgctatgaaccattcagagtctgacagtttagcgtgcatttccccctcaattttgcctttgaaatctcttgtgcatttgaacaga

SEQ ID NO: 391282 - DNA, 355 bp, Homo sapiens
gtagctaagattacaggcatgtgccaccatgtccggctaatttttgtatttttagtagagacagggtctcaccatgttggccaggctggtcttgaactcctaacttcaggtgatccatcagcctcggcctcccaaagtgctgggattacatgcatgagccactgtgcccggcctatttcagccttttattatgtctaattattctggtttataaacaatgacctaattagtaaaacttgagcctgtacatagtgctcattttgctttacattagcttatgtgaagctgggacagaataagacattgagatattttcagatattattctggtgcaataattcaatcatgtagtcta

SEQ ID NO: 391283 - DNA, 391 bp, Homo sapiens
tgacggaatctctcactctgtcgtccaggttggaatgcagtggcatgatcgcagctctctgcaacctccgccgtccgggttcaatcgattctccggcctcagcctcctgagtagctgggactacaggcacacgccaccgtgcctggctaatttttatattttttagtagagacggtgtttcaccatgttggccaggctggtcttgaactcttgacctcaggtgatccaccagcttcagcctcccaaagtgctgggattacaggagtaagccactgcacccgacctcagagtctttatttattccacttaggacaactatttgtatactcactgctgaagtactaatgcattagactaaagagcgctggaggtgctatataacatttaagat

SEQ ID NO: 391284 - DNA, 377 bp, Homo sapiens
aaactaccccaacataataaaagccatatatgaaaaacagtgaacaattatacttaatggtaaaaaacggaaagcttttcctctaagatcagaaacaaggcaaaatgcctgcttttgtcacttcagttcaacacagtgctggaaattttagccagagtcattagccaagaaaaagaaattaagaggcatcaaaattgggaaggaagaagtaaaagtatctctgtttgcagatgacatgatcttgtatgtagaaaccctaaagattccacaaaaaattgtttgaactaatacatgaaactgacatagtagcagcatacaaagtcaatgcacaaaaatcagttgcatttctaaacaccaacaatgaataatatgaaaaa

SEQ ID NO: 391285 - DNA, 4449 bp, Homo sapiens
gggagccctgtgctctgaccccagggcccagccacctggccctcacgttcctgcccagcaagccgggtgcccggccccagcccgagggagccagctgggatgcagggcctggtggggcaccctcggcctgggcggacccaggggagggcggcccaagccccatgctcctccctgagggcctgtcttcccaggctctgtccacggaggctcctctcccggccaccctggagccccggattgtgatgggagaggagacgtgccaggccctcctgtcacccagagctgcccggacagcgctcagggaccaggagggtgggcacgcaagcccagacccaccccccgagctgtgttctcagggtgatctttctgtgccttcccctcccccagaccctgattccttcttcacgcctccctccacccccaccaagaccacctatgccctgcttcctgcctgtgggccccacggggacgccagggactcagaggctgagctgcgggatgagctgctggactcgccccccgcctcaccctcgggctcctacattacggccgatggggacagctgggcctcttcaccctcctgttccctcagcctgctggctccggctgaagggctggacttcccctcaggctggggcctgtccccgcaggggtccatggtggatgaacgagagctgcacccagcagggaccccagagcccccgtcctctgagtccagcctctctgcagacagcagctcctcctggggccaggagggccacttcttcgacctggacttcctggccaatgacccaatgatccccgcagccctcctacccttccagggcagcctcatctttcaggtggaggcagtggaggtgacaccgctatccccagaggaagaagaagaggaggctgtggcggatcccgacccaggtggggacctggctggggagggtgaggaggacagcacgtctgcctccttcctgcagtcactgtctgacctgtccatcacggagggcatggacgaggcttttgccttccgggacgacacctctgcagcctcctctgattcagactcagcctcctacgcagaggcagatgatgagaggctgtacagcggggagccccatgcccaggccactttgctccaggacagtgtccagaagacagaggaggagagcggaggtggggccaaggggctgcaggctcaggatgggactgtgtcctgggccgtggaggctgctcctcagacctcagacagaggggcctatctgtcccagagacaggaattgatctcagaagtaacagaagagggccttgctttaggccaggagtccactgccactgtgacccctcacactctgcaggtagccccaggcctccaggtggaggtggctaccagagtgaccccacaggctggggaggaagaaacagactccaccgctggacaagaatctgctgccatggcaatgcctcagccctcccaggagggcatcagcgagatcttaggccaagagtctgtcactgcagaaaaacttccaactccacaggaagaaacaagcctcacattgtgtccagactctcctcagaacttgaaggaagaaggagggctggacctcccctctggcagaaagcctgtagctgcagccacgattgtccccaggcaggctaaagaggacctcaccttaccccaggactccgctatgacaccgcctctgcccctacaagacacagatctctcatcagccccaaagcctgtggctgcagccacgattgtgtcccagcaggctgaagagggcctcaccttaccccaggactccgttatgacaccgcctctgcccctacaagacacagaactctcgtcagccccaaagcctgtggctgcagccacgcttgtgtcccagcaggctgaagagggcctcaccttaccccaggactccgctatgacaccgcctctgcccctacaagacacagatctctcgtcagccccaaagcctgtggctgcagccacgcttgtgtcccagcaggctgaagagggcctcaccttaccccaggactccgctatgacaccgcctctgcccctacaagacacagatctctcgtcagccccaaagcctgtggctgcagccacgcttgtgtcccagcaggctgaagagggcctcaccttaccccaggactccgctatgacaccgcctctgcccctacaagacacagatctctcgtcagccccaaagcctgtggctgcagccacgattgtgtcccagcaggctgaagagggcctcaccttaccccaggactccgctatgacaccgcctctgcccctacaagacacagatctctcgtcagccccaaagcctgtggctgcagccacgattgtgtcccagcaggctgaagagggcctcaccttaccccaggactccgctatgacaccgcctctgcccctacaagacacagatctctcgtcagccccaaagcctgtggctgcagccacgcctgtgtcccagcaggctgaagagggcctcaccttaccccaggactccgctatgacaccgcctctgcccctacaagacacagatctctcgtcagccccaaagcctgtggctgcagccacgcctgtgtcccagcaggctgaagagggcctcaccttaccccaggactccgctatgacagcacctctgcctctgcaagacacaggccccacctcaggtccagagcctctggctgtggccacccctcaaaccttgcaggcagaagcaggctgtgccccagggacagagcctgtggccaccatggctcagcaggaagtaggtgaggccttaggccccaggccagcacctgaggagaagaatgcagccctccctacagtcccggagcctgcagccttggaccaggtccaacaggatgacccacagccagctgcagaagctgggacaccttgggccgcacaggaagatgcggattccactttgggcatggaggccctcagtctccctgagccggcctctggtgctggggaggaaatagcagaagccctttctaggcctggacgggaagcatgtctggaagcgcgagcgcacacaggtgatggggctaagcctgactcaccccaaaaggagaccctggaggttgagaaccagcaggaaggaggcctgaagccactggcacaggaacatggacccaggtcagcacttggaggtgcaagggaggtccccgatgcgcctcctgctgcctgccctgaggtcagccaggcccggctcctgagcccagccagggaggaaagaggcctgagtggcaagtccaccccggagcccacgcttccctcagctgtggccacagaggccagtctggactcctgcccagagtcttcagtaggggctgtgtccagtctggacagaggctgccctgacgcgcctgcccccacgtctgcaccaacctcccagcagccggagcctgtactgggtctgggcagtgttgagcaaccccacgaagtacccagtgtccttggcacccccttgctgcagcccccagaaaaccttgccaagggtcagcccagcacgcccgtggacaggcccctgggccctgacccttctgctcctggtacccttgctggggcagccctacccccactggagcccccagccccctgcctgtgccaggacccccaggaagactctgtggaagacgaggagcccccaggctctctgggcctcccaccgccccaggcaggagtccagcctgccgctgctgctgtctcaggaaccacacagcctctggggactgggccgcgagtcagcctctcgcctcactccccactcctcagccccaaggtggcctccatggatgccaaagacctggccttgcagatcttgccgccttgccaagtgcctcctccctctgggccccagagcccagctggccctcaagggctctcagcccccgagcagcaagaggatgaggacagcctggaggaagactcgcctcgggccctgggctcgggccagcattcggatagccacggggagtcatcagccgagctggacgagcaggacatcttggctcctcagaccgtgcagtgtccagcccaggccccagcaggcggcagtgaggagaccatcgccaaagccaagcagagtcgcagtgagaagaaggcccgaaaggcaatgtcaaagctgggcttgcggcagattcagggagtcaccaggatcaccatccagaagtccaagaacatcctctttgtcatcgccaagcctgatgtcttcaagagcccagcctcagacacttatgtggtctttggcgaggccaagattgaggacctgtcccagcaagtgcacaaagccgcagctgagaaacaaccacagtgacatcgtcaacgccatcatggaactgaccatgtagccactgaccggaagctggagccatcctacgccttccctcagctctgctactcaataaatcggtgtcccttca

SEQ ID NO: 391286 - DNA, 4522 bp, Homo sapiens
gggagccctgtgctctgaccccagggcccagccacctggccctcacgttcctgcccagcaagccgggtgcccggccccagcccgagggagccagctgggatgcagggcctggtggggcaccctcggcctgggcggacccaggggagggcggcccaagccccatgctcctccctgagggcctgtcttcccaggctctgtccacggaggctcctctcccggccaccctggagccccggattgtgatgggagaggagacgtgccaggccctcctgtcacccagagctgcccggacagcgctcagggaccaggagggtgggcacgcaagcccagacccaccccccgagctgtgttctcagggtgatctttctgtgccttcccctcccccagaccctgattccttcttcacgcctccctccacccccaccaagaccacctatgccctgcttcctgcctgtgggccccacggggacgccagggactcagaggctgagctgcgggatgagctgctggactcgccccccgcctcaccctcgggctcctacattacggccgatggggacagctgggcctcttcaccctcctgttccctcagcctgctggctccggctgaagggctggacttcccctcaggctggggcctgtccccgcaggggtccatggtggatgaacgagagctgcacccagcagggaccccagagcccccgtcctctgagtccagcctctctgcagacagcagctcctcctggggccaggagggccacttcttcgacctggacttcctggccaatgacccaatgatccccgcagccctcctacccttccagggcagcctcatctttcaggtggaggcagtggaggtgacaccgctatccccagaggaagaagaagaggaggctgtggcggatcccgacccaggtggggacctggctggggagggtgaggaggacagcacgtctgcctccttcctgcagtcactgtctgacctgtccatcacggagggcatggacgaggcttttgccttccgggacgacacctctgcagcctcctctgattcagactcagcctcctacgcagaggcagatgatgagaggctgtacagcggggagccccatgcccaggccactttgctccaggacagtgtccagaagacagaggaggagagcggaggtggggccaaggggctgcaggctcaggatgggactgtgtcctgggccgtggaggctgctcctcagacctcagacagaggggcctatctgtcccagagacaggaattgatctcagaagtaacagaagagggccttgctttaggccaggagtccactgccactgtgacccctcacactctgcaggtagccccaggcctccaggtggaggtggctaccagagtgaccccacaggctggggaggaagaaacagactccaccgctggacaagaatctgctgccatggcaatgcctcagccctcccaggagggcatcagcgagatcttaggccaagagtctgtcactgcagaaaaacttccaactccacaggaagaaacaagcctcacattgtgtccagactctcctcagaacttgaaggaagaaggagggctggacctcccctctggcagaaagcctgtagctgcagccacgattgtccccaggcaggctaaagaggacctcaccttaccccaggactccgctatgacaccgcctctgcccctacaagacacagatctctcatcagccccaaagcctgtggctgcagccacgattgtgtcccagcaggctgaagagggcctcaccttaccccaggactccgttatgacaccgcctctgcccctacaagacacagaactctcgtcagccccaaagcctgtggctgcagccacgcttgtgtcccagcaggctgaagagggcctcaccttaccccaggactccgctatgacaccgcctctgcccctacaagacacagatctctcgtcagccccaaagcctgtggctgcagccacgcttgtgtcccagcaggctgaagagggcctcaccttaccccaggactccgctatgacaccgcctctgcccctacaagacacagatctctcgtcagccccaaagcctgtggctgcagccacgcttgtgtcccagcaggctgaagagggcctcaccttaccccaggactccgctatgacaccgcctctgcccctacaagacacagatctctcgtcagccccaaagcctgtggctgcagccacgattgtgtcccagcaggctgaagagggcctcaccttaccccaggactccgctatgacaccgcctctgcccctacaagacacagatctctcgtcagccccaaagcctgtggctgcagccacgattgtgtcccagcaggctgaagagggcctcaccttaccccaggactccgctatgacaccgcctctgcccctacaagacacagatctctcgtcagccccaaagcctgtggctgcagccacgcctgtgtcccagcaggctgaagagggcctcaccttaccccaggactccgctatgacaccgcctctgcccctacaagacacagatctctcgtcagccccaaagcctgtggctgcagccacgcctgtgtcccagcaggctgaagagggcctcaccttaccccaggactccgctatgacagcacctctgcctctgcaagacacaggccccacctcaggtccagagcctctggctgtggccacccctcaaaccttgcaggcagaagcaggctgtgccccagggacagagcctgtggccaccatggctcagcaggaagtaggtgaggccttaggccccaggccagcacctgaggagaagaatgcagccctccctacagtcccggagcctgcagccttggaccaggtccaacaggatgacccacagccagctgcagaagctgggacaccttgggccgcacaggaagatgcggattccactttgggcatggaggccctcagtctccctgagccggcctctggtgctggggaggaaatagcagaagccctttctaggcctggacgggaagcatgtctggaagcgcgagcgcacacaggtgatggggctaagcctgactcaccccaaaaggagaccctggaggttgagaaccagcaggaaggaggcctgaagccactggcacaggaacatggacccaggtcagcacttggaggtgcaagggaggtccccgatgcgcctcctgctgcctgccctgaggtcagccaggcccggctcctgagcccagccagggaggaaagaggcctgagtggcaagtccaccccggagcccacgcttccctcagctgtggccacagaggccagtctggactcctgcccagagtcttcagtaggggctgtgtccagtctggacagaggctgccctgacgcgcctgcccccacgtctgcaccaacctcccagcagccggagcctgtactgggtctgggcagtgttgagcaaccccacgaagtacccagtgtccttggcacccccttgctgcagcccccagaaaaccttgccaagggtcagcccagcacgcccgtggacaggcccctgggccctgacccttctgctcctggtacccttgctggggcagccctacccccactggagcccccagccccctgcctgtgccaggacccccaggaagactctgtggaagacgaggagcccccaggctctctgggcctcccaccgccccaggcaggagtccagcctgccgctgctgctgtctcaggaaccacacagcctctggggactgggccgcgagtcagcctctcgcctcactccccactcctcagccccaaggtggcctccatggatgccaaagacctggccttgcagatcttgccgccttgccaagtgcctcctccctctgggccccagagcccagctggccctcaagggctctcagcccccgagcagcaagaggatgaggacagcctggaggaagactcgcctcgggccctgggctcgggccagcattcggatagccacggggagtcatcagccgagctggacgagcaggacatcttggctcctcagaccgtgcagtgtccagcccaggccccagcaggcggcagtgaggagaccatcgccaaagccaacctgatgtcttcaagagcccagcctcagacacttatgtggtctttggcgaggccaagattgaggacctgtcccagcaagtgcacaaagccgcagctgagaagtttaaggtgccctcagagccctcagccttggtccctgagtcagcacccaggccccgggtgaggctggagtgcaaggaagaggaagaggaggaggaggaagaggtggacgaggcggggctggaactgcgtgacattgagctggtgatggcgcaggccaatgtgtccagggccaaggccgtgcgggctctgagagacaaccacagtgacatcgtcaacgccatcatggaactgaccatgtagccactgaccggaagctggagccatcctacgccttccctcagctctgctactcaataaatcggtgtcccttca

SEQ ID NO: 391287 - DNA, 4643 bp, Homo sapiens
gggagccctgtgctctgaccccagggcccagccacctggccctcacgttcctgcccagcaagccgggtgcccggccccagcccgagggagccagctgggatgcagggcctggtggggcaccctcggcctgggcggacccaggggagggcggcccaagccccatgctcctccctgagggcctgtcttcccaggctctgtccacggaggctcctctcccggccaccctggagccccggattgtgatgggagaggagacgtgccaggccctcctgtcacccagagctgcccggacagcgctcagggaccaggagggtgggcacgcaagcccagacccaccccccgagctgtgttctcagggtgatctttctgtgccttcccctcccccagaccctgattccttcttcacgcctccctccacccccaccaagaccacctatgccctgcttcctgcctgtgggccccacggggacgccagggactcagaggctgagctgcgggatgagctgctggactcgccccccgcctcaccctcgggctcctacattacggccgatggggacagctgggcctcttcaccctcctgttccctcagcctgctggctccggctgaagggctggacttcccctcaggctggggcctgtccccgcaggggtccatggtggatgaacgagagctgcacccagcagggaccccagagcccccgtcctctgagtccagcctctctgcagacagcagctcctcctggggccaggagggccacttcttcgacctggacttcctggccaatgacccaatgatccccgcagccctcctacccttccagggcagcctcatctttcaggtggaggcagtggaggtgacaccgctatccccagaggaagaagaagaggaggctgtggcggatcccgacccaggtggggacctggctggggagggtgaggaggacagcacgtctgcctccttcctgcagtcactgtctgacctgtccatcacggagggcatggacgaggcttttgccttccgggacgacacctctgcagcctcctctgattcagactcagcctcctacgcagaggcagatgatgagaggctgtacagcggggagccccatgcccaggccactttgctccaggacagtgtccagaagacagaggaggagagcggaggtggggccaaggggctgcaggctcaggatgggactgtgtcctgggccgtggaggctgctcctcagacctcagacagaggggcctatctgtcccagagacaggaattgatctcagaagtaacagaagagggccttgctttaggccaggagtccactgccactgtgacccctcacactctgcaggtagccccaggcctccaggtggaggtggctaccagagtgaccccacaggctggggaggaagaaacagactccaccgctggacaagaatctgctgccatggcaatgcctcagccctcccaggagggcatcagcgagatcttaggccaagagtctgtcactgcagaaaaacttccaactccacaggaagaaacaagcctcacattgtgtccagactctcctcagaacttgaaggaagaaggagggctggacctcccctctggcagaaagcctgtagctgcagccacgattgtccccaggcaggctaaagaggacctcaccttaccccaggactccgctatgacaccgcctctgcccctacaagacacagatctctcatcagccccaaagcctgtggctgcagccacgattgtgtcccagcaggctgaagagggcctcaccttaccccaggactccgttatgacaccgcctctgcccctacaagacacagaactctcgtcagccccaaagcctgtggctgcagccacgcttgtgtcccagcaggctgaagagggcctcaccttaccccaggactccgctatgacaccgcctctgcccctacaagacacagatctctcgtcagccccaaagcctgtggctgcagccacgcttgtgtcccagcaggctgaagagggcctcaccttaccccaggactccgctatgacaccgcctctgcccctacaagacacagatctctcgtcagccccaaagcctgtggctgcagccacgcttgtgtcccagcaggctgaagagggcctcaccttaccccaggactccgctatgacaccgcctctgcccctacaagacacagatctctcgtcagccccaaagcctgtggctgcagccacgattgtgtcccagcaggctgaagagggcctcaccttaccccaggactccgctatgacaccgcctctgcccctacaagacacagatctctcgtcagccccaaagcctgtggctgcagccacgattgtgtcccagcaggctgaagagggcctcaccttaccccaggactccgctatgacaccgcctctgcccctacaagacacagatctctcgtcagccccaaagcctgtggctgcagccacgcctgtgtcccagcaggctgaagagggcctcaccttaccccaggactccgctatgacaccgcctctgcccctacaagacacagatctctcgtcagccccaaagcctgtggctgcagccacgcctgtgtcccagcaggctgaagagggcctcaccttaccccaggactccgctatgacagcacctctgcctctgcaagacacaggccccacctcaggtccagagcctctggctgtggccacccctcaaaccttgcaggcagaagcaggctgtgccccagggacagagcctgtggccaccatggctcagcaggaagtaggtgaggccttaggccccaggccagcacctgaggagaagaatgcagccctccctacagtcccggagcctgcagccttggaccaggtccaacaggatgacccacagccagctgcagaagctgggacaccttgggccgcacaggaagatgcggattccactttgggcatggaggccctcagtctccctgagccggcctctggtgctggggaggaaatagcagaagccctttctaggcctggacgggaagcatgtctggaagcgcgagcgcacacaggtgatggggctaagcctgactcaccccaaaaggagaccctggaggttgagaaccagcaggaaggaggcctgaagccactggcacaggaacatggacccaggtcagcacttggaggtgcaagggaggtccccgatgcgcctcctgctgcctgccctgaggtcagccaggcccggctcctgagcccagccagggaggaaagaggcctgagtggcaagtccaccccggagcccacgcttccctcagctgtggccacagaggccagtctggactcctgcccagagtcttcagtaggggctgtgtccagtctggacagaggctgccctgacgcgcctgcccccacgtctgcaccaacctcccagcagccggagcctgtactgggtctgggcagtgttgagcaaccccacgaagtacccagtgtccttggcacccccttgctgcagcccccagaaaaccttgccaagggtcagcccagcacgcccgtggacaggcccctgggccctgacccttctgctcctggtacccttgctggggcagccctacccccactggagcccccagccccctgcctgtgccaggacccccaggaagactctgtggaagacgaggagcccccaggctctctgggcctcccaccgccccaggcaggagtccagcctgccgctgctgctgtctcaggaaccacacagcctctggggactgggccgcgagtcagcctctcgcctcactccccactcctcagccccaaggtggcctccatggatgccaaagacctggccttgcagatcttgccgccttgccaagtgcctcctccctctgggccccagagcccagctggccctcaagggctctcagcccccgagcagcaagaggatgaggacagcctggaggaagactcgcctcgggccctgggctcgggccagcattcggatagccacggggagtcatcagccgagctggacgagcaggacatcttggctcctcagaccgtgcagtgtccagcccaggccccagcaggcggcagtgaggagaccatcgccaaagccaagcagagtcgcagtgagaagaaggcccgaaaggcaatgtcaaagctgggcttgcggcagattcagggagtcaccaggatcaccatccagaagtccaagaacatcctctttgtcatcgccaagcctgatgtcttcaagagcccagcctcagacacttatgtggtctttggcgaggccaagattgaggacctgtcccagcaagtgcacaaagccgcagctgagaagtttaaggtgccctcagagccctcagccttggtccctgagtcagcacccaggccccgggtgaggctggagtgcaaggaagaggaagaggaggaggaggaagaggtggacgaggcggggctggaactgcgtgacattgagctggtgatggcgcaggccaatgtgtccagggccaaggccgtgcgggctctgagagacaaccacagtgacatcgtcaacgccatcatggaactgaccatgtagccactgaccggaagctggagccatcctacgccttccctcagctctgctactcaataaatcggtgtcccttca

SEQ ID NO: 391288 - DNA, 4798 bp, Homo sapiens
  misc_feature (4655)..(4655): n is a, c, g, or t
  misc_feature (4664)..(4664): n is a, c, g, or t
  misc_feature (4674)..(4674): n is a, c, g, or t
  misc_feature (4684)..(4684): n is a, c, g, or t
  misc_feature (4688)..(4688): n is a, c, g, or t
  misc_feature (4697)..(4697): n is a, c, g, or t
  misc_feature (4700)..(4700): n is a, c, g, or t
  misc_feature (4703)..(4703): n is a, c, g, or t
  misc_feature (4707)..(4707): n is a, c, g, or t
  misc_feature (4715)..(4715): n is a, c, g, or t
  misc_feature (4725)..(4725): n is a, c, g, or t
  misc_feature (4727)..(4727): n is a, c, g, or t
gggagccctgtgctctgaccccagggcccagccacctggccctcacgttcctgcccagcaagccgggtgcccggccccagcccgagggagccagctgggatgcagggcctggtggggcaccctcggcctgggcggacccaggggagggcggcccaagccccatgctcctccctgagggcctgtcttcccaggctctgtccacggaggctcctctcccggccaccctggagccccggattgtgatgggagaggagacgtgccaggccctcctgtcacccagagctgcccggacagcgctcagggaccaggagggtgggcacgcaagcccagacccaccccccgagctgtgttctcagggtgatctttctgtgccttcccctcccccagaccctgattccttcttcacgcctccctccacccccaccaagaccacctatgccctgcttcctgcctgtgggccccacggggacgccagggactcagaggctgagctgcgggatgagctgctggactcgccccccgcctcaccctcgggctcctacattacggccgatggggacagctgggcctcttcaccctcctgttccctcagcctgctggctccggctgaagggctggacttcccctcaggctggggcctgtccccgcaggggtccatggtggatgaacgagagctgcacccagcagggaccccagagcccccgtcctctgagtccagcctctctgcagacagcagctcctcctggggccaggagggccacttcttcgacctggacttcctggccaatgacccaatgatccccgcagccctcctacccttccagggcagcctcatctttcaggtggaggcagtggaggtgacaccgctatccccagaggaagaagaagaggaggctgtggcggatcccgacccaggtggggacctggctggggagggtgaggaggacagcacgtctgcctccttcctgcagtcactgtctgacctgtccatcacggagggcatggacgaggcttttgccttccgggacgacacctctgcagcctcctctgattcagactcagcctcctacgcagaggcagatgatgagaggctgtacagcggggagccccatgcccaggccactttgctccaggacagtgtccagaagacagaggaggagagcggaggtggggccaaggggctgcaggctcaggatgggactgtgtcctgggccgtggaggctgctcctcagacctcagacagaggggcctatctgtcccagagacaggaattgatctcagaagtaacagaagagggccttgctttaggccaggagtccactgccactgtgacccctcacactctgcaggtagccccaggcctccaggtggaggtggctaccagagtgaccccacaggctggggaggaagaaacagactccaccgctggacaagaatctgctgccatggcaatgcctcagccctcccaggagggcatcagcgagatcttaggccaagagtctgtcactgcagaaaaacttccaactccacaggaagaaacaagcctcacattgtgtccagactctcctcagaacttgaaggaagaaggagggctggacctcccctctggcagaaagcctgtagctgcagccacgattgtccccaggcaggctaaagaggacctcaccttaccccaggactccgctatgacaccgcctctgcccctacaagacacagatctctcatcagccccaaagcctgtggctgcagccacgattgtgtcccagcaggctgaagagggcctcaccttaccccaggactccgttatgacaccgcctctgcccctacaagacacagaactctcgtcagccccaaagcctgtggctgcagccacgcttgtgtcccagcaggctgaagagggcctcaccttaccccaggactccgctatgacaccgcctctgcccctacaagacacagatctctcgtcagccccaaagcctgtggctgcagccacgcttgtgtcccagcaggctgaagagggcctcaccttaccccaggactccgctatgacaccgcctctgcccctacaagacacagatctctcgtcagccccaaagcctgtggctgcagccacgcttgtgtcccagcaggctgaagagggcctcaccttaccccaggactccgctatgacaccgcctctgcccctacaagacacagatctctcgtcagccccaaagcctgtggctgcagccacgattgtgtcccagcaggctgaagagggcctcaccttaccccaggactccgctatgacaccgcctctgcccctacaagacacagatctctcgtcagccccaaagcctgtggctgcagccacgattgtgtcccagcaggctgaagagggcctcaccttaccccaggactccgctatgacaccgcctctgcccctacaagacacagatctctcgtcagccccaaagcctgtggctgcagccacgcctgtgtcccagcaggctgaagagggcctcaccttaccccaggactccgctatgacaccgcctctgcccctacaagacacagatctctcgtcagccccaaagcctgtggctgcagccacgcctgtgtcccagcaggctgaagagggcctcaccttaccccaggactccgctatgacagcacctctgcctctgcaagacacaggccccacctcaggtccagagcctctggctgtggccacccctcaaaccttgcaggcagaagcaggctgtgccccagggacagagcctgtggccaccatggctcagcaggaagtaggtgaggccttaggccccaggccagcacctgaggagaagaatgcagccctccctacagtcccggagcctgcagccttggaccaggtccaacaggatgacccacagccagctgcagaagctgggacaccttgggccgcacaggaagatgcggattccactttgggcatggaggccctcagtctccctgagccggcctctggtgctggggaggaaatagcagaagccctttctaggcctggacgggaagcatgtctggaagcgcgagcgcacacaggtgatggggctaagcctgactcaccccaaaaggagaccctggaggttgagaaccagcaggaaggaggcctgaagccactggcacaggaacatggacccaggtcagcacttggaggtgcaagggaggtccccgatgcgcctcctgctgcctgccctgaggtcagccaggcccggctcctgagcccagccagggaggaaagaggcctgagtggcaagtccaccccggagcccacgcttccctcagctgtggccacagaggccagtctggactcctgcccagagtcttcagtaggggctgtgtccagtctggacagaggctgccctgacgcgcctgcccccacgtctgcaccaacctcccagcagccggagcctgtactgggtctgggcagtgttgagcaaccccacgaagtacccagtgtccttggcacccccttgctgcagcccccagaaaaccttgccaagggtcagcccagcacgcccgtggacaggcccctgggccctgacccttctgctcctggtacccttgctggggcagccctacccccactggagcccccagccccctgcctgtgccaggacccccaggaagactctgtggaagacgaggagcccccaggctctctgggcctcccaccgccccaggcaggagtccagcctgccgctgctgctgtctcaggaaccacacagcctctggggactgggccgcgagtcagcctctcgcctcactccccactcctcagccccaaggtggcctccatggatgccaaagacctggccttgcagatcttgccgccttgccaagtgcctcctccctctgggccccagagcccagctggccctcaagggctctcagcccccgagcagcaagaggatgaggacagcctggaggaagactcgcctcgggccctgggctcgggccagcattcggatagccacggggagtcatcagccgagctggacgagcaggacatcttggctcctcagaccgtgcagtgtccagcccaggccccagcaggcggcagtgaggagaccatcgccaaagccaagcagagtcgcagtgagaagaaggcccgaaaggcaatgtcaaagctgggcttgcggcagattcagggagtcaccaggatcaccatccagaagtccaagaacatcctctttgtcatcgccaagcctgatgtcttcaagagcccagcctcagacacttatgtggtctttggcgaggccaagattgaggacctgtcccagcaagtgcacaaagccgcagctgagaagtttaaggtgccctcagagccctcagccttggtccctgagtcagcacccaggccccgggtgaggctggagtgcaaggaagaggaagaggaggaggaggaagaggtggacgaggcggggctggaactgcgtgacattgagctggtgatggcgcaggccaatgtgtccagggccaaggccgtgcgggctctgagagacaaccacagtgacatcgtcaacgccatcatggaactgaccatgtagccactgaccggaagctggagccatcctacgccttccctcagctctgctactcaataaatcggtgtcccttcaaaaaaaaaaaanaaaactcgnggggggcccngtacccattngccntatatgagnctnttncatnacttgccntcctttacancntcttaatgggaaaaccctgccttacccacttattcgcctggatacatcccctttaccaacttcgtattcca

SEQ ID NO: 391289 - DNA, 908 bp, Homo sapiens
gtttacacttcagttaggcttcatcggaaaccgaaatggccaagcagaaagatttagaatcttaggctggagaaaggaaagggctctttgtccaccctgggtctgtggagcattggagaagcaagaggcctgcctcagctcggcatcagaatttcctaatgaaatcttccttggaaactgagactgtgatgcaggcgggagcaccgctgctctgatggagccaaggaaggtgatttgtacctgcccagttccagctgagggggcccctccatcccagcacctgacatctcacccctcagcatctcttgctgacttctgagctgattgctttctgccaggctaaagcagctcccctggcctgctgtggggaggctaactcccttttttggaaatctggctgcagcccaggctgtgtgaggtgtggcagaaaatggggtctgcccagcgtgggggacccactcgtggctccccatcagcttccttgactctcaccccaggggtgcctcctgcgttcatcttcccaggctcttggactgggctaggaagctgtccctctccctgcgggcagtgtgtgcccctgctgctgccctgcctcaacacgtgcactttccacccttcccttcctcccaagcttactcaggtgctgactccttccccaggaagtgctccactcactgacagtgccgttggtcaggggctgccttgaggttggtgactgcccccaggaggcccaagggtggacatctgggtctccaagaacccctggacctgaactatgacattttgtgcatgtgaggctgagtccatggaaatggctttcagcagattctcaaagggagcccgacctcaaaaaggttgaggagccctggtgcagactgtgctggttgtcaatgtgcagagtaactgtg

SEQ ID NO: 391290 - DNA, 367 bp, Homo sapiens
gacagctggggtgcccaagagaactgctattggtttcaggtttaaaataaacctgaatctctacgtaattcaacattatgatttggtacttaatgcaaaagtaagccttcaactcaacatataactggagaagaaaaatttaattccagaagctttccatctcatataggttattactctgccagagtaaggatttactttctcaagcagttggaattcccaagcatactgaagcaagttatagatagcctgaaaagcaatgtgaaaagcaatgcttcatctctgaagcaaaatttcctttcagctttacaatcaatgatgctatcagtgacatggtttttaaattctcgttgagaaaatttaaagg

SEQ ID NO: 391291 - DNA, 135 bp, Homo sapiens
gataagtcatgggaggtgagaaaacggtgagtttaaggaaaagaacagtatcttcaaaatggtaaagctgaggggaacgtgccagaagcttcaggaagatggagtatgcccagacaacaaggaccatggctttag

SEQ ID NO: 391292 - DNA, 311 bp, Homo sapiens
tcaggaatggattactgatgttaatcagaagatgcttatttgtaaaatcctcagaggagtggctggcacagcaaatgtgttggctattacaagcagcaatagtagttaatacttttaaagactgatggaccagatacaaacccaaggctacaaaggggcgagggaaggagcctggatctccttacctggttgtctagaatgcgccagctgcccgggagatgaaaattacaaggttgtgggaagtggtttgaaataatttgattatggcataatttttataatttagaatgataattaaggggtataaactt

SEQ ID NO: 391293 - DNA, 252 bp, Homo sapiens
ctcttcttttccatgtgtctttttgatcagctacagcctgtgttcttgatccatagttcttcatctgtgtgtgagtagtaggaactaagaagatagccttaaaaaaaaattgcctcctatgcaaaacttatactctgaaaactacagaacattattgaaagaaataaggaaggcctaaatgaatggaaacatatccagtgttcatggattggacaacttaatatgattaagatggcaatgctccccaaattg

SEQ ID NO: 391294 - DNA, 522 bp, Homo sapiens
tacaactctggaggctgggaagtcccaaggttgaggggactgcattttgcgggggccttcttgctgcgtcattccatggtggaaggtggaagggcagcagagagtacatgtgcatgcaagggtaggagggagagagagaggaagggcaggagagagaaggaaaaggggctgaactcatccttttatcaggaacccactcctgtgataaccagcccactcccaaaataatggcgttaatccattcaagatggcagacccctttgacctatttacctcctaaaagccccacctctcaacactgttgcattgaagattaagtttccaacatatgaactttgaggacacagcccaatcatagccctggagagggttgggtcttgtggaggggagaggcagctctaggggaggcagctgggggttgccctggcctgtgtaccagacagagccctggctcccagccaaaccctcagctggacactgggtgcattctcatccttcacttatcaccagagcgaggaagga

SEQ ID NO: 391295 - DNA, 502 bp, Homo sapiens
agggaaagtctgggcaatagatcctaggggaggaaaggagcccccggactctgtgttggtagatcctggttcctccttcactgagctctctaagctcatgtggcagctggatgtggtcactacacgtggtttacagctggatggaaaccaaagcacttagagctagatttggggggcccagttaggaggctccctcagaggagctgagtactgagggaatggctgatgttcctagaaagaggtgtaaccaccggccccggagaaaaggtcacagccggtgtggattatcaaagggtgagaggagtcttaaaagggagacattagactccctgctaataaggcctgtggagatttggatgattgattagaagaagaagagacaatgggattcacacttacatttacaaagcagttctgaccagttatactatgattaaacatgctgcctgcctccccatgcatgaggagccgaatatgtattccaaggcaagacaaggacaat

SEQ ID NO: 391296 - DNA, 426 bp, Homo sapiens
gttcccctgagcacaggcctgagaatacttgtggggatggcagccccctgcaggtgtggctggacctgggtagagctggtgagggaagcacgatgcctggacctgctaatggttacgggcctggctgtgaaggcccatctgggcagcgtatccaccccatggagcagccacgtttcggtgacattccaacactggcctgatggtgggaacctgctgagggcccacagccctgccccttggcactcaaggtcccagctgtccctcattaggacccggtgtccattagtcagactgttggtcataggcttccccagcagccctaatgtgcctgtaattagccactgacattttctgtcaccacactactaatactgtatattagagaagcacagacagataagtcaggaatatcagtcactgtaggaa

SEQ ID NO: 391297 - DNA, 359 bp, Homo sapiens
caccaccaccaacaaaaagataaacacaagatataatctgtgtaatcactttcttgtaaaaccagatggttttactacccaagactttctcctatgtcattctagaaaaggatttttccaagaaaactagctataacccacatatcaaaataatacatattctcatattctctctcttacacacacatatatacacaccccacctccaaacccacacccatctttgaatattgtttccctcctgcttaaccttttcagatggagaatctggatttagacaggagagcttcctctccacctctttgcctctccaggaatccacacccatctttgaatattgtttccctcctgcttaacct

SEQ ID NO: 391298 - DNA, 608 bp, Homo sapiens
tatttatttatttatttatttatttatttattgagatggagtattgctttgtcatccaggctggagtgcagtggcatgatctcggctcgctgcaacctctgcctcccgggttcaagcgattcttgtgcctcagcctcccaagtagctgggattataggtgcctgccaccacgcctggctaattttttttaaatttttagtagagacagagttttgccatgttggccaggttcgtctcgaactcctaacctcaggtgatccacctgccttggcctcccaaagtgctgggattacagccgtgagccactgcgcccggccaaagttaaataaaatttaagatgcagttcctcagtcacattagccctatttccagtgcttagtggccacaggtggctgctgtattggacagcacaaatatagaacatttccatccttatagaaagttcaaaattagccgggcatggtggtgcttgcctgcagtccagctactcgggaggctgaggtggggaggtcgcttgagcgcgggaggtcaaggctgctgcagtgagctgtgattgcaccactgcactccagcctgggtgacagagcgagaccctgtctctaaacaag

SEQ ID NO: 391299 - DNA, 613 bp, Homo sapiens
cagggccattgatggggagtgggtaggggcgctggcctggaactatgaaagggggccagagaattgagggagctgtcccagcggggcaaagcccccggagcctctgtggggccagagttagggagaggttaaggcattcagcggtagcctgggcaggaacagttcctggctcattcttagccatccaagagtttcgctcggtggccacaacaggacaagcctcccatctgtctcagctcccctcccttccctggggaagggccatggaatagccacaatcagaaccctttgtgggccaccgagcacagccctcagagtcaggtttaaaagaggcagcgcagtgtgggggaaggaggcgaggggctggtgggcagagaggtgatatctgggatctgtggtggagggagtgtgtcagtcactcggggatgtttatctcacgcctgctgctggcagagctccgagctggaacgtgtctgtgtctctgcacaggtctggtggggaaataggaacaggctgtttaaccaacaaacaagtagtcctgttatacacagacacacacacacacacccatacacacaatcaaacaggctgtctcaccctgggtaccgagctc

SEQ ID NO: 391300 - DNA, 479 bp, Homo sapiens
tgatatatatacccagacacaaaactttttatcaactgaatagccagttgtggattttgagcaataaatggggggggggggggaactactttaaaaacattaagccatgagtttattcaatctgtatctttgtcttctagtaagtaaatttgctttcattgttaaacagcagcaacaaagggacaccaaagatctttgcataccttacttggttgtaaactttttgaagtcaaaggtaatttttctaacttctttgcagtagctaaaacttacatagcagcctctttaagcagggaaaattattgtaaagaaattgctcttagataactttccactcaagggttttaagctttttgttttgtttgtaaaatcttttacgatgagcactttgtaagtctactagttagctcaaagcagttctccttgaggacccacatctactccaggctgggagacagagcgagacaccatcacttaaa

SEQ ID NO: 391301 - DNA, 124 bp, Homo sapiens
ggtccagctatgtacaaactgaatcaagattctatgtacatcagaatcaagagagagtgagttcttgacatcacggagcggtctacattctagttcatgcggtggacctgctgggtggcctcag

SEQ ID NO: 391302 - DNA, 368 bp, Homo sapiens
ctgcccagcaatggctccccatttcactcagaatgaaaatcaaagtgctcacaatgccctcaagtcccccatgctgtagccactaatttgttttctggcctgatctcccactatccctgtggacttttctccatccatactggccttccttttgtctttcaagcatgccaggcaatcctccagcttaagacctttgtactggcagttcctgcgcatggaacattcgtctcccagatgtttgcagtgccaactccctcaccttttctctcgcctggttctattcttttttctgttgcatttatgtttacatattgtatattttactgaacttttttgttgatacttacttatggcaccactcacaggaa

SEQ ID NO: 391303 - DNA, 690 bp, Homo sapiens
cgaacatttacattattttcagatttggaaaattttaaagtgctgctgtgaacatttttgcatatgtattctattctgtgctatataagcatgcatttctataggatataaacctaggaattgctgggtcataggatatgcacattttcaattttagcataatagatgatgccaaacttttttcatcagccctgtaagaaagctccctttgctccacatccttgccaatacttggtatttttaatttcactaaaatttaatctcaattaagagacttcttaaaatttcggcctttctggggagaagtgtgcagtagtaccttgtgtaattctctgaatactgatgtgacggagcaagttttcacatttactgaatatttgaatttcttcttttataaagtgcacattcaatttttgccccttttcctattgattaactttccttttcttactgatctgtggatattctttgtaattctagctacaaacccttttttgacggaaaatgtatacaattaatttggcaccaggtttacttaactttcaggacaggaaacatagcatattagcattacagcatcaggtatgctaggccatattttagttcctcatgtcagttctaaggtgaaagatcaggtgggtaagtgtggaccactctgccttacaaaacacaggatcttgtagcagccca

SEQ ID NO: 391304 - DNA, 422 bp, Homo sapiens
atcaaggaaagttacccaaaatacagcgacacttatgttcagtctgggattcgctctgttgcccaggctgaagtgcaatggtgcgatcatagcttactgcagcctcaacttcctgggctcaagtgatcctcctgcctcagcctcccaaagtactgggattatagaacctccagcccagactggagtgcagtggcacgaacacagttcactgcagcctcaacctcctgggcttgagtgtccctctcactttaccctcctgagtggctgggactacaggtgtgcaccaccacagccaatttgggggtgatgtgtacacctcaacagagaaatggaatacaattcaagagacccccatgaggcggaaattcgggctgtcccattttccagctgaggacacagaggtgcagaggaggtaagtgact

SEQ ID NO: 391305 - DNA, 311 bp, Homo sapiens
atgggcctctttcatcttcccatcatggccgccgcctgtgcgcctctgctgagtcaccctgcactcattggatcagctgactacctagaccagtaacctggctcaatcagttctgccattccacccaggaacagaaaacagcaagaaaacctcactttgactccctgtgattccgtcttcaacctgaccaatcagcactccccgcttcccaagctcctactcgccaaattatctttaagaactctgatcctcaaatgctcagggagactaatttgtgtaataataaaactctggtctcccacacagctggc

SEQ ID NO: 391306 - DNA, 330 bp, Homo sapiens
atgggcctctttcatcttcccatcatggccgccgcctgtgcgcctctgctgagtctgcttgagatgttttgcagaccctgcactcattggatcagctgactacctagaccagtaacctggctcaatcagttctgccattccacccaggaacagaaaacagcaagaaaacctcactttgactccctgtgattccgtcttcaacctgaccaatcagcactccccgcttcccaagctcctactcgccaaattatctttaagaactctgatcctcaaatgctcagggagactaatttgtgtaataataaaactctggtctcccacacagctggc

SEQ ID NO: 391307 - DNA, 1316 bp, Homo sapiens
atgggcctctttcatcttcccatcatggccgccgcctgtgcgcctctgctgagtcgtatgtatttccctcctgacattttttttcagatgttccagtcactttatggcctcaccaacagaaatgagattaaaaagaatttgtcaaactatctttaataatgccccttcactctgcctgtgacgtattagtgacctctgagctagagtcttgtagtcacttcctggtgacccctgaccccgttgatttccgtccgctaggttgctctcacccatggcgtttgctggttatgagatttgcggaacgtgtggtggtggtaaagggcaccaactgttgtcaacctgcatgtgggggtctgaggtctggctctacagcttgtaaaatggaaataataatgcccagaggatgaaattaggccacataggccgcttggcatcatagtaagcactcagtaaaggtcaattgttattaaccatttttatacagcgcctttgtttaggtgcagagctttatcagagccaaaagatctctgcgctctgttggaaaagatagttcctgcagtaattattagtaccccatttaatggctaagtaattatagctaacagtgctaggatttctttttcatatatgacttcatttgaacttttcagtactatttgttgatttcataatttttcgagcactgctgttgaaactgcctttgcaaaattacaactgaggaaattatgatagtggaagaaatcagacttaaccgactccatcttgcttctaacctttaagctgtccttattcattcctgggtgtaggtggaactaactttggggaggaattcagtttatggtttgaaacaaaattgataatagccccttcccgaaaagacccccttcttgcctggggaccagtctgtctttacaggactaacaaattagctacaagattacaaattacagtttaggggacatgcagcctctcgctccaagagtctgaacctccccaaattgcttttaggaataacataactattgtaaaacctaagattagtgcttgagatgttttgcagaccctgcactcattggatcagctgactacctagaccagtaacctggctcaatcagttctgccattccacccaggaacagaaaacagcaagaaaacctcactttgactccctgtgattccgtcttcaacctgaccaatcagcactccccgcttcccaagctcctactcgccaaattatctttaagaactctgatcctcaaatgctcagggagactaatttgtgtaataataaaactctggtctcccacacagctggc

SEQ ID NO: 391308 - DNA, 1248 bp, Homo sapiens
atgggcctctttcatcttcccatcatggccgccgcctgtgcgcctctgctgagtcgtatgtatttccctcctgacattttttttcagatgttccagtcactttatggcctcaccaacagaaatgagattaaaaagaatttgtcaaactatctttaataatgccccttcactctgcctgtgacgtattagtgacctctgagctagagtcttgtagtcacttcctggtgacccctgaccccgttgatttccgtccgctaggttgctctcacccatggcgtttgctggttatgagatttgcggaacgtgtggtggtggtaaagggcaccaactgttgtcaacctgcatgtgggggtctgaggtctggctctacagcttgtaaaatggaaataataatgcccagaggatgaaattaggccacataggccgcttggcatcatagtaagcactcagtaaaggtcaattgttattaaccatttttatacagcgcctttgtttaggtgcagagctttatcagagccaaaagatctctgcgctctgttggaaaagatagttcctgcagtaattattagtaccccatttaatggctaagtaattatagctaacagtgctaggatttctttttcatatatgacttcatttgaacttttcagtactatttgttgatttcataatttttcgagcactgctgttgaaactgcctttgcaaaattacaactgaggaaattatgatagtggaagaaatcagacttaaccgactccatcttgcttctaacctttaagctgtccttattcattcctgggtgtaggtggaactaactttggggaggaattcagtttatggtttgaaacaaaattgataatagccccttcccgaaaagacccccttcttgcctggggaccagtctgtctttacaggactaacaaattagctacaagattacaaattacagtttaggggacatgcagcctctcgctccaagagtctgaacctccccaaattgcttttaggaataacataactattgtaaaacctaagattagtgcttgagatgttttgcagaccctgcactcattggatcagctgactacctagaccagtaacctggctcaatcagttctgccattccacccaggaacagaaaacagcaagctcctactcgccaaattatctttaagaactctgatcctcaaatgctcagggagactaatttgtgtaataataaaactctggtctcccacacagctggc

SEQ ID NO: 391309 - DNA, 1307 bp, Homo sapiens
ctagctattatgagtaattctaccatgaatatttgtgtataggtttttatgtgacgaggcataatattttttaaaaagctcccctagtaattctgatgtgcagtcaggtttgtgaaccattagtctcaaagatgacagatgactaaacagtatttttaattgagttgacaatcatttggtctgtttgtccactgctttatctgtcacttagggcagagtgtagcatactgtagaccctaattaatatttgttaaagtggaaaagaaaaaccaaactccttcagcttagaaacccaatgaaaagatgtttcttttcataatgaaggcaccatttcactagggattcaagatccatacagaagtgtgctatatctttagaaaaaaaaactttttcagacaatttttccaagtttgtgcctgtcgtcatcatggtgatggtgttggggctggtgaaacactgcccactgcatcaattccagagtaaaaactagattgaatccaaaattttctataaattaatgttgacctttactgagttctgagatcaatattaattactgctgtgctttgtaattataaaagggctatttgatgtttcacaccaaggatatgggtggagagagaaaagaacttgtattaacaccatctgtggtttctaactttgtaattaaggccaattcctctgtggaacattttagttattatatatcatgattattcggtctattaatatccagggaagtaccacagtttgagagccattcattctggtttacttggggagtcctattctatacctgttttgctggcataattattaaaagcctctttaactcaaaagtgtcctgttttggataataactcatacagttaccccaattataggtgctattccatgagcacagttactgacttgctacattttaaatgtcatctaaaaaatttttcatttttttcttacccattggatgaaccagtttttcccctaaagacctgccagttgtttttgcctgttcttgataagtgctttgtattgtggcatttagaagctacagctctgctaattggtgtgttagagctttactacttaatctgttgttgaggctaaatccccaaagataacatgtcatctgcctcttctccacgaaatcatggtgaggaatgtgcacctacatgactttgtgagacacgcagcaagactgtcttcttgcagaaataattattcctcaggaggaggaattgcctctggttcttttgtcctttgctcagatcctctcttcattgcctttggctatcttttttttattt

SEQ ID NO: 391310 - DNA, 311 bp, Homo sapiens
acaagtaatatccaatatatgccaaggtacaatacaaaccagaaatttcagccactgctgatgggaaggtaaattgtacaggtctcataagtatttatttgaaatgcttgggactggaagtgttttggatttcagattttttcagattttggtatatttgcacatacataataagatatcttgggccagatgcggtggtttatgcctgtaatcccagcactttggaaggccaaggtgggcagatcacttgaggtcaggagttcgagaccagcctggccaacatggtgaaactcccgtctctactaaaaata

SEQ ID NO: 391311 - DNA, 345 bp, Homo sapiens
agataatctagtattagtttcgtaattactagctagctgcacagcttagttaccctaaacataagtttgttcattttgtaaaatgtataatttcagctgtcccacctgagtcatggtgggtggtagtctgcaaagtctcttctaagtggtaaagcttagtcaaatgtgaggtattatcactggatcttggtgtcattaaggccatttagattatctttacttgtggcccctttatccaacaagggcacagacccagaagggtgtttagacttctgtcatgaagtagagtcattagctggaacttatgcttcccttactaacagtgcaggctggaggaatctgatg

SEQ ID NO: 391312 - DNA, 644 bp, Homo sapiens
agtcaacctttcaattcacccttaatccatccgtgatttccttcatttatcacaataattcactcatttattcacctctgatctacttatcattcaatccagcctttcatttactcctttatttactcatacttcactaatttaattattcacttgctcttccataaatctagccattcatgtgattattcattaattgggttcattgatttctttgtctatggatcattcattagtgattaattaatcaatccatctattaattgataagtaaatacagacatccatttattggtttgttcatttattcatcaatctttccatccatgaattgatctattgattgattgattgatgtttttatccagttgttcatgaattcatctattgttctattacactgttatatacctgaggaccaagaatagtgtctcaactatattataaacacaataaatattagttcattttctactcatcttagagagggtgttttgagaggtttgtagcctggagttcttaatctgaaattccatgcaaaatcgtggtgtgtgtgtgcatgtgtgtgtgtgtacctgggcatgtgggaagaggatctgtaatattcattagatttcaagcagtgagaattcttgttgcttcct

SEQ ID NO: 391313 - DNA, 358 bp, Homo sapiens
gagcgtttgcatacacttcgtgtctgaaaacttccaggattcccaagattcatttcacaaagacttttctcgtaggacaggtatttgaaacatctggttaacaagtacccagcttgaagaaagcctggatcttcacagcacgctcagtttgtagaagagaaaaaccctactctgggctctaatttgcttcagctccattaaacacatcctgagccctgctgtgtgccagacgctgtgctgaatacctggcaccagaagaccaatcgggcccagggcttctccccaaggagcttcctggccaggcggagacacccctggaatagaccatttaggagcctgaggcctgcatgtagcattt

SEQ ID NO: 391314 - DNA, 894 bp, Homo sapiens
agatttttttttttaaatatcattttaaggcagttaatgtttttcctactacaggagtcatggatcttattcccagatactgaataaaaaattctgtcagttggggtggctcacgcctgtaatcccagccactcaggaggctgagacagggggatcacttcggggcaggagttcaagatcagcctggacaacatagcaagaccccatttctttaaagaaaaagtttttaaaaattagctgggtgtgctggtatgcacctgtatactcccagctgcttgggaagctgaggcaggaagaacctaggagtttgaggatgtagtgagctatgatcacatcactgcatctgcctgggtaacagagtaagaccctgtctcttaaaaaagaaattcgttagcactggcagttttaaaatgtgagccatgtctttcaaggaagaatacctcttatatttatgtatacaattaggaaaacccagcacacgcatgtaatatgtgttttgaggaagtatatgcagatttccaagtcagtttcttgggttagtagttactctgttggcaaaattaaatgcaaattgttgttgtgctcctttgaagtgtctaaagtatatatgacctcaagtggaaggatgactttttcctacttactctgattctaggactcttcagacttttctgattgttttattatctttttgtgttgtcagggtattagttcctctgactatgaatgaaatctcacatgagggtttttttccctcccttagagtcttaaaaagtttttaatttcatttgagttggttgcaagtgtttggctttttgtatttcagaaactttattgacataaactgaatatgtactgtatttttatttgaactgtcttgttacttagtatagt

SEQ ID NO: 391315 - DNA, 593 bp, Homo sapiens
gattgttatgagtcccagagcaaaagttcaatcctctttcacatttctcaactcacctcagcccaaacaggaagaattagtggctcccttgtgttgcccacagccccagaaccctttgcacgtcgctccaggattgcaccgtaaccccagttatgatgctgattctttaatccactgtctcctgctcctgcgctgggggctgctcttcccccacggtatcatataatctttctgacccaattcctcaatttctcagtaactggtttccaattactcagataatggggagggctgtgtggccaccgccctctaggaacctcagtttccttgtctttaaagcaagaagcctcgcgatcccagcactagcacccagctcttgcacacttgctcggtgccaggctctactctaagcacttcacatgcactgagttgctcaattctcacaatagtctgagacggggactcatgagaggcacagggtggttaaataacatgtcacagtctcacaacttcacactcactcttagcagtacctagccagtgacactcaataaatgtcagctattgtatttccctatacttactattcttat

SEQ ID NO: 391316 - DNA, 475 bp, Homo sapiens
cacattaacttggtgtactgtttcataagactcttacaaagtcatcctaattaaagacatgttaaatataagaaaaaggctttagaatcgataaaatacacagtatgtaggttttaaaaaagctatttgtaatactatatctcaaactacctttttccatttttggaacacttgggttggaacacagaaccctaaatgttaacgctttctttattgtaactataaggcagtggttctaaaatgttgctgcacaatgaaatcacctagagatattttaaaaataaagatgcctggctccctttcccaaacactgacttaattggtatggagtaggagctaagacacaggcttatgaaaagcttcccagctatttctaatgtgaggcaaagtaaccacgggattcaagtgaattaatgtcctacaattcagaaataatttacagattatatagattagtatttttcctttttgggca

SEQ ID NO: 391317 - DNA, 371 bp, Homo sapiens
cgagaccaccctgggcaacaaagcaagaccccatcgctacaaggataaaaattaactgggcgtggtggcatgtgcctgtagtggtcccagccactcagaaggctgaggcaggaggatcccttgagctcaggaatttgaggctgctgtgagttatgattgcaccactgcactccaacctggatgacagatcaagaccttgtcttaaagaaactctggatggtgattttttctagagaggatataattttctggcaggcagatggggtacagttggatcaaggttgatctatttctgctttgcctttattcctagaaaatatccctagggtctcagctgagagcctatggtgtttaccaggccccttcaaccc

SEQ ID NO: 391318 - DNA, 232 bp, Homo sapiens
ccagtttctgtcaattggaatgtatttctgttaatgtcttttacttgggaatttaatgccttttccatcttaaatcacgtactgtggccataacttttgcagtttgaagtatgacagcaaaactagcatgaatttatttttccttcacaatttgatgtatagaagattttttttaaaaccatagatcttagcaacttcaacatacgattttttttccttccttattaagtca

SEQ ID NO: 391319 - DNA, 744 bp, Homo sapiens
agcggtctttcgatagtggagctctgaaggcatctttttcctgggcactggcagaaggagctttcaattatactgtgatggctttgagcgactcttcagagctgacctgcagtacaactttcagttcctgcaccatctcttccctccagtgtggaactgaatacttgatttcagttttagcaagtaatgatgctggatctagcaaatcatcttcagcaatgaccctgaaaactgttgcttgtgcacccggaagagtgacgatccaagaagatccccctggccacctgtctgtggcttggtccagtgtagatctgggtgactactatgtggtctttgtgaagagtgatgatggcttggaagtacactgcaacacatctctcactcagtgcaacttcttatctgagtgtggcttcacttattttattagtgtttttgcctataacaaggcagggcaaagtcctttgggtgacatattcaattataccacagctccctgttgtcctagtgacattaaccccgtgttggtgtccagtgacagagttgagattgtctggtctcctgtccgtggtgccgaactgtatgaaaccaagggctgtagatgggtacaacatggttgagtgcaatgacactactcctgcgtgcaccctttcggctctagagtgtgacaccaagtacaacatcacagtgtattcattcaatgaagtccgaggcagcaatatgtcatgtactccccagttcataacc

SEQ ID NO: 391320 - DNA, 382 bp, Homo sapiens
aaacttgaaaccctctcatacttggcatagcactgtgcaattatatatttatataggcataataaggaaacaacatttatatagacataataatgaaaacattgagtatgcatataaccaaaaattctgaaataacgacattgagagtgatatgcagagaatggaggtaggggattagtacgggatataagaactaatgtgctcatataccccaatgagaatagacaaaggggatgaatcaagagacaatagtatatggatattatttagaaatatggtgacaaatagcaaaattattgctgctacaaaagctgacttggggtaaggtcatgctggggggactctgatatttgttcatatctgttagtactacttgactttt

SEQ ID NO: 391321 - DNA, 286 bp, Homo sapiens
tgaataggagtttgctagaaagagaaatcagaggaaacagcatatgcacaggctcagaggctggaagcacatagtctggtgcaaagtaggtccttgagaaaaccctggaggccgggtgcagtggctcattcctgcaaccccaacactgtgggaggctgaggcaggaggattgcttgatcccaggagtttgagaccagcctgggcaacatggcaaaatctacctctacaaaaaatattaaaatgttagccagacatggtggtgcacacctgtggtcccagctactcg

SEQ ID NO: 391322 - DNA, 214 bp, Homo sapiens
tagtagagacagagttccaccatgttggcctggatgatcttgatctcttgacctcgtgatccatccaccttggcctcctgaagtgctgggattacaggcgtgagccactgtgcccagcctctaactgctttctttagggagaagttggcactcaaaaactctgtttagacagttgtaaaaaaataaaaaataaacacttatctgaaatattcta

SEQ ID NO: 391323 - DNA, 957 bp, Homo sapiens
cttgactcatcaatgtactaagacttgagtagaaaggcatctcaagtgccagggacagaaagccccagaggtagaaaaatgtatgcttgtacgatgaacagcaaataaaccagtaagtatgggtgagaggagtggaagacgaagctggagcgataaactgggagctctctgtgaagctgtagggagtttggattttattgggcgggaaatggagcatcatggaaagcctgagttggggtaggggaggaaatattcaaggcagcgatttctgacaaatagtctagtggtgatatactgggtgaattgaagaggaaagaatgactggaggtggaaagaccacttaggaggcagttgcaataattcaggcatgatgttctatgagcctcaaccagggtaatgggagagaagaggcaaaggatgaatgaaaggaagctgacagaactgtaggcagaagggggaaggcagcattaaatacaactctgaggcctcccagccatgggtgacttaggaaaaggatcgtcccattagaccatagaaatagaccatttagaaggaagaactggttgtagggtgttttgatgaaggccagcaaagcatctcagatgatttgtatgtttatagaatgagaagacaataaaacatttttaaaagtcagagaggacaagagagttcagaggatactgtgatccaaattaaggaagacaataattttaaagatgtcaaaattgcagaatagtcaaaggcaatgagaagcaaaaaaatagtcactggattaaacaatagggtcatcaggaaacagtaggaagaaggcaaatggtagagaaaaagcagtgcagaaattaaaggagagagggtcggtcaactgttttatagggaaatttggtactgaaggaaggagactagtagtttcctgggagtttcagggaataagaaaacccagaggaaggttgaattggg

SEQ ID NO: 391324 - DNA, 234 bp, Homo sapiens
atgaagtgtcacgttggaaggcaggatgctttgtgccccttccagcaagctaacttccaaataaattctctatttttatatcagaccttgttcttgttaattagactttacatgaagtgagcaactaagcttttctgttacaagacttcatgcccacagatacattcaagtcccaggtggaaggatgatctagatcaggcaaggtgctgaccatgggaacaggagacagtcaag

SEQ ID NO: 391325 - DNA, 306 bp, Homo sapiens
ggaatattaataggaaaattaagaagcgggcagaggaaatggaggcttggtaacctggctacctgcccagcaacccaggctagtgtaatgtgaactgcagctcagcagagttgtaagaggtaaaatgggcatttgtgggctatcttaggaatctagacactattttccttatggagaaatgcatttcaagtacatgtggagtaagaattggtttttaaatgaattttgttccttgaaagatggtgctgcctacgtgtcattccttaaatttgttggtaaggctttttgatgtaaagtcaccccatg

SEQ ID NO: 391326 - DNA, 240 bp, Homo sapiens
atgagttattatgaaggtgcttagaataatgcctaatccataatctgcacttaataaatgatgctgttgagggaatgggtgttgtctcagagcaggtaggagctcgccatgttatctgtccttatttcattgtctgccacaggctttggggtcagaaggctcttgttccacattggttctccaagcatgcacattttaccttataaaatttacttaaactttctgagactcagtttcctc

SEQ ID NO: 391327 - DNA, 527 bp, Homo sapiens
ggctgcagtccaggcaggccccacccagtaccccacttttccttcttgctccctgcagtggctctcccccggcattgtcgcttcaggattttacaactcaaattcccacatggcgtcccggcctgggtgtctgtgggggtcctgagcccgggcacccctctttcctccatacttgcccacagcagctctttccatttcctgccgcagcctctggagacaccacacgccacggatttggggcagatgttggacagggcctccaacactcaggcttaccaccctgttaggggaatgtgagccagagagggtgagcagctcagcttgaggtcacacagccagatggaggcaattaggttcgagccatagtcggctgcatgccaccctcctggtcctagctctggccattgtctacagggccccacaggccccctacctccccttagagggcagagaggaaactggctgtgcccccatctacagaggcagggctggcccgcaggtcctgggcccaggaactggggggctcc

SEQ ID NO: 391328 - DNA, 258 bp, Homo sapiens
tgctgggattataggcatgagccactgcacctggccctgcggcattttttgatatgggatgatgtgtatcatttaaaatctgacttcaactgatttgggcaatatttcttagccatagacaaagaatgagtctgttgtgtgaagatgcctggttgagtgttataggagtcaggataaggtcacatttactttattggatgttttattccatatcttgactcaaagaaggcaaagggcaagataatgaaatccattggt

SEQ ID NO: 391329 - DNA, 605 bp, Homo sapiens
gtgttggcatgtatctggctgggctgcacatatatttgatattcttagataataggagtaaatagaactgtttagaagttctaaagagaggtttcagaatatctaagaggcaaaatattctgcacccagaatgtgccctaatacccagaaaaatgtgtcctagaattgactctgagtgtgtctgaacaataacaaaacttggcagtccttaagcgtaggttaatcccttttagtatttgtgcttttaataccttaggcatctcctcttatcacaaattaataagtattagtgttttatataaggctgctttccccagtcatgtctgaactccataatgggatccagaagtgtatggattatctggttttcactcagcagtggctctttgacacctctcaatgcatggtaccaaaaaaaaaggtccatatagtcagggcacggtggcacataccttataatctcagctactcagggggcttaggcaagagaatcacttgagtctaggagttcgtggctgcagtgagctgtgatcatgctaccacatttcagcctgggtaatggagcaagaccctgtctcttatgaaaaaaaaaaaaagaaagaaaa

SEQ ID NO: 391330 - DNA, 243 bp, Homo sapiens
cagagcatggtgagagtaggagcaagagcaaggcagagggataccacacacttttaaacaacatgatctcacgagaactcactatcacaaggacagaaccaagaggatgacgataagccattcatgagaaatctacccccacgatccagtcacctcccaacaggcccacctccaacatagaagattacatttcaatgtgagatttggaaggaacatctaaatgatatcacttttctaacccaa

SEQ ID NO: 391331 - DNA, 591 bp, Homo sapiens
tctctgacctgagaggttctgtagtgattatttttgctgccctttctctaggctgctcttaaaatggggcagtgaattttataaatcagaactaaatatgttttaaagcatcttgctataatgcctcagcactgcgaaaaaatactggtatttctaaaagaatttagagttacaaatatagcaactgaaaaaaatcttcaaaaacattttctgtttccactaataacattagtttgagatgtttagaaagcataaaggattaaacatgattttgttttagttgttgattttgagaatgagggctttgtgttttccactgagggatttgggtgcatttgaaaagatcttaatgttattctcataacagcgacttttgggtaatgtaaataagataacaaattgttatgtttagtttaaactcatgatacttaagcactgtttactcattgtcattaactattccaaccttaaattaaaaatgcttaccttaattaaagctgtattcagacaacttcctatggttatccctgcgttgaatttcttgtgcttcttgaaggaggattacaataaagaaacccttcttttatagtt

SEQ ID NO: 391332 - DNA, 505 bp, Homo sapiens
tataagaaaaacataggacaattcaaattgttgtgacagtaaaatattaaatattttcaaatggtccattaaactcttgactgaaatggtttaagaaacaatgttagaatgacatggtttcacatttaacagttaacaaatggaaatatcaattaaaatctggggtgtttctcactgagctcagccagtgctatgccaatgaagtgaactaaattctctggttctttgtggaaaatcattctgaagtttttgctctaaaaatagcttttggggcctgaattaccccttaccccactcgaacttctgtgcaagagccagaggaccagtgattactcgtggggccttgggcctacttaagagactcaacttgggtgttcacaggactgttgactttaattctaaaaaaatttattaattcaacagagatttattaagcacctgctctgggaaagggctgttctagacactggagatccatcaatagacaaaaatagtaaaaaaaaaa

SEQ ID NO: 391333 - DNA, 324 bp, Homo sapiens
ccttagacgggttctgttcgtgatctctgtctgcctggctttaccagactctcagcttcatcatctcatctcagggaatctggtggactctatgtcagttttttctctctgtgcggtagcctggaaactccgtgaaggcagggagctggagtgtgggatgaatttccttggtttcctgtcttacggggatcatggtcttcattacctgaagtccactgccgggtaaatcatggtataatatatttggtctgttttcttttgggtggtttcaggcaagaaggtaaatcagtacttgctgtccatggtggccagaagcagattcca

SEQ ID NO: 391334 - DNA, 338 bp, Homo sapiens
actgagtacctaccatgggccagggtagcataggagggaagaatctggagtatgtggcaaggtctgattgactgactctcccctccctcactcccaacaactgattcgagaactaacttcatactgtctggccaagacatttcagatctttatgtgggctgttcctggaaggttattggctgaggttcccagggcaaatgttaggggagttggcttgaagtcactacccgacctggggagacagaaagataatcacacacacacactcacagtacagtcacacacacacacacacacacacacacacacgcacacatgatgagcaaggcacagttgca

SEQ ID NO: 391335 - DNA, 421 bp, Homo sapiens
tgctccttgtcctcaagctcatgcaaatgggtttctgtttcttacaatcattgttcccagatatggatggtgactgatgctctactaaatgctgaaaaaaagcagagtggaagcacagaaaagtgggcttctctgaggaggtgacgttagagcccagttggaaggcaggaataaatgtgcaccatgactttttaggattaaaaccaagtacctcacagcttgggcacatgtagatagaggtgatttaacagtaaagtgtcccagttgtacccattgtcagttacctcaccacagggtttatgtagccctgagtttgcttagtgcttatttattttaggttgttgtttatccaaacctcttaaatgatatgtgtttggaacaagtaacagcatcgttcattgatgttgtggacaaaccacta

SEQ ID NO: 391336 - DNA, 1015 bp, Homo sapiens
gggagagtcctaccaaactaaaactaagatacctcctttattccttccagctgacaggacatgagccgtatggtagctctcttccaagaccccgcagcctggggtaataaattctgccaagctctccctctttctctctctgctattccctgaagcctgacaaccctgcgggtcagccccctagggccatccagcctccgtcgcccgatgccaattttaccttgtgactctcacaacagggggaaaatttagcattccttggagaccgaatgggatgccgtgagcttaagcccttccaagagcttagcaaccagtctgtccttattccgtcccaataacacagcccccgatggaacaattacaaaagtatttacaacgccttacctcttactgttcttatagatgtacttattcctgtaggtagactctaaaaagtttgaagaggaaaaattatgaaaatcaagagggagaagttgttggaaacagcgagttcctcttctgaggttacacttgtcctctgttttcaaagcctaacttccttgcctccttgcccctagttaggataaacaaccttccagccatttccaatctgtaacccacatccattaacccacatctgttcccaatctgtaacccacatccattcccaatctgtaacaactcacatctgttcctgatttggtacccttagttccgaagttgctctgtagcccccacccctgctccatttgaagtagtcaatgaggatcagcttagattgtgtcgtcggaccccaacctatggagactggacacagtagcagggactgactatgttagagacacaaatccttcccttctttgttctgtgcactctcgccattgctccctccatgaggcccacccttctttctttttttttttttttgagatggagtctccctctgtcgcccaggctggagtggagtgcagtggcacgatctcagctcactgcaacctctgcctcccggattcacgccattctcccgtctcagatt

SEQ ID NO: 391337 - DNA, 337 bp, Homo sapiens
tgagtgccaccatggcagcaaatggtatctgaaactgacagactgtagattaaaactttcagaatgtaaggcctagtctagggaaaatgaagttatgtataggtgacttgttccatttgaattaatcaaagggctgctggtgtagaccagctgtgttctctgatgacaaaaacgaatcttgacattttagataatgaaattcagttcagcacctcttagagatatgtgtgataatatatgtcagtcagaaacagagagaaggggagaagctcaaaccttgtcttattaaaatagacattgtgacaagtggacattgctgaatctctggtttctaggg

SEQ ID NO: 391338 - DNA, 479 bp, Homo sapiens
gaatgttgacagtatattctcttgtgaatttcaggttatcgtctacattattgactcttctttctgtgtcatgcctgtggtcaaatcctcataaggaatatatcaggaaacaagcttcatttttaccttataaaataaactatgtcccaacattttctaagtttcttctttgcaactcagaatacatttttgtattatccttagagtagcccacaaacatcccttaaccctaaatctggccaaaatactgccaagtaaatttcatttacttgagaggcttgtcctcagtaagtactattgagtatttccattatcaatctgtcaattttcatggtatacactgcattgattagttgtttttctttgtgtttttcccaaaagtatgtcagctcagcaagagcaggagctgtgtctaccctgttcacctctgaacctccaatgcctaaaacagtgtctagcacattgtagaggctcagtta

SEQ ID NO: 391339 - DNA, 589 bp, Homo sapiens
gcaaagcgggcagtggaggtgagttctctcagccaaatggtctctgatgcttctgggccctgcaacgggagctgatagactggcttttcttgatcgtatgtaatcaaaaccaagtgacttttgaaaaaaagtctctgagatgatttctatctgggactgtgtgggtctcatgaaaaacagaatttttaaaatgactgatgtattggcacaattagtgcttgtaaatatttgttcgtttgaaggctgtgcccagtgatctcacagatgaaactggcttccatctcgcctcgcagcttttacaaaatagcaatagcaggctctcagagggtttcagatctgccgcagcaaagagttggaagatatatcctgtgctgggaagcatgagaggtttttgtgtctctttgattttttttttttttaagtagttaagctcaagcacatctgcagatctaaatgggggagaaatgccatcctgttcactttggcatctgtggtcagaaggagcagaacatacaccaggaaaacaagccaagaccgggttgttggcaggcccctcccagctgcacccagttgagcacatgcctgatac

SEQ ID NO: 391340 - DNA, 445 bp, Homo sapiens
gtaacatttctactgaaaatgctctcagcagtttctaattggaatatttctggagagatctgcttcttccatttccaagccattgatgatgctcattaggcttgcggttggggatgtggcaggaggggaaggggaagaagctacaggggactcaaagggcatcaggaaaggaggaggggctcaggacaggcctgggatggggagatggggctgaggagggagggacaggagcagcgatggaagcagaggacagggctcatgccactgagtgatgtgtattggggagaagagtgtaggtggtggtcgcgggcgataccagggcaggaggtcctcaaacgctggccggcagagtttgcttttcctctgtcttcaagccatccctccctgcaccgcaagacccctgtttatggcgaggcactgggctgggtggggagcgggggagaag

SEQ ID NO: 391341 - DNA, 621 bp, Homo sapiens
cgcggttgttcacgcctgtaatcccagcactttgggaagccaaggcgggcggatcacttgaggtcagcagttcgagaccagcctggccaacatggtgaaaccccatctctactaaaaaatacaaaaatcaactgggcgtggtggcgggcaccagcaatcccagctactcgggaggctgaggcaggagaatcccttgaacctgggaggtggagattgtagtgagccgagatcgcgccactgcactccagcctgggtgacaagagcaagattccgtctcaaaaggaaaaaaaaaaaaagcacaacaggattacatactgtgaaaagatatgtatgtcaagagaactagccacgttcacaacacgagccacagactgggagaaaatatttgcaaaagacatatctgataaagcactgtgacccaaaatataccaaaaaaaaccctcttaaaatgcaacaatatgaaaatgtacaacttgattaaaggcgggcaaaagctctgaacatacacctcaccatatgtatatgcatatgaaaagatgctcaacatcatgtcattaaagaattgcaatttaaaaaaacaaatactattacacatttattagaatggctaaaattcagaac

SEQ ID NO: 391342 - DNA, 342 bp, Homo sapiens
tttagtaactaccattatatatcactcattaggtctatgctgtttgctccttccctattaatccctcctcccactactaacaagcactctatcagggtcagagtgaggtgtggtactggaggtactgaaatcctatcactcatctcctccaccctgaccaggctctggctgacaagagtaacaatacaaagtagtcaaaagagaggcaagggatccacttttttaaaaaagctctctggtattaactacattacacaatgcgggacatctcttacctcctttgcctgccccaatcttagaacctgtatcaggttgagactcagtctcaagctaggactgaag

SEQ ID NO: 391343 - DNA, 315 bp, Homo sapiens
gttagccgtgggctgtgggcgtcgcctgaacgtaccaggtattgtggctccattggctgaggatgcttctccagcgaaggaggcagggagccggggaagtggggtggggtcgcgacaccgacagcagctgccagaccagccatgctgcgctcagctccctcaggctgtcactcttaatcatcatgtcactatctctggggcgtgtcagtcaccatcaacgacgtgtcccccaagctgcagaggacgcaaatccagctctccaagaggctctgttggccctctccacatgggcttgaggtcaggggtgggggcacg

SEQ ID NO: 391344 - DNA, 522 bp, Homo sapiens
gcagggttctagtcatttaagatgtacctgaataaaacaaagagccttactctcctagaacttgtgtttctacctggggagactgtcagtaaaccatccacaaaataaatacagcagatgctgttagaagatgatggtgctatggtgtgctgtggaaaatagagaaagtagagggaagtgagagggattgcgtacactaggattgtgactttacacagaagggtcagtggtgccattttagcaaagatctgagagaggtaaaggaataagctttgcagaagtgtgggagacaaatgttccaggtacaggaaatgaccaacgccaagaccctagggtggcaatgtgtctgctttgagttctagagaaggggtatattatacatcgctttttgtgactcactttttggcaaacattatgcttctaaaatgaacctgtattttggaatatatctgtggttcattaattctcatctttgtacagtattctattatataaatacaccatgatttatttagtcaatta

SEQ ID NO: 391345 - DNA, 257 bp, Homo sapiens
ccttagtcttttacttgtaagctattcctgaagaaggttgcctcagcaggggaaaactttctgaaaagcttgatcaagtacctgggtcccaagaatgtcaagcatctgtggaacacacagttcccagcagccagcaagtcccacactgctcagtgtcctgcagccaaggaagctgaactgagctcatggggttacaggaagatgaaacaacactgcctcactggcaaggagatcacactgctgagtgctgcctgagt

SEQ ID NO: 391346 - DNA, 429 bp, Homo sapiens
agtagccggcccaagttatagaaaaaaaaggaagaggaagactgacaaggtagttgaccttggctccttaaaccacacctgaaagactatctctacctacctgtgtttgactctggctctttggagtacacctggcatgccagatctacctacctgagcctgatgttggctcttcagatcatacttggtgggccaagtctgcctacctgtgctcaatgctggctcctgggcttgtgcctggtggaccagcaccccctacctgcatgtgatgagggttcctgagcttgtaccttgtgggccagctctgcctacctctacttcacacctcagctgcttacacctcatccaacacacttggttcttcttacctgggcttgactatgactttttgggtctcatgaacacactcagctttgtgaagctgccctg

SEQ ID NO: 391347 - DNA, 3665 bp, Homo sapiens
cttttttttatgcatgatggtgacccgccatttgctggcataacccggggccctcactggaaggtcgggtttcggacctactgccaaccatccacaatacatatgctgacaaggcctcacatctcattaacagaggcagttctattttttcttttttttttaagagacagggtcttgctctgttgcccaggtggagtgcagtggcatgatcacagctcaccgcagcctcaaactcctgggctcaagtgatcctcccatctcagcctccccagtagctgggactacaggcacacaccaccatgcttgactattttttaaattttttgtagagatggggtcttgctctgttgtccaggcaggttttgaacacctggcctcagcctcccatctcagcctcccgaagctcagggattacagccatgagccaccacacccagcccagactcagctctagaaactaaacttcagcacacagccagccctctggctgacagagtccaggctgctcaccttggccgagaacaggtcctcagatcccagttttgtgacagcccagcaatgccaagcagtgtctgacctgagcctccgaaccctcaatctgcagacatgggtctctagacctcacctttaagtgcagtggcctctgagaccatacattatagatgcagctcctcagtcagttcaatgtcctgggcctaacctgccccagtgccccagatctcaccttatctaaccatcatctacctttttcctcactttactcactttctttttttttgagacagggtctctcactctgtcgcccaggcctgagtgtagtggcatgatctcagctcactgcaacctctgcctgccaggttcaagcaattctcctgcctcagcctcctgagtaactgggattacagacatgtgccaccatgcatggctaatttttgtatttttaggagatggggtttcaccgtgttgaccagactggtctcaaactcctgacctcaagtgatccacccacctcggcctcccaaagtgctgggatgacaggcgtgagccactgcgcctggcaactttcctcacttttaactcagaccctgtgtcaactggagcacaatgccatcttggatgcagaccaacaccatggactggttacagatcctcagccctctgtattaccctgagctctgtctatcatacctgaccagggtgctgagaacagatacctgtcccagctgatctttagggttccctagacatcaccaggcagacccaggtacaaacacctacaatgactacggctttcccttgatataagagcccacactactcacctaattgtgtctgaccctaccaccgaaggtctcacctgtgtctgacccaccttccccaggcctggccagcctcaccattatgcattcctgtgctagaccccacccacttcacctaacaagcccagcagtacttttgtgcttgaacccaggtgtcaagaacccacctgagaccatgtttatacaacctctgtggaactgagcctggatccacagactcactgctaatgtcaggtcaacataccagcactgagcctgaatccacagactcagtgccaatgctaggtcaacataccagcactgagcctggatccacagactcactgacaacaccaggtcaacataccagcactgagcctggatccatggactcactgccaatgtcagctaaacataccagcactgaccctggatccacagactcactgacaacaccaggtcaacatgccagcactgagcctggatccacagactcacgacaacaccaggtaaacataccaccattgagcctggatccgtagactcactgacacaaccaagtaaatataccagcactgagcctggatccacagactcactgacataatcaggtaaacataccagcactgagcctgcatcggcagactcactgacaacaccagataaacataccagcactgagcatcgatgcaatggtttcacctgggagacctagttctgcctatttgtgtccaactccagtgcctcaggctacagagttatatacctgtcaaagatgggttccagacatctcagctgatagaccaggcttcacataacctgacccctcacaccttgactgacagacccggttcccttgcctaagcccaactcagattccttacagcctcccagggtccagctttatttatgtgagcctggcctcggcagtccacatcctgtgtctggcttggcttttcatgtctcacagacagatccaatgctgccaatctctgcttaacgtcagcaccaatgagctcactgaggagcctcagacctcatcaaatggaacatctctgcctacctgtgctccccagctgagatgcgtagttctaccaacttgtgactaacccactgtccccaggcctaagactgagtcagcacaactaagccagaaccacgcaccaatgacctcacctgcaagaccccagctgtatgtctctctagctacaaagtccttgcttgagagagatacatctacctacccacgtctaacttaggggccacagacctcctaggaaacccacaatgttctgcctgcctgtagagacccccatgctatggggttgacctgggaggccgctctatacacctaggctcaactctggttcttcaggcttcacctcaaacacccaggggcacattcctgtgcctgaatccaactcctgaaagagccaactctatctacctgcattcaacctaactcctcagctctccttcaagagactactcctggcagaccagttttgtctacctgcctgaccctggctcctcagaccacacatggtgggccagctctgcctacctgtgcttgaccctgggttctcagaccacacctgaaaggctatctctacctacctgtgcttgaacctgggttctcagaccacacgtgaaaggctatctctacctacctgtgcttgaacctgggttctcagaccacacctgaaaggctatctctacatacctgtgcttgaccctgggttctcagaccacacctgaaaggctatctctacctacctgagcttttcgctgggttctcagaccacacctagtgacccagactacctacctgtacttgatcctggctcttcagaccatacctggcaggcagctctacctacctgagtctgaccctggctcctcagaccatacctggtgggccagctttgcctacctgtgcttaccctggctcctcaaaccacacccagtgggccagctctacctacctgtagttgaccttggctccttaaaccacacctgaaagactatctctacctacctgtgtttgactctggctctttggagtacacctggcatgccagatctacctacctgagcctgatgttggctcttcagatcatacttggtgggccaagtctgcctacctgtgctcaatgctggctcctgggcttgtgcctggtggaccagcaccccctacctgcatgtgatgagggttcctgagcttgtaccttgtgggccagctctgcctacctctacttcacacctcagctgcttacacctcatccaacacacttggttcttcttacctgggcttgactatgactttttgggtctcatgaacacactcagctttgtgaagctgccctg

SEQ ID NO: 391348 - DNA, 3187 bp, Homo sapiens
cttttttttatgcatgatggtgacccgccatttgctggcataacccggggccctcactggaaggtcgggtttcggacctactgccaaccatccacaatacatatgctgacaaggcctcacatctcattaacagaggcagttctattttttcttttttttttaagagacagggtcttgctctgttgcccaggtggagtgcagtggcatgatcacagctcaccgcagcctcaaactcctgggctcaagtgatcctcccatctcagcctccccagtagctgggactacaggcacacaccaccatgcttgactattttttaaattttttgtagagatggggtcttgctctgttgtccaggcaggttttgaacacctggcctcagcctcccatctcagcctcccgaagctcagggattacagccatgagccaccacacccagcccagactcagctctagaaactaaacttcagcacacagccagccctctggctgacagagtccaggctgctcaccttggccgagaacaggtcctcagatcccagttttgtgacagcccagcaatgccaagcagtgtctgacctgagcctccgaaccctcaatctgcagacatgggtctctagacctcacctttaagtgcagtggcctctgagaccatacattatagatgcagctcctcagtcagttcaatgtcctgggcctaacctgccccagtgccccagatctcaccttatctaaccatcatctacctttttcctcactttactcactttctttttttttgagacagggtctctcactctgtcgcccaggcctgagtgtagtggcatgatctcagctcactgcaacctctgcctgccaggttcaagcaattctcctgcctcagcctcctgagtaactgggattacagacatgtgccaccatgcatggctaatttttgtatttttaggagatggggtttcaccgtgttgaccagactggtctcaaactcctgacctcaagtgatccacccacctcggcctcccaaagtgctgggatgacaggcgtgagccactgcgcctggcaactttcctcacttttaactcagaccctgtgtcaactggagcacaatgccatcttggatgcagaccaacaccatggactggttacagatcctcagccctctgtattaccctgagctctgtctatcatacctgaccagggtgctgagaacagatacctgtcccagctgatctttagggttccctagacatcaccaggcagacccaggtacaaacacctacaatgactacggctttcccttgatataagagcccacactactcacctaattgtgtctgaccctaccaccgaaggtctcacctgtgtctgacccaccttccccaggcctggccagcctcaccattatgcattcctgtgctagaccccacccacttcacctaacaagcccagcagtacttttgtgcttgaacccaggtgtcaagaacccacctgagaccatgtttatacaacctctgtggaactgagcctggatccacagactcactgctaatgtcaggtcaacataccagcactgagcctgaatccacagactcagtgccaatgctaggtcaacataccagcactgagcctggatccacagactcactgacaacaccaggtcaacataccagcactgagcctggatccatggactcactgccaatgtcagctaaacataccagcactgaccctggatccacagactcactgacaacaccaggtcaacatgccagcactgagcctggatccacagactcacgacaacaccaggtaaacataccaccattgagcctggatccgtagactcactgacacaaccaagtaaatataccagcactgagcctggatccacagactcactgacataatcaggtaaacataccagcactgagcctgcatcggcagactcactgacaacaccagataaacataccagcactgagcatcgatgcaatggtttcacctgggagacctagttctgcctatttgtgtccaactccagtgcctcaggctacagagttatatacctgtcaaagatgggttccagacatctcagctgatagaccaggcttcacataacctgacccctcacaccttgactgacagacccggttcccttgcctaagcccaactcagattccttacagcctcccagggtccagctttatttatgtgagcctggcctcggcagtccacatcctgtgtctggcttggcttttcatgtctcacagacagatccaatgctgccaatctctgcttaacgtcagcaccaatgagctcactgaggagcctcagacctcatcaaatggaacatctctgcctacctgtgctccccagctgagatgcgtagttctaccaacttgtgactaacccactgtccccaggcctaagactgagtcagcacaactaagccagaaccacgcaccaatgacctcacctgcaagaccccagctgtatgtctctctagctacaaagtccttgcttgagagagatacatctacctacccacgtctaacttaggggccacagacctcctaggaaacccacaatgttctgcctgcctgtagagacccccatgctatggggttgacctgggaggccgctctatacacctaggctcaactctggttcttcaggcttcacctcaaacacccaggggcacattcctgtgcctgaatccaactcctgaaagagccaactctatctacctgcattcaacctaactcctcagctctccttcaagagactactcctggcagaccagttttgtctacctgcctgaccctggctcctcagaccacacatggtgggccagctctgcctacctgtgcttgaccctgggttctcagaccacacctgaaaggctatctctacctacctgtgcttgaacctgggttctcagaccacacgtgaaaggctatctctacctacctgtgcttgaacctgggttctcagaccacacctgaaaggctatctctacatacctgtgcttgaccctgggttctcagaccacacctgaaaggctatctctacctacctgagcttttcgctgggttctcagaccacacctagtgacatgggagggatagctacctgctccacacacatggggctcctggacaataccgtggctttagaaacaaacctagg

SEQ ID NO: 391349 - DNA, 802 bp, Homo sapiens
tcagacagtcttgctctatcacccaggctgtagtgcagtgatgcgatctcagctcactgcaacctccatctcccagaccacacgtgaaaggctatctctacctacctgtgcttgaacctgggttctcagaccacacctgaaaggctatctctacatacctgtgcttgaccctgggttctcagaccacacctgaaaggctatctctacctacctgagcttttcgctgggttctcagaccacacctagtgacccagactacctacctgtacttgatcctggctcttcagaccatacctggcaggcagctctacctacctgagtctgaccctggctcctcagaccatacctggtgggccagctttgcctacctgtgcttaccctggctcctcaaaccacacccagtgggccagctctacctacctgtagttgaccttggctccttaaaccacacctgaaagactatctctacctacctgtgtttgactctggctctttggagtacacctggcatgccagatctacctacctgagcctgatgttggctcttcagatcatacttggtgggccaagtctgcctacctgtgctcaatgctggctcctgggcttgtgcctggtggaccagcaccccctacctgcatgtgatgagggttcctgagcttgtaccttgtgggccagctctgcctacctctacttcacacctcagctgcttacacctcatccaacacacttggttcttcttacctgggcttgactatgactttttgggtctcatgaacacactcagctttgtgaagctgccctg

SEQ ID NO: 391350 - DNA, 635 bp, Homo sapiens
aaaccttgttcatgcgtaacaatgggtgggtttgccatcattattcctatgtctcgtccgtcgtcccttttatcattttcttttgaaattttgcatcctattccatatgaggaaataagaatttttaaaaataatgccatcatcaacaacagcaataaaaaatcattccagagtgtttactctatgccaagccccaggccaaactttatgtgctacatctcatttaattcacatagcaactctgtgaactagatgttgacatccatcccactctccagatgaagaaactgaggtttggaaaggtgaggtagttgtctcaacttcaccaccagtttgattttaacccaagactgtctgatgtctgggccaaagttctttgccaaaatgttatgatgccagccaaaacccatgtctttcttggaagagctctccaaattctagacagtttgggttgcaagatcaaaaccactataactgcctccatagagagcctacattagctctgtgcaggttgaaaggactctctgaagctcttgaaggtatctgtagaagtttttaagtagtaaacgtttccagcagagggaaactctggtttagcaaagaaggaactgacttcacatcccagttctgtctct

SEQ ID NO: 391351 - DNA, 256 bp, Homo sapiens
gtcacctcaccttgctgtgcttttccttataacactggatgcctcatgaatgcatgtctatttgagtattgctgtctcagcctcttagagtgtaagccttttgaggccagggagcctgcctgtcttactcattgccgtatctccagcacataggaggcagatgaagacgaactgcaggctcttagacaagtcttctctgttaagttataacttacgtaagtcatacatgaataatacatgaatgtgttctcaacat

SEQ ID NO: 391352 - DNA, 616 bp, Homo sapiens
gaactatgctacagagggcctttaggcaggtgaatctaacagtgctatatttagctattcattcagtcactcgactactgtatattgagcatctactatgagctaacattatgctaggtgctgggtgtaaaccttaaacatcatagacagaatccttttcctgaaagactttacaacccagtgtataggatagtggaaatgaagagagaggcaagagatgtggcacagctttcccctcaatttaactagtccctgtccttttaccctggggaactcattcagattctctttaaggaaactttactgttgtatctaaactactctcatttgtataactttaaaaaatcaaagcacatgtacatgtaattctctatttatgatacacatggcaaatgtggatatgtataaaatatgtattttggtccatcaattctaacctgctacttgagttcagagatgattcccaattaaaattctatatattctttatttaaaacaatggttctcatcccagtagtgtatctgaatcccctgggaaagttttcaaatgataattgctccacttaggaattcttacatccactcttgcatctttgggatggtatatccaagtctc

SEQ ID NO: 391353 - DNA, 405 bp, Homo sapiens
ccgtgtgggtcagccaccattcccgccaccccgggtccctgcgtcctttagttctcctggcccagggcctccaaccttccagctgtcccacaaaaccccttcttgcaagggctttccagggcctggggccagggctggaaggaggatgcttccgcttctgccagctgccttgtctgcccacctcctccccaagcccaggactcgggctcactggtcactggtttctttcattcccagcaccctgcccctctggccctcatatgtctggccctcagtgactggtgtttggtttttggcctgtgtgtaacaaactgtgtgtgacacttgtttcctgtttctccgccttcccctgcttcctcttgtgtccatctctttctgacccaggcctggttcctttccctcctc

SEQ ID NO: 391354 - DNA, 473 bp, Homo sapiens
ccatgatgatgccacatgagaaatccttaagtccagctccaattatactgcatatcctagaatggaccattacattaacaagaattttcatatgctaaccatgacatgtacttcatatcatgaatgtagatggctaattttcacacattaccatgcatttcagcattccctagagttatctgaagcatctggggggaagggggagagaacctttaagttttctgcttctgagactattttgttgttattggatatcgctttgacccccttcttttagtgcttatcactaggcatctgccgtatttaatgatgtgtgtcatttcatttagtatcactgacttggatcaattcctcttccaggtttctgtactgtcttgatacatgtatttgttttgctttgaaagaaaaatcaacaattgaattgccagtgatagacatatgagtaggaccattcttaatggatatgtagagat

SEQ ID NO: 391355 - DNA, 731 bp, Homo sapiens
tctcttttcattcatcttagttgagcttgtggctgccataaatataactcttcttttttgtaaagtggaacaacagtggaccctccagagttcacagattcaggtgggattagggaacatctactgaagccatcatttgttaaaatctgcttcctgctccttgatgcatctacctctcaaagccaacctcacctgttaaaaaggaactcaacagccattctgcatgcttggaaatagaaaccaagagaaattaacacaaaggacactttcctcctgtttagccagggctctaggcgttgttctgtcttctccaaccatgtacccccagtgaccatcttgtcacacagggaatattcaatgtttgtcgaaggagtgtgtgaaatcaactgtccattggggtgatatatggagagaactaaaaaaccgatgaaaaactccccaaagcatgtcatctctatagcatgccctttgagatcacatctcctactgctcaacaggcttcttcatctgctggaaggacatatacatgaggaagtttctgatactgcaactttagatcagaagtcctcttttaagttactgtttttatccaaaagaaaaatgccattttatcaattataaaaataggaaaatattcagttcaactaacagacagattataaagcagaaagtagaagtcttctatagacttcccctctgaagaagggcattcttcacaggctggtgtctat

SEQ ID NO: 391356 - DNA, 665 bp, Homo sapiens
ctaatatttattatggtggcaaagtaaacatgcacagcaagatcagtaatgggaaagataagtggagtctggagaaattcatttgcacgtttcctatgatctctctcctgtgataagtcacgtcgagttcgccttccttccagcagtgaaaatgcaactatgcctatgtgatgtttctgcccagatgagccagtttgaggctcagagtttagggatatttcgagggctggtcacataggcattttctacctagcaaccaccaaaattccagatgccagagggaaagcaggtgttcaccatagatcacattgtataaacagcctaagcccagcaaaatgaccttatcagttagtaatggagcacacattccgaaagccatgttcccggacaccagccaagaactaaccctgcaagcaggccctttgaaagatagcagcctcaagcctgctgttaactctttttttacacgagtctaactaacaaaccattttgaaaataaaaaaatcaaatgggaaataatggtccattaaataaatcattgcaattctttgctgatctctctcctctggtgtctaaacaatttgtctcacgtataaaaggcaaccacaaatttgcatggtcttgctgacacataatgtaaaagaatgagactgcttcatgtaatt

SEQ ID NO: 391357 - DNA, 316 bp, Homo sapiens
tcaggagtcagccagagttgtgcttcagtttcctcatctctccaggcttatttcaagggtcgagtgagaaggtcatgggcaggatgggcttagcatgtcactggccaggccacagtgaatacccatttacattaggggctgggagcatatgctctacatccacctgcttgaatcctggccctgtcgttttgcagtttcatgatgctggcaagttatcctcctctgcttcctcatctgtaacatggagatgacagttatagtgcccaccttgtgagttctgaagagtaaaagactttactcacataaagtgctcaga

SEQ ID NO: 391358 - DNA, 751 bp, Homo sapiens
agcggcggggattataggcgtgagcctctgtgcccggcccctgctacttcttttaagacgaaaagttctcaagaattctcttttcttggttttctgatttttcttcttccatcctccttgaatccactccactcaggtgtttgccctcatcactcaattgaaacagctcttatcaaggtcactgaggacctttgtactgctaaatccagtagcctattgtcagttctcagtttgggaaaagtggctgcattttacccagctggtcatttccttccccttgaaacactgtcttcactgcttctagaatacgatgctcacttagttttcttcctatctctctcattggttttatctcctttgcagattcctctttatctctctacctcaaatgttgaaaggcacgaaggcttagtccttgaaccaactctctttttatatatcacaaacttggtgaagtcattaatattagtggttgtaaatacagtgtgtatgctacatgtccagcttgactgcaatcttgaccttttttttttttgggctacatctccagtttgactggcagtcttgacttttcaataattaattctaatttgaattgaattgggttttggagacggagtctcgtgctgtcgcccaggctggagtgcagtggcgccatctcagctcactggaagctccaccttccgggttcacgccattctcctgcctcagccacccaggtagctgggattacaggtgcccaccaccatgc

SEQ ID NO: 391359 - DNA, 406 bp, Homo sapiens
attatttcatggtggtccttttccttctctgggcctatttctctctctcgctcatttatttatttacttttagacagagtcttgctccgtcgcccaggctggagtgcggtggcgcgatctcaattcactacaacctccgcctcccgggttcaagcgattctgatatctcagctacttaggaggctaaggcaggagaattgcttgaacccaggaggcgaggttgcagtgagccaagatcataccacagcactccagcctgggcgacagaacgagactctatctcaaaaaaatagaaaaaagaaagaaaaattctttctctaggccaggtgtggtggttcacacctgtaatccctagcactttgggaggctgagttgggaggatcactttagcccaggagatcgagac

SEQ ID NO: 391360 - DNA, 372 bp, Homo sapiens
tcagaatttattccttcctttaaatctaacaatatttgcttcatatatctgggtgctccaatgttgggtgcatattatatttacatttgttatctcctttactgaattaatatctttatcattatgtaatgaccttctttgtttctttttagttgttttttgtttttatgtttgtttgagacacagcctcactccctcggtttgtgtaagtacactctatgaaggtcacataaggttgaaataacctgaggatgcatttctcagaatgtatccctgtggttcagtgacatttgactgtaatgagtggcaaagcagtaaaccttggtctgtattattcgaactcctatatgctgactcacttacgtatttcag

SEQ ID NO: 391361 - DNA, 532 bp, Homo sapiens
atgtattgagctgattgcttaggtcaaggattattttcaaagatccaaatccaagaaacctaactttgcatatagacccattggtggcttctaagatttcttttcccatacattgcattacaatcccctaaacatgaaattacaagttcaagaagttttttcccaaaggtgtgtaggcattaagactttgactggttgtgaaggttaagtggactacacgtggaaaacttttttttttgctaactgaatttccgatcttgaaaatttactgctgagcgtggtggctcacaccttgattgattgattgattgattggagacagggtctcactctgttgccacccaggagtttgagatgtgcctgggcaacaaagggagaccccatctctacaaaaaataaaaaatcagccaggtagccaggctgaggtgggaggattgcttaagcccaggagtttgaggctgcagtaagctatgatcccaccactgcactccagcctgggcaacagagcaagaccctgtctccaagggggaga

SEQ ID NO: 391362 - DNA, 412 bp, Homo sapiens
taattcggacctgacatgctgtctcatttatcacaatattataatgttactgctgcttattttccataaataccacataatagtttctttctatttccctcaggtgtagaaccaaccaagggtatcacttgcagcaactacagtcactagtctcactggttttcaactagctgttaagcttctactcccagtctacataaaccacattcacagaaataggcaggtaagaacagtagtcatgaagatggggaaacataagcagtggggaaatcagaagatctgtttaacaaaaaattcttaatgtgttaacattaaagaccaaaagtatgtaaatcttttatttaagtgtgtattcaaagaaaaacttggatatccatgtagactctcattgattttgaattatctgacacag

SEQ ID NO: 391363 - DNA, 531 bp, Homo sapiens
cttctgatgtcctcataaatttggaggtccaatttccatttgaacaatgagtagatctaagctcagcaagcttaagcaaattatacaaggtcatagagctaggaaataatggaaatggaattcagacacattttgctgccccaaaaaaccacactcttaatcacatgcacccatttcccatataaaaatgctttaaaatcagaaagcctcatacacatgaaggaattctcacttaaccctcacaacataccaggggataataaggcaggtattttttcccaatttataaataaccagtggccagtcttagtgacatcgagctaataagtggcaaaactaggagttaagcctatttattatcttgttctctgagcagattcccttaactaaggaaagaagaaataaccttcaagttctgtctgaaagcagagtggtatttttttaatactagaagaaggtcatgccaccttatgagaatatagctctaccctccatgtatcttctgagtcaaattgacttattttatgtgga

SEQ ID NO: 391364 - DNA, 459 bp, Homo sapiens
  misc_feature (1)..(1): n is a, c, g, or t
  misc_feature (4)..(5): n is a, c, g, or t
  misc_feature (28)..(28): n is a, c, g, or t
  misc_feature (79)..(79): n is a, c, g, or t
  misc_feature (163)..(163): n is a, c, g, or t
  misc_feature (272)..(272): n is a, c, g, or t
ntcnngatcctctcctcactagcccagntctccccaaggtcagggctcatagagcagcaggagttgggttccgggacgngggatccggcttctctgggaatcttggattccaggaaggatcctggagatctcccactttatgaagcccaatctccactcactntgatggcgtctttagaccccactggaaaccagatacgacgccctcatcggccctggggaaaaaacaagagcaaagtatgagaggtggccatgaggtcagggaaactccngcagaattcagtcctttcctttgagaaggctcgacccgggaaccgaatcaaacagaagggacgggtcggtggacagggtctcgacctctgcgggtccaaattcggtctctaaaacctatgaaaggaactaccactgtattaaaaacagaagagaggaccttttcttcggggtcttggtagtctcact

SEQ ID NO: 391365 - DNA, 171 bp, Homo sapiens
tgctttaacaggtaaagtaaatgtgctaaccaggcacacgcacatgcctgattgacaagcatatgtcggctctcagaggaggttcgtttccacaggtttaaagaaaaataaagaggcctacagggaaaaaaccaaactgttctgtttggataatttaggaaaacctgagtg

SEQ ID NO: 391366 - DNA, 270 bp, Homo sapiens
aagtaaagtgacctgcttagtgcttaaacatcaaataactttgctaatctgcctctctgaaagtaaaacacactcacactcatcttccattcctgcttccactgatcccatcgaaagtgacatatccataggccaggcatggtggctcaggcctataatcccagcactttgggaggccgagaaactcttaatagcctaaatatccctaaggggagaacacggactagttacatgaattacagcatatctatcacagcatagcaaacagcc

SEQ ID NO: 391367 - DNA, 277 bp, Homo sapiens
cacacacacacatgtgcaagtgccccactgtatgtttcacagtcccaagcaaatgtttaagaagaaaatggaggcagagagagtttgcaggtattatgtgccaggctggtgccaagcattttacacatattgtttcatttaatcacagtaatcctataatgtggctattattgccctaggtcatagatgaggttcagacaagttaacaaacatcataaaagtcagtaatgcaactaactgtattcacaagtaatattaacgaataatacaaacattc

SEQ ID NO: 391368 - DNA, 285 bp, Homo sapiens
tttttctttacaccaatcctaataaagtaaacgtttgaatgggaatattagctatttttgaagatagatacaggacaatttattgtggagcatatacccattctggcctgtagggatgataattgctagcatgcatcaggaagcaagcttgtgaacaatccagtttttctagtacttgcttcatactagggagaaagtcatcagttactttggcatagaattttaggttcttcatctaatagaatttgattgtgaccattaatttttgtttatcttacgacttca

SEQ ID NO: 391369 - DNA, 308 bp, Homo sapiens
ggcatcaggggatgccatgaaatgaaggataccttcagtctgtaggctggtattgagtgttcactcacagagtggccccttccttctgccagtatttaccggatgcccacagtcattgtctgtaattctctcaacaccaaccctgtgaggtctgtttcctcattttgcagataaggaaaccggagctcagagaggtgtagtaacttgctgaagggcccccagctagttaatggcagttgccatggaggtccaggtccaccgcactcagcgcatgctgatggaattcccctctcctgcctctctggcac

SEQ ID NO: 391370 - DNA, 312 bp, Homo sapiens
taaaaaacagaacaatcaatacttgctatcaaaaaatagaagctacacacttaaataaaagatgttgcccatggagtccctaaaattgtcccgtgcgtcagcggctgggtgcacaccacactctgcgaaatggtgatgctaggcctctggccctttcctggaattcgcagcccctcatgaggagccctttggaatgagaggaaaaataagcatgtggacatgccctagccgaggagtgttcttttagtatctgccaattgagaaaatagacaacgtacaaagctactattcagaatgaattcaccttatgtt

SEQ ID NO: 391371 - DNA, 180 bp, Homo sapiens
aaaatgattttaatgtatgtccttatggttttctcatccaaatatgagcaaaattgtacaaatttaatattttaaatatattctaagcttacaaagtctgcatgagtttaccattgatcctctttagtattcctgaggtcatgcattatgtctcagttttgttttgtttttttaatattt

SEQ ID NO: 391372 - DNA, 330 bp, Homo sapiens
cacgccaccatccgtctgcttttccttcaacctttctggccttgtcttagtttcctttgaagactcatcctcctttaccttgtctttaagtgacagaattcctcaagacttcgtgcttggtcttttctcactctactcttgccctaggttggcctcatctttgaccatgtcttcaatactatctatatcctgttgagtcccaaacttgtttctctacctcaggcctctgttatgccccagccctgtgtatctccagttgtttatctcacatgcacctcaaactcaatttatgtccacaccggccctgtgcttcctcctcattcacccttc

SEQ ID NO: 391373 - DNA, 423 bp, Homo sapiens
agaaaaatatcccataaaaattgtgccccctagagggcgagggccacgggaagggggatcaggaaaacaagaatcagtctctaagctggtcctggagcagcatgacagatgtatctgagcccaagcaggagaggagccacaggcccaggctggcagagttgtgactactagaatctcgagtcactggggctcagggagccctaacttggtggcaggtgacaaatgtggcacaaaggagaaaggagtcttctccttccacatagaacacacttggcttcagtgctttggggggattcgtggaccacagagaagcttccgcatatttataggcactggggaccagcaggaagtggtggtgagacactttgaaaccctccactgcagacttcacccagggggcaaggcaggagagaatccctctgt

SEQ ID NO: 391374 - DNA, 142 bp, Homo sapiens
aagacgtggtgtattagaaaaaaaataggactaacacttgaaaactaatagaacaggaaagggaatatgaactgtgatgagggtgggatttaaatttaaagtaggtaaccagtgaaggtgacttttaaacaagaatttgaat

SEQ ID NO: 391375 - DNA, 429 bp, Homo sapiens
ttagtctggattcagtggctctgtgctatcctctgttattgttacccctcttctctttagaataatttggtagaaatttcttctctttgtcccctgggttgccccctctgatctgctcccagacttacgggatcaagacaacttgtcccaggtgggtgcagtgcctcacacatgtaatcccaggactttgaaagaccaaggctggtggattgcttgaatccaggagtttcagaccagcctggatgtggggaaaccccgtctctactaaaaatagaaaacattagctgggcatggtggcacatgcctgtaatcccagctcctcgggaggctgagtgggaggatcacctgatcctgggaggtcgaggctgcagtgagctgaggtcgcatcactgcactccagcctgggcaactggagtgagaccctgtctt

SEQ ID NO: 391376 - DNA, 326 bp, Homo sapiens
cacaagtgacttgttgactacaagatttactctcacagatatttccagagtaatatgaaatcccagccaagtatccgcagaaaaaagccagcggcatatgctccagcctcttttcctgagtgcagctccacagctacctctccatgcccagaaggacatcataaatcatttctaatttatgaggagcccagtcgtgtactacaccctgctaggtgctggtgtttgtcgtctacagactgtgagctcccttcttcagtgcatacagagactttttcagatcatccataggacagaaggttgagaatttttttccctaggactggccc

SEQ ID NO: 391377 - DNA, 415 bp, Homo sapiens
ctcccgaaaaatcatatctccacccaaacagaaatactctcatttagtctatgacattggactaatcaaaagcttactctcaaggataaatgtcttacaggtccttgctgctgcatttatgtcaaaaaataaactccttgagagaagaagccatgcgtgaatagatttttcccccttgttttctatttaattgtctaattgtttctagtatacatataaacaaattatgtgaatataattcccccctcaaattctactctgctattctaaacacttattttttccctgtaagaagccgcagctagtttaggaagtataatggttccaagctctgtaacaataaaagctagaaagcaacacatcaattttttaaaaagtacttgaaatattttagacaattacataaataaaggca

SEQ ID NO: 391378 - DNA, 282 bp, Homo sapiens
  misc_feature (28)..(28): n is a, c, g, or t
catccggacatggtggctggtgcttgtnatcccagcatggaggcttaggcagcacagcctgactgcttgggtcccagatcaccagagccagtcaccagccaggtctcctgatccctcctgattcctcaggcagctaagcccaggaccctcctccctctatgcctccctcaggcctggcccctctgactctgcctgcacctcacccccaggtgcacctcctggcccagacctatggggcctgggtccacctggacagggcccagctgatgaacgtggtgctgg

SEQ ID NO: 391379 - DNA, 1067 bp, Homo sapiens
aaggagatgaatagctgccaggaacattgtttgcacaagggcaggagctgccagatctgagaacacagcaaaatttttattttgtcaaaaatcttatattcagcttacaccattcatttcaggtgaacatacaacagtctgcatttcagtttagggaaatgtttacagtcgtctggttctctttattcttgggaacaaggttacctcacttggaacacataaccagtgccaagttgtccatccctaagcaatatcgcttcctcctactttctagaagttcttcaggttgtggaagacagacttttcagaattgtttgccctcattccctcctccaggaaatgcatgcctttgtataatctcttccccttgagagccagtaggctaacctaatgagttatgtttaaccagtagaatacagcaagaatgatagattacaagagattgtggcttctatcttgctagcggcctctctctgtcttctctgcttgcacactttgttgaagcaagctaccatcccagaggcaaggaacacaggccatcagtttagcagccttgaggaactaaattcttccaactaccacataagtttggaagtagattcttctccagtccagccttcagatgagaccccagccatgccaacatcttgattgcagccctgtgagagaccttgaaatagaaccatttctgatctcctgacccacagaaactgtgaaataaatatgtgttaaggtactaagtttgtagtaatttgttacgcagcagattgtaaataacacgcagataaaaccagacagaacagaaaaataaaatgactttaactctagaaagtttccccatgtaaaattttgaaaatgctactctgcctaaggtcaaactgtcatacatatatacgtatgaaaacacagaaaggtgtctggaagggtaataccaaattaaatctttatccaagaggaatgaaaaccagtattcacacaaaaacctatgcacaaaccttgtgaatatattaaaaaccagtgaattatgcactttaaaaaggtgaattatgtggtatatgaattatatc

SEQ ID NO: 391380 - DNA, 991 bp, Homo sapiens
  misc_feature (971)..(971): n is a, c, g, or t
aaggagatgaatagctgccaggaacattgtttgcacaagggcaggagctgccagatctgagaacacagcaaaatttttattttgtcaaaaatcttatattcagcttacaccattcatttcaggtgaacatacaacagtctgcatttcagtttagggaaatgtttacagtcgtctggttctctttattcttgggaacaaggttacctcacttggaacacataaccagtgccaagttgtccatccctaagcaatatcgcttcctcctactttctagaagttcttcaggttgtggaagacagacttttcagaattgtttgccctcattccctcctccaggaaatgcatgcctttgtataatctcttccccttgagagccagtaggctaacctaatgagttatgtttaaccagtagaatacagcaagaatgatagattacaagagattgtggcttctatcttgctagcggcctctctctgtcttctctgcttgcacactttgttgaagcaagctaccatcccagaggcaaggaacacaggccatcagtttagcagccttgaggaactaaattcttccaactaccacataagtttggaagtagattcttctccagtccagccttcagatgagaccccagccatgccaacatcttgattgcagccctgtgagagaccttgaaatagaaccatttctgatctcctgacccacagaaactgtgaaataaatatgtgttaaggtactaagtttgtagtaatttgttacgcagcagattgtaaataacacgcagataaaaccagacagaacagaaaaataaaatgactttaactctagaaagtttccccatgtaaaattttgaaaatgctactctgcctaaggtcaaactgtcatacatatatacgtatgaaaacacagaaaggtgtctggaagggtaataccaaattaaatctttatccaagaggatctacttcaaccgngatcctctagatcacctcga

SEQ ID NO: 391381 - DNA, 715 bp, Homo sapiens
cttcctgtctatgaatgtgacggctctacaggcccctacaagtggaatcaagcagtatctgtccttccgtgtctggtgtatttcatttagcataatgttctcaaggttcatccgtgtgataggaggtgtccttcccaaggctgaataatgttccatagtatgtgtgtgccatatttagctgatccccgctgacagacaagggggttcccacctttcagctactgggaacaatgctgctatcaacagggctgcatgagtacctgcttgagtccctgctttcaatgcttttgggcgtaaggcaacatacatttttttgttaccaactaaactttcttcctttccaatgtttattggaaagtgttttgggaattccaaggaggtgccgggctgactgtgtgagatgagtagttgtggtttacttcctgtaggacaagcgcgaccacccacacatgacggtactgtgaggggccagtagtacgaatgaatcccaactgggcggccctgcttccctgcctcaacccagggctgtgtgcttcccagcaggcactgccatctatccagccccacagtttcccagcactcagcacttctgatgcttggcctcaacctcgccaccactggagaagatgaaggtgcattctggtggcttccacaggtatgacactgtttcctgggacctgaagagaatgcactgtctacaacctgagctacaacc

SEQ ID NO: 391382 - DNA, 1383 bp, Homo sapiens
  misc_feature (3)..(3): n is a, c, g, or t
  misc_feature (6)..(6): n is a, c, g, or t
  misc_feature (12)..(13): n is a, c, g, or t
gcngcngcgcgnncggcagctgtcccgcctgccacaatgcgcggcgaagctgcggccgcgacttggcgaggtggtccctaacgttgccgctcggcatccttagaaccggccgcccctgacgccgcgcggggaccccagtcgcccgcgcgccccatgcgctcactcttcggtgcccggccgggccggcgcctcgcagacgcggagccgcgcgggtgacggcacaggcggctgcgcgcccagcccagcccagcccagcccgaggagagggcgcgccgcgcccccgccccccgcccgctctcccgaggccgtgggtgcggatgcgcggctgacgactcgcagcaagagcaccgccgccggccccagcccgcagcatggcagccgccgcctatgtggaccacttcgccgccgagtgcctcgtgtccatgtcgagccgcgcggtcgtgcacgggccgcgggaggggccggagtcccggcccgagggcgcggccgtggccgccacccccacgctgccccgcgtcgaggagcgccgcgacggtaaggacagcgcctcgctcttcgtggtggcgcggatcctagcggacctcaaccagcaagcgccggcgcccgccccggcggagcgcagggagggcgccgcggcccggaaggcgaggaccccctgccgcctgccgccgcccgcccccgagcccacctcccccggcgccgaaggcgcggcggccgcgccccccagcccggcgtggagcgagccggagcccgaggcggggctggagcccgagcgggagccggggcccgcggggagcggcgagcccggcctcagacaaagggtccggcggggccgaagtcgcgccgacctcgagtccccgcagaggaagcacaagtgccactacgcgggctgcgagaaagtttacgggaaatcttcgcacctcaaggcgcacctgagaactcacacaggtgagaggcccttcgcctgcagctggcaggactgcaacaagaagttcgcgcgctccgacgagctggcgcggcactaccgcacacacacgggcgagaagaagttcagctgccccatctgcgagaagcgcttcatgcgcagcgaccacctgaccaagcacgcgcgccgccacgccaacttccacccgggaatgctgcagcggcgcggcgggggctcgcggaccggctccctcagcgactacagccgctccgacgccagcagccccaccatcagcccggccagctcgccctgagcccgccacagccatgagcagccgctcccaccccctcgtgagtccctggcctttccttttgtaataagaaagaagagagagaacttgatgcaaagtccacgaaaaaacaatttttttcacctcaggtgtcaaagtaaattttgtt

SEQ ID NO: 391383 - DNA, 1165 bp, Homo sapiens
  misc_feature (3)..(3): n is a, c, g, or t
  misc_feature (6)..(6): n is a, c, g, or t
  misc_feature (12)..(13): n is a, c, g, or t
gcngcngcgcgnncggcagctgtcccgcctgccacaatgcgcggcgaagctgcggccgcgacttggcgaggtggtccctaacgttgccgctcggcatccttagaaccggccgcccctgacgccgcgcggggaccccagtcgcccgcgcgccccatgcgctcactcttcggtgcccggccgggccggcgcctcgcagacgcggagccgcgcgggtgacggcacaggcggctgcgcgcccagcccagcccagcccagcccgaggagagggcgcgccgcgcccccgccccccgcccgctctcccgaggccgtgggtgcggatgcgcggctgacgactcgcagcaagagcaccgccgccggccccagcccgcagcatggcagccgccgcctatgtggaccacttcgccgccgagtgcctcgtgtccatgtcgagccgcgcggtcgtgcacgggccgcgggaggggccggagtcccggcccgagggcgcggccgtggccgccacccccacgctgccccgcgtcgaggagcgccgcgacggtaaggacagcgcctcgctcttcgtggtggcgcggatcctagcggacctcaaccagcaagcgccggcgcccgccccggcggagcgcagggagggcgccgcggcccggaaggcgaggaccccctgccgcctgccgccgcccgcccccgagcccacctcccccggcgccgaaggcgcggcggccgcgccccccagcccggcgtggagcgagccggagcccgaggcggggctggagcccgagcgggagccggggcccgcggggagcggcgagcccggcctcagacaaagggtccggcggggccgaagtcgcgccgacctcgagtccccgcagaggaagcacaagtgccactacgcgggctgcgagaaagtttacgggaaatcttcgcacctcaaggcgcacctgagaactcacacaggtgacaaagaagacaaggaagacaaggaaggtgatccgggaggctggagagcttgtcaaggtcacagacccacggttttccgccccctagggtccaagctctttcctggacatctgcaggcaatgtcgacacgccctccagtgtctgtggcgggcaaaggatgtgtctccacccccagaccttccgatcctgtgctgaaagtgtccctcagcctgtt

SEQ ID NO: 391384 - DNA, 126 bp, Homo sapiens
ctgctggatcagaatggccagattaaaaactctagcgtccccagaaatatgtgtctcaaagtcaccagaaccccatgcctgaccttggatgtccagtaagaacaagacctgtaactggcccagtaa

SEQ ID NO: 391385 - DNA, 456 bp, Homo sapiens
ctcccaagggggaacgtgggtcaggagctgccacggggtctgcaagacgcttgctggcctcgaccaagtcaaggtggctgttccacgcggctgggtggacgccagctggtctctcatgaccctccccgtgacgcactcgcaaagtaactaccaaggctttctgctccattaacaccaaagctggccctgcaggggaaagaggagggagggaggacgtgggttttgtctagacagaggcactcacaaagccagatgatgcctgagcttccgccacgcaggaagagggtgagcagaggagggcagagaagacctggtgcgtccccctcagggtgccccccatggcagaagtcaccagcagaggccaagaacaatggccaatcccccttcttatccttaaaatcagggtaacaacctttcataggtttactgtgaagatgaaatgagatcacgaatgtg

SEQ ID NO: 391386 - DNA, 315 bp, Homo sapiens
caaataaataaataaataaaatcagttgaattcagtcttttttgaatgtgtatgtgttttacacacaaaacaaaaaagaggcaaatgaaccaaatccaactaaattgctttttacttctgtgtggccttccattgatttatccccccacttcttctgtggtcagcagtggctttttatagaaaaaaaagttcccaggtctctgtcatgcggttattgttttcacaacaatagaaaaaagtttccacccttgtattgtggaccacaagggacaccctctctcaagggatgtaccctgtttctagacttccttccat

SEQ ID NO: 391387 - DNA, 276 bp, Homo sapiens
cttactctcacctttctcagctttgccgctgttttctccttccccatctttcatctttgtttttccccctgactcttccctagtcaaaaacctgattttgggtcttgggttccatttccaccttgatttgctgtgcagccttaggcaagcgtctctacctctctgaacaatggggatgataagagcatgtgccctagaagggcattgcggggactgaatgatttaacgcttgggacagagtgcctgcatgtcattagtgcccacatgctgctggct

SEQ ID NO: 391388 - DNA, 432 bp, Homo sapiens
tttgctgaaaaatcttagaatataaaagtgaacatttggtataattaatatgttgtgctgcaggcataggaatgggatactgaatagaaactgagtgggaaactgaaaaatgacccaatgtaatattttaacgttaaagatgatgttctcaaagcagtgggtgaaaggagaggttactgaataaatgacatttgaacccttctttatttttttttaaagtttcctactaaacactatatagcaaaataaaataaattctaggtggattgaaaacttaagggtaggaacgagccctctagaaggattgaactagcacacggcaatgtttatgcactctcagaagggtcaggcctttccaagtgtcgtccccaaagtggagtcacgaggaaaggacacaagagtggctcagcctcccagaccaaggaaaacaga

SEQ ID NO: 391389 - DNA, 434 bp, Homo sapiens
  misc_feature (399)..(399): n is a, c, g, or t
  misc_feature (403)..(403): n is a, c, g, or t
ttaatatgaccatgatcattgacagaactgcatgtaaggaggtgcatgggctctatttttattaaagagcatattatccaggctgcattaatgtcttccttagctcagtcagactgattcatacagcttaattaaatacagcattctaaccaaataacttgaagattttacttttctgtgtttctttaaattgacctttaactctttttttttttttgggctttgggctttgagccttaattggcttcaccttttgttattggaattggttaagttagttggtgcctctccttgactgaagcttgaacaagtgcattgatttggtgtttgtggccattatctcaggttgtagccgtgagcatttttgttatttgtgcagcttcgccccttgagttgggnttcncgagcttcgaattacgaatctcttggctctt

SEQ ID NO: 391390 - DNA, 601 bp, Homo sapiens
gggctgaagagcttagcccagtgcctgatacaatctgtgtgcgtgaccaagggaccagccaagcttgcccagggtctggaatatcatgggaataccagcccagccacgtctgccttggtgacaaggtttcccagcctcctccttgccctctgagcagagctcctctgagcagtcattttgtcctcacacctaactggacaaaggaaacccagccgtccccaaagatccctttataatcctggctactgtccaggagggaccacttcacagaagaaagatcttggggtctgaaaaccactgccacttatgacctgtgtgacttgggcaagttactgaacctgtctgagcctctggtctgccagggataggaatactcacttcctgggctggttgtgaggatgatgggggatgatgtctgaacatggccacttgtagtagttgctattccctggcggccactccttctccttacagacgtcatacttactcttatttttgtttttattttttttgagacaaagtctctgttgcccaggctggagtgcagtggcgcaatctcagctcactgcaacctccacctcctgggttcaagcgattcttg

SEQ ID NO: 391391 - DNA, 558 bp, Homo sapiens
acatcaatctgtgtgcgtacagacactgcggtctggaatatcatgggaataccagcccagccacgtctgccttggtgacaaggtttcccagcctcctccttgccctctgagcagagctcctctgagcagtcattttgtcctcacacctaactggacaaaggaaacccagccgtccccaaagatccctttataatcctggctactgtccaggagggaccacttcacagaagaaagatcttggggtctgaaaaccactgccacttatgacctgtgtgacttgggcaagttactgaacctgtctgagcctctggtctgccagggataggaatactcacttcctgggctggttgtgaggatgatgggggatgatgtctgaacatggccacttgtagtagttgctattccctggcggccactccttctccttacagacgtcatacttactcttatttttgtttttattttttttgagacaaagtctctgttgcccaggctggagtgcagtggcgcaatctcagctcactgcaacctccacctcctgggttcaagcgattcttg

SEQ ID NO: 391392 - DNA, 341 bp, Homo sapiens
gactctagaggaaacccgacgcttatcgaagccaccctgagtgacgcccggcacaggagaggggacatccatctggcagcctttaatgttgagtctcagcttgaggcctggcccattggtgaagtgagaagccatcagtgactagccttcccctgacccacaaagctggagagagaaacatgtgagctgttgagaagagtggcaaagacttactgtgtttggtgtctgcttcagaaaaaaatgtgagattcctagtggaaacaggaatcctacatttcctgggcaggttgtttaaaggtgggtgggccatggatagttggcggtgagaggaacttcccttg

SEQ ID NO: 391393 - DNA, 486 bp, Homo sapiens
catcccattatagcttgtaaataggtgtcactttttctacttttaagaggaaaggtatcctgtaaaccaagcaatctattcacctgttagctagttatcactgaatcattttgagccccacagccaagattcctagatggcatttggagaaaagaccactcttgaatttccgaataggttgccctttattgttgaggccagacagtgtcttctgtggtcctttcttgaagcaaggttgcttacagacctactctcttggtcccctggagcagtgacttcctcagtcctttggtctttgcctccttaacagtaactggtggctttgccctggttaagagctcttgctgacttccacttgtccttccagtatgggcagtcaggtaactacatggaactggcttggcattgcatggaggagtgcggccaggggactgagagagcttgtcaccagagccttcctgtgctgtgtcaccccacactggtaac

SEQ ID NO: 391394 - DNA, 226 bp, Homo sapiens
aaaaaagagactttaccaaattcctaccttaactttgtcacagaagaatttacagctggttgctaaagataaatgaaattctgtataaatgacatgacgtattactatagatgtttgcgggccatgtcgtatctactataatgtagtgaagtaagtgcgatatatcatggctagttaatacagttgttattgagtttgtctcactgtgtttataatttccagtctg

SEQ ID NO: 391395 - DNA, 480 bp, Homo sapiens
tacattctctttttcctacgagtctctgaaataaaaagcaagttcactgcgtctaaagtaaaatgatggtacaggcattgtgtaagctttccatatccaaaaggaagacattttccagaaatcttcttatttttatctaggccccctcagcctggccttcactgtccatgtttctgtcaacattcttgtcacaaccatttaaccagtctctaagatggcccaaaaatgttctcatctgtctgtcttcttttgagccttccaaactcttccaaccgctaaccattacccagttccgaagccgcttccacatttttaggtatctttatagcaaagctccagtcctcatttgccatttttggtatgatttattttgaaaaagaggtttaattggctcatggttctgcagggtggacaggaagcacagtgcttctgcttctggggggtctcagaaatctttcaatcattgcacaatgcaatgaa

SEQ ID NO: 391396 - DNA, 347 bp, Homo sapiens
cttgaacccgggaggtagagcttggagtgagctatggtcctgtcactgcactccagcctgtgtgacagggcaagaccttttctttaataaataaatattttttaaaaaaatgaaagtgaggagcatatcaaagccaatgcctagtatgagacagaggctcaatatatgttactgtctctggattaaacaacttttccccactcccactttgcttcctttaattcaatgaaccaatatttattgagtgcctatgatgaaaaagaaatcacacaaaccaatgtaattgcaattaacaagtggtagaaatgaggtagtatttagtagattggtctggaaggaccaggtta

SEQ ID NO: 391397 - DNA, 354 bp, Homo sapiens
agatttggaaactgaggttgagaggggtggtgctggggtgaccaagcatcacagtttgctcaggacagcctcagtttacgcctgtggtcccatcataattcttaagggtgctctttccaatctcagaaatgtccctgctcggaggatcaatgatctggtctctgtggcaacaggcctgggccagatcccatcatcactgtcgctgttgacatgtcacccttggggacaagtcaggaaacgcatttccctttctctctatcttggggcagccatgcacacacactcacacacccctttcttcccagatcctgggggaacaggagaaggacaggctgtcccacggtccacccgctg

SEQ ID NO: 391398 - DNA, 503 bp, Homo sapiens
gtaggacaggcatccccatccctttgggttggccttgcagagggggatgccagtagggcccagctgcagtgagtgactcttcagtctcagactccactctggactcctccagactcatggatgcagaacctaacatcaacaggaggatgatctagttttggcactgccattcagagtccaagctagtcaccatccctcctcgggcctcagtttccccatctgagcaaaagaaagaaatgtgactagctctaaggcttctttgcgctgagggtctaaggaatcgaaggcaagttgcctccttcaaggctgggattctctgggtagaggtggtactgggcaactaccagagatgagtatatgaaatagaatagaaccattcttttttttttaaagagagatcgtgttttgctctgtcgcccagtctggagggcagtggtatgatcataactcactgcagccttgaactcctaggcttaagggatcctcctgcccaagcctcccaa

SEQ ID NO: 391399 - DNA, 415 bp, Homo sapiens
gctatgtagtgtacaatatgtagtaggcactccataaaagtgttaaataaatatatgcataaacataaagtggttcattaataactgttcaactctgaagagttacagcaaataaatgttttcaaaataaaatgctctaatctttcatcagtttatgctcagaaaagatggagatgtttacaagagctgtagtaacttgaactactcagaatttcttgatctaaaaatagtacatgctaggcttcctaccactgagcaagtctgacagctgttcattaggttggcacatattaataatatgctttaaagagatggttttgtcttctgttgaagttgaacagcaaactatgatttgctgtagatttttttgaaaaaatgtaaaaatttactaaagtaaaataacaagtgtttctgt

SEQ ID NO: 391400 - DNA, 336 bp, Homo sapiens
taggtagataggtaggtaggtagatagatagatagatagatagatagaaagaaagacagacaggtaagtaggtaggtagatagatagatagatagatagatagatagatagatagatagagtgggctacacatggatgtttttcttgagaggtatacttttgatttgactcaatagccttcatgctatgactcttgtgtagctcgcatcttaatgaggtaagtttaaccctcttacatgtcccactttacataggagtaactggtctgtctcagatgacacagccagtggcatagctgggatggcagtactaagtttgttgactgcctaagaagaa

SEQ ID NO: 391401 - DNA, 686 bp, Homo sapiens
catgacttattgctgatgatattaaccttgaactgttagattagttgtggtctgccaggttactatttgtctttcccatactgtattctttggaagtgaatcattatgtccagcccacactcaaggggaaggaaattaaatgccaccccctagagggagaagtatcaactaatttgtggaaatttattaaaaacactgtaataatttgggtaaaattatttgagcctatgcaactcttcagattctccttaaagtttcactcactaattttagcatgaatcagtggattgtgcctgtggcaattattacagtagtgttctaatgatgattttctgcttcccttatttattctacatttattatttggaatccctctataaagatttttcctttctcccctacttatttattcaacaatgtatatatataagtgtgtactcataaatatttaattatttgggttataatactcaacttatttattttgttggtcaccttgtcccagctttgcccattaggaactctttcatattggcttctgcgttctgttctatttttagtagactttatattttacagtagttttaggtttgcagcaaaattgagcagaaggtaccaagatttcccatattctcccttcctcccctccacatgcatagcctctcccattatcaatagccactgcc

SEQ ID NO: 391402 - DNA, 360 bp, Homo sapiens
tcttccagatcctcaatcatgtgccttatcaccctgcctttccctcaactctcacatggctccagctggttaggcctattattgtttgaccaagcacaagctggacaaaagcaagcttctagtcagcatggctttttgtagaaacagtaaaccagtcattctctgaatacaggtaattttttgtatactgttgtgagtatgtgtatttacaatcttttgtgcattttaaaacatttttgtccctctttaaaaaattgtaaatgaaagtgtccccacatttttgcctttttatttgtaatttatttcagtctattatttctgctttatgctactagctaatagtgaaagttcaaacaacct

SEQ ID NO: 391403 - DNA, 566 bp, Homo sapiens
gattagatgcgagctggtacccgatgagtaagatttggcattttaaagaggattcctctaagaaagattctgtggtttgcagaatgaaaagcattttcagtaagcagaaggctacagagacaggttagcgatttaacctccttgggttgctaactagagtaattcacatctgttacaactgcagcggaaacttctttaaaataaccaagatctcgaaacatagctgtagctgaccatgttctccgctaacaatgagctggaattcaatctgaaggtatactgaagctacttagttacctccactcaaggaaaactgtacagaaaattgctccaattaagttcatacctaccagtccaggacttgtatttgcttttttaaattatttatttatttattttggttttgtaaataacttaacgaactgaagccatataactctattttctctagtaggtaaactaaacaatggatatgtttttcttcaatataatagaaatcatgactaactacaagtaaatgactctgtaaacctcattttctttcttttcctatttttttttttttt

SEQ ID NO: 391404 - DNA, 222 bp, Homo sapiens
cataagggggtatcagtgttagaaaagacattttaactacagcacaggtggcaagtaataggaattcaatattactctaaaccatggtgaccattattattaggatgtgaatcaaaaataagtaaattattagggctgtttgctctgcctgttttctcttctgctgcagagcttttattaaatgacagttggtacctacagtggaaggtatgcaggattaag

SEQ ID NO: 391405 - DNA, 482 bp, Homo sapiens
gacttttgaattttcagttacacttcactgtaatgaatgcatgacagttatattttataataatataagcaaatttggagaatgcaaatttcaggatatatctcactgacataatggatctaatgtatgcaaatccaggaagaaaatccagtgttcccttccccatcttcttttgagcaaaagtctcaaaagaaaagatgttttaaagaactaagaaaagattggggaagaagatgggaaaaaattaaagcacaaataaaacacacaagtaatctttctgggggttgagctggagagagctaacagaccaggtttaggagtgtcgacctaaaggaaaaaactgaggcaaacttaatataagtgaagagtttatttggttgaagtttgaggactagaaccagagagcatatattcaacttgccccgaatatacactcccattagcagtgtacctgctgtaaagtacaagtaaatttttaaagg

SEQ ID NO: 391406 - DNA, 380 bp, Homo sapiens
caaaagaagcaagggttctgaagagaagaaaatatggtggggtgggatagagtgaggaaagatgatggtttcaaaaccttgaaagactttcatatggaaagaaggcaaaatttgttcagtacgtagctttagaggccaaaaatgccaaaaagaagttattatagggcagacacttttaactctaacccttctaagagttagaccctccaaatgcaatagtttaagtatcaatatccttgtgctgtaattgttccaaaagaggctaaaagaccatttattttagaaattggggcaagagtagagggattagattagttggcctcttgagtcctttctcattccaattctgattgtgtgatctaggaacttctcatttaaaa

SEQ ID NO: 391407 - DNA, 344 bp, Homo sapiens
cacgaagccccagcagcagggccggtgctgcagccagaacagtcgcattacgcttgctttctaataaaaggcctggcttcatttttaaattcaaataaaaatactgaaacatgttattatattagaaatattggccgggcgcagtggctcacgcctgtaatcccagcgctttgggaggccaaggcgggcagattacaaggtcaggagatcgagaccatcctggctaacacggtgaaacctcgtctctactaaaaatacaaaaaattagccagtggtggtggcgggtgcctgtagtcccagctactcgggaggctgaggcaggagaatggcatgaacccaggagg

SEQ ID NO: 391408 - DNA, 371 bp, Homo sapiens
ttaaaaacctactgctttagtgtttgcttctgaggaattgtgcataaaacaaattctttttctttaatgccatttgtttttgcttatccatacttcgcttgcctaattttagtgggccgtccgttgaagtggttgtccagagttagaaggatagtataatcatgggatttttcctatgggaattgaatccttgccttcacagttttattagcactttactgtagcttgcagacagaattttttaaacctgattctcttacaaattacatgaaaattcctaataatgtaattggttatgaaataaagaggtaggtacatcatatgtggggctccggtggatagtagtaactgaattcttgcattgttctttg

SEQ ID NO: 391409 - DNA, 399 bp, Homo sapiens
gctcacctgcccctccagctacttgtttggtgagaatgtgggtcacagctgcagctacattttctgcaaaatgccaatgaaataatgaaaggatctgatacctgcttcatggtagatgcaggcctgtgtggttgagacctcccaaggctgtcagcgtgagcacagagccgcctcctgaacagacgactgactttgttggaagtgtaaatgtagaagctttctaatagtttcctccctggtctgggcaccaaaaatcatatttaaaagttggtgtttgtgtaagaaaatatctttatttgggggaggtacactagatgaatgacaggatgctgagaggggacaggtggagcaagtgggaaacgttggcggtggttgaatcagggaatgggtacatgggag

SEQ ID NO: 391410 - DNA, 564 bp, Homo sapiens
gtcgaagcagcagccgcgttggggctggaagggactcagaccctgtgctctgaaacagggcagaaacctgttcaggaacttcaattcctgatgtagttatcacaaacattgtaccatttctgggtaaacgtaagcatccggttgctaatgcccataatccaaacgtgtcactgcagagtacacagaactgttagagaaataaaatacagaactttccagaagcagcaggagctggacatggtgctcatgtctatcacctcagcaactctggaggagtcacctgagcccaggtgttttttctttttgtttgtttttgagatgggtcttgctctattgcccagactggagctgcagtgagctgtgatcacgccactgcaccccagccttggcaacagagtgagaccctgtctcaaaaaaaccaaaaacaccacacacaactaaaggttataacagatgtgaaattggcgtaggtcattctggaagctgcacacattagcaggatgttttgtagagccatcttcacacaaaataaggtttgcttttttctgcatagagtaccttatt

SEQ ID NO: 391411 - DNA, 475 bp, Homo sapiens
gtcgaagcagcagccgcgttggggctggaagggactcagaccctgtgctctgaaacagggcagaaacctgttcaggaacttcaattcctgatgtagttatcacaaacattgtaccatttctgggtaaacgtaagcatccggttgctaatgcccataatccaaacgtgtcactgcagagtacacagaactgttagagaaataaaatacagaactttccagaagcagcaggagctggacatggtgctcatgtctatcacctcagcaactctggaggagtcacctgagcccaggtgttttttctttttgtttgtttttgagatgggtcttgctctattgcccagactggagtgcagtggcatgatcatagctcactgcggccttgaacctgggaggcagaggttgtggtgagccaagatcatgccaccacactccagcccggacaacagagcaagactccatctgaaaaaataataat

SEQ ID NO: 391412 - DNA, 352 bp, Homo sapiens
taaattcgcggccgcgtcgataagctaaataacccaaattacatttctttaaacctgttttactactatggcactttgataaaatggtcaggaaccaactttactggcaaaagggtccatgtaccaccatgtgctggagcatctgttctacatgtggatatctatgaatggtaatgttttccttcatgtaagtgcctattcagagtttcagaattttaaaatgccaaatattttcatggtcatttgcatgtagtaagccagaaaatattcaaagagattttgaaaaccaattgtatttaaccagcctcaaattgtgcaaccatgatgtataataaagaatttgaaacagaaa

SEQ ID NO: 391413 - DNA, 3229 bp, Homo sapiens
gcgcctttgccctctcagaacggctgggcggaacgaggcgagaaagccaagttaagaaaacccagactcagaaggaggtggagcgggactgcgttcaggcaaggtggcagaacgcctcgccgtggacgaagagagcacatctcttcttgcgaggcctaaggaagtagggctcccactcgcctcggcaacccaaggacccagccaaggagagagcctccagatgaatccttcctctcctccttccttcccagccgctcaaactttcacaaagaggaactgggtgcggtaaagaggccggacacggaaccgctcgtccggtgaccgaagagacggcgaggaggagcccgcgaacccgcctctgttcaggccccgcccactcgacgtaatttgcccgcccctctccaccctccgaagggtggagcctgaggccccgcctccaagcggcctctccccggagtgcctggcggccagcagggcggggcaggaggctgggagagggacgggtgcgggggtgggggagaggaagggagcgggtcgcgtgtgaggggcggcccgaggtcacgtgacggagcgccggagcggagggagccggggctgggagttctcctgagggaagaggagtggagtaggggggacgcggcggcggcgttgacaatgagttttcttggaggcttttttggtccaatttgtgagatcgatattgttcttaatgatggggaaaccaggaaaatggcagaaatgaaaactgaagatggcaaagtagaaaaacactatctcttctatgacggagaatccgtttcaggaaaggtaaacctagcctttaagcaacctggaaagaggctagaacaccaaggaattagaattgaatttgtaggtcaaattgaacttttcaatgacaagagtaatactcatgaatttgtaaacctagtgaaagaactagccttacctggagaactgactcagagcagaagttatgattttgaatttatgcaagttgaaaagccatatgaatcttacatcggtgccaatgtccgcttgaggtattttcttaaagtgacaatagtgagaagactgacagatttggtaaaagagtatgatcttattgttcaccagcttgccacctatcctgatgttaacaactctattaagatggaagtgggcattgaagattgtctacatatagaatttgaatataataaatcaaagtatcatttaaaggatgtgattgttggaaaaatttacttcttattagtaagaataaaaatacaacatatggagttacagctgatcaaaaaagagatcacaggaattggacccagtaccacaacagaaacagaaacaatcgccaaatatgaaataatggatggtgcaccagtaaaaggtgaatcaattccaataaggctatttttagcaggatatgacccaactccaacaatgagagatgtgaacaaaaaattttcagtaaggtactttttgaatttagtgcttgttgatgaggaagaccggaggtacttcaaacagcaggagataattttatggagaaaagctcctgaaaaactgaggaaacagagaacaaactttcaccagcgatttgaatctccagaatcacaggcatctgccgaacagcctgaaatgtgaactgaacaggagaaaaaaagaaaagcaaaaaactcctgtaacccttgagattaagttcagcaggttaaagatggttgcagctggagggggcggaaaaaggccaaaactccatatatgttagtcttcctttatcttacagcgcagcatttattttatgatataatgaaatgttcgttcatgtatatacatttttaaaagtgctttctttgaaacactggaactttgttaagctgcctttttttttttaacttcctactttgatgataagcactcagatatatatcagcgtaaacatgaaaaattttcatgtgagtaggctggtatttgtaattttgctttctttctgcataatgttgattataaatcctctcttttcaggctaatgattacctcttattctctacatgcaaaaaattaaatattttgtgttcaaataaaattagaaaacctgagtggcctcttgtgtcctgcagagatttaaaacatggcatctcaatatttttgagaactacatttgtttttaacatatgtgtttgagaaaagcatatggagtgtttcaccgcaggcacttctgagtaccattccatggcttccagaattttatcctctttgaggtcttctgtgctatgaatattagatttctttccccaagggattatgtggcaggtcattatggccttcttttttttggccatattaagtaacagttttgctatattccagtagtaccgttgtgtgttttctgcaatgtggagttgacttagcttggcattttagatttgttaaaactattttttccataaatactttgaaacatatttatatatttcaatttaaggaatctttttgccatgtgtatgcaaatattattttcttcatacattcattttcttttcaggggaaaatttgggatgggggactcaggaggacctgtgaagcatgtagttatctagatctgggtaatttcatgtttattaaactcgaactttggctagttaaactcatattgaaacttcatctagtctcttaattttttaacactaaattcaagtcatttgttttaagtctctaaaaaagaagattgcagtcatccattcatatgcatggggtctgatcgcaaatacactaaatgtggagtgtaggaaccaaaatgaaacctgctgtatggaaactactttcacttatggttcattggtttttgtaccaatattttttatgcacttcagtgcaagtcttgtcagttaaccttactttatgagtaagctaaataacccaaattacatttctttaaacctgttttactactatggcactttgataaaatggtcaggaaccaactttactggcaaaagggtccatgtaccaccatgtgctggagcatctgttctacatgtggatatctatgaatggtaatgttttccttcatgtaagtgcctattcagagtttcagaattttaaaatgccaaatattttcatggtcatttgcatgtagtaagccagaaaatattcaaagagattttgaaaaccaattgtatttaaccagcctcaaattgtgcaaccatgatgtataataaagaatttgaaacagaaa

SEQ ID NO: 391414 - DNA, 2996 bp, Homo sapiens
gcgcctttgccctctcagaacggctgggcggaacgaggcgagaaagccaagttaagaaaacccagactcagaaggaggtggagcgggactgcgttcaggcaaggtggcagaacgcctcgccgtggacgaagagagcacatctcttcttgcgaggcctaaggaagtagggctcccactcgcctcggcaacccaaggacccagccaaggagagagcctccagatgaatccttcctctcctccttccttcccagccgctcaaactttcacaaagaggaactgggtgcggtaaagaggccggacacggaaccgctcgtccggtgaccgaagagacggcgaggaggagcccgcgaacccgcctctgttcaggccccgcccactcgacgtaatttgcccgcccctctccaccctccgaagggtggagcctgaggccccgcctccaagcggcctctccccggagtgcctggcggccagcagggcggggcaggaggctgggagagggacgggtgcgggggtgggggagaggaagggagcgggtcgcgtgtgaggggcggcccgaggtcacgtgacggagcgccggagcggagggagccggggctgggagttctcctgagggaagaggagtggagtaggggggacgcggcggcggcgttgacaatgagttttcttggaggcttttttggtccaatttgtgagatcgatattgttcttaatgatggggaaaccaggaaaatggcagaaatgaaaactgaagatggcaaagtagaaaaacactatctcttctatgacggagaatccgtttcaggaaaggtattttcttaaagtgacaatagtgagaagactgacagatttggtaaaagagtatgatcttattgttcaccagcttgccacctatcctgatgttaacaactctattaagatggaagtgggcattgaagattgtctacatatagaatttgaatataataaatcaaagtatcatttaaaggatgtgattgttggaaaaatttacttcttattagtaagaataaaaatacaacatatggagttacagctgatcaaaaaagagatcacaggaattggacccagtaccacaacagaaacagaaacaatcgccaaatatgaaataatggatggtgcaccagtaaaaggtgaatcaattccaataaggctatttttagcaggatatgacccaactccaacaatgagagatgtgaacaaaaaattttcagtaaggtactttttgaatttagtgcttgttgatgaggaagaccggaggtacttcaaacagcaggagataattttatggagaaaagctcctgaaaaactgaggaaacagagaacaaactttcaccagcgatttgaatctccagaatcacaggcatctgccgaacagcctgaaatgtgaactgaacaggagaaaaaaagaaaagcaaaaaactcctgtaacccttgagattaagttcagcaggttaaagatggttgcagctggagggggcggaaaaaggccaaaactccatatatgttagtcttcctttatcttacagcgcagcatttattttatgatataatgaaatgttcgttcatgtatatacatttttaaaagtgctttctttgaaacactggaactttgttaagctgcctttttttttttaacttcctactttgatgataagcactcagatatatatcagcgtaaacatgaaaaattttcatgtgagtaggctggtatttgtaattttgctttctttctgcataatgttgattataaatcctctcttttcaggctaatgattacctcttattctctacatgcaaaaaattaaatattttgtgttcaaataaaattagaaaacctgagtggcctcttgtgtcctgcagagatttaaaacatggcatctcaatatttttgagaactacatttgtttttaacatatgtgtttgagaaaagcatatggagtgtttcaccgcaggcacttctgagtaccattccatggcttccagaattttatcctctttgaggtcttctgtgctatgaatattagatttctttccccaagggattatgtggcaggtcattatggccttcttttttttggccatattaagtaacagttttgctatattccagtagtaccgttgtgtgttttctgcaatgtggagttgacttagcttggcattttagatttgttaaaactattttttccataaatactttgaaacatatttatatatttcaatttaaggaatctttttgccatgtgtatgcaaatattattttcttcatacattcattttcttttcaggggaaaatttgggatgggggactcaggaggacctgtgaagcatgtagttatctagatctgggtaatttcatgtttattaaactcgaactttggctagttaaactcatattgaaacttcatctagtctcttaattttttaacactaaattcaagtcatttgttttaagtctctaaaaaagaagattgcagtcatccattcatatgcatggggtctgatcgcaaatacactaaatgtggagtgtaggaaccaaaatgaaacctgctgtatggaaactactttcacttatggttcattggtttttgtaccaatattttttatgcacttcagtgcaagtcttgtcagttaaccttactttatgagtaagctaaataacccaaattacatttctttaaacctgttttactactatggcactttgataaaatggtcaggaaccaactttactggcaaaagggtccatgtaccaccatgtgctggagcatctgttctacatgtggatatctatgaatggtaatgttttccttcatgtaagtgcctattcagagtttcagaattttaaaatgccaaatattttcatggtcatttgcatgtagtaagccagaaaatattcaaagagattttgaaaaccaattgtatttaaccagcctcaaattgtgcaaccatgatgtataataaagaatttgaaacagaaa

SEQ ID NO: 391415 - DNA, 2358 bp, Homo sapiens
tctgatagttagaataggtgtggacgtggccctgtatgctttttataaaccaaactctatctgaaatcccaacaaaaaaaatttaactccatatgtgttcctctgtgtctaatcttgtcaaccagtgcaagtgaccgacaaaattccagttatttatttccaaaatgttgggaaacagtataattggacaaagaaaaatgatacttctcttttttggctgttccaccaaatacaattcaaatgcttttggttttatttttttaccaattccaatttcaaaatgtctcaagggtgctataataaataaacttcaacactctttatgataacaatcgtatcatttaaaggatgtgattgttggaaaaatttacttcttattagtaagaataaaaatacaacatatggagttacagctgatcaaaaaagagatcacaggaattggacccagtaccacaacagaaacagaaacaatcgccaaatatgaaataatggatggtgcaccagtaaaaggtgaatcaattccaataaggctatttttagcaggatatgacccaactccaacaatgagagatgtgaacaaaaaattttcagtaaggtactttttgaatttagtgcttgttgatgaggaagaccggaggtacttcaaacagcaggagataattttatggagaaaagctcctgaaaaactgaggaaacagagaacaaactttcaccagcgatttgaatctccagaatcacaggcatctgccgaacagcctgaaatgtgaactgaacaggagaaaaaaagaaaagcaaaaaactcctgtaacccttgagattaagttcagcaggttaaagatggttgcagctggagggggcggaaaaaggccaaaactccatatatgttagtcttcctttatcttacagcgcagcatttattttatgatataatgaaatgttcgttcatgtatatacatttttaaaagtgctttctttgaaacactggaactttgttaagctgcctttttttttttaacttcctactttgatgataagcactcagatatatatcagcgtaaacatgaaaaattttcatgtgagtaggctggtatttgtaattttgctttctttctgcataatgttgattataaatcctctcttttcaggctaatgattacctcttattctctacatgcaaaaaattaaatattttgtgttcaaataaaattagaaaacctgagtggcctcttgtgtcctgcagagatttaaaacatggcatctcaatatttttgagaactacatttgtttttaacatatgtgtttgagaaaagcatatggagtgtttcaccgcaggcacttctgagtaccattccatggcttccagaattttatcctctttgaggtcttctgtgctatgaatattagatttctttccccaagggattatgtggcaggtcattatggccttcttttttttggccatattaagtaacagttttgctatattccagtagtaccgttgtgtgttttctgcaatgtggagttgacttagcttggcattttagatttgttaaaactattttttccataaatactttgaaacatatttatatatttcaatttaaggaatctttttgccatgtgtatgcaaatattattttcttcatacattcattttcttttcaggggaaaatttgggatgggggactcaggaggacctgtgaagcatgtagttatctagatctgggtaatttcatgtttattaaactcgaactttggctagttaaactcatattgaaacttcatctagtctcttaattttttaacactaaattcaagtcatttgttttaagtctctaaaaaagaagattgcagtcatccattcatatgcatggggtctgatcgcaaatacactaaatgtggagtgtaggaaccaaaatgaaacctgctgtatggaaactactttcacttatggttcattggtttttgtaccaatattttttatgcacttcagtgcaagtcttgtcagttaaccttactttatgagtaagctaaataacccaaattacatttctttaaacctgttttactactatggcactttgataaaatggtcaggaaccaactttactggcaaaagggtccatgtaccaccatgtgctggagcatctgttctacatgtggatatctatgaatggtaatgttttccttcatgtaagtgcctattcagagtttcagaattttaaaatgccaaatattttcatggtcatttgcatgtagtaagccagaaaatattcaaagagattttgaaaaccaattgtatttaaccagcctcaaattgtgcaaccatgatgtataataaagaatttgaaacagaaa

SEQ ID NO: 391416 - DNA, 1256 bp, Homo sapiens
agctcctcctcatcatcacgtctagtgatgagctctccattctctacgtgcacatggatcataatatgctgcgtacgagttcctggacatgaccagagtgggctctcgtgtcctgcaagagatgcacgacgtggcctctcagtattgaacgaagatcctacattgggtttctagacatcttgtagttggatcaaatacgcatagtggattgtgttgcacacgtcagagcatctattctgagtaccattccatggcttccagaattttatcctctttgaggtcttctgtgctatgaatattagatttctttccccaagggattatgtggcaggtcattatggccttcttttttttggccatattaagtaacagttttgctatattccagtagtaccgttgtgtgttttctgcaatgtggagttgacttagcttggcattttagatttgttaaaactattttttccataaatactttgaaacatatttatatatttcaatttaaggaatctttttgccatgtgtatgcaaatattattttcttcatacattcattttcttttcaggggaaaatttgggatgggggactcaggaggacctgtgaagcatgtagttatctagatctgggtaatttcatgtttattaaactcgaactttggctagttaaactcatattgaaacttcatctagtctcttaattttttaacactaaattcaagtcatttgttttaagtctctaaaaaagaagattgcagtcatccattcatatgcatggggtctgatcgcaaatacactaaatgtggagtgtaggaaccaaaatgaaacctgctgtatggaaactactttcacttatggttcattggtttttgtaccaatattttttatgcacttcagtgcaagtcttgtcagttaaccttactttatgagtaagctaaataacccaaattacatttctttaaacctgttttactactatggcactttgataaaatggtcaggaaccaactttactggcaaaagggtccatgtaccaccatgtgctggagcatctgttctacatgtggatatctatgaatggtaatgttttccttcatgtaagtgcctattcagagtttcagaattttaaaatgccaaatattttcatggtcatttgcatgtagtaagccagaaaatattcaaagagattttgaaaaccaattgtatttaaccagcctcaaattgtgcaaccatgatgtataataaagaatttgaaacagaaa

SEQ ID NO: 391417 - DNA, 1736 bp, Homo sapiens
gcgcctttgccctctcagaacggctgggcggaacgaggcgagaaagccaagttaagaaaacccagactcagaaggaggtggagcgggactgcgttcaggcaaggtggcagaacgcctcgccgtggacgaagagagcacatctcttcttgcgaggcctaaggaagtagggctcccactcgcctcggcaacccaaggacccagccaaggagagagcctccagatgaatccttcctctcctccttccttcccagccgctcaaactttcacaaagaggaactgggtgcggtaaagaggccggacacggaaccgctcgtccggtgaccgaagagacggcgaggaggagcccgcgaacccgcctctgttcaggccccgcccactcgacgtaatttgcccgcccctctccaccctccgaagggtggagcctgaggccccgcctccaagcggcctctccccggagtgcctggcggccagcagggcggggcaggaggctgggagagggacgggtgcgggggtgggggagaggaagggagcgggtcgcgtgtgaggggcggcccgaggtcacgtgacggagcgccggagcggagggagccggggctgggagttctcctgagggaagaggagtggagtaggggggacgcggcggcggcgttgacaatgagttttcttggaggcttttttggtccaatttgtgagatcgatattgttcttaatgatggggaaaccaggaaaatggcagaaatgaaaactgaagatggcaaagtagaaaaacactatctcttctatgacggagaatccgtttcaggaaaggtaaacctagcctttaagcaacctggaaagaggctagaacaccaaggaattagaattgaatttgtaggtcaaattgaacttttcaatgacaagagtaatactcatgaatttgtaaacctagtgaaagaactagccttacctggagaactgactcagagcagaagttatgattttgaatttatgcaagttgaaaagccatatgaatcttacatcggtgccaatgtccgcttgaggtattttcttaaagtgacaatagtgagaagactgacagatttggtaaaagagtatgatcttattgttcaccagcttgccacctatcctgatgttaacaactctattaagatggaagtgggcattgaagattgtctacatatagaatttgaatataataaatcaaagtatcatttaaaggatgtgattgttggaaaaatttacttcttattagtaagaataaaaatacaacatatggagttacagctgatcaaaaaagagatcacaggaattggtaagttgaaaagagtatgtaaattaaaattctttgttttagttgacatttttaaaatcttaaaatattgtttaaacataatttgatatccacattgagtactaattttgctagttaatattgctggcagtaagttatttaatgtttttttaaattactttttgattgtccagaatttattttttataaaaaattaatttttgaataggtaataaattcacatggttcaaaaataaaatgtaaaagagtatacagtaaaaagtatcttatttctgtactctagctactcataggtaatatgtttattataagtttaaaaatcctcagtggagcaggtcaaaactcctgtgctgatcagtagtgggattgtgcctgtgaatagccactgcacttcagcttggacaacagagtgagaccattccaa

SEQ ID NO: 391418 - DNA, 523 bp, Homo sapiens
gaggtagaaggggcagtcaagattagagctggaagaaagtggaaaagaagttggaaaagaggagggcttttgtagggaagaatttaattttattatggttaaaattgaagtggcaatcaatagagataaggcatcatatcaaacattaatttgttaatatcttgcatttgtttactaggagataattttatggagaaaagctcctgaaaaactgaggaaacagagaacaaactttcaccagcgatttgaatctccagaatcacaggcatctgccgaacagcctgaaatgtgaactgaacaggagaaaaaaagaaaagcaaaaaactcctgtaacccttgagattaagttcagcaggttaaagatggttgcagctggagggggcggaaaaaggccaaaactccatatatgttagtcttcctttatcttacagcgcagcatttattttatgatataatgaaatgttcgttcatgtatatacatttttaaaagtgctttctttgaaacactggaactttgttaagc

SEQ ID NO: 391419 - DNA, 3153 bp, Homo sapiens
gcgcctttgccctctcagaacggctgggcggaacgaggcgagaaagccaagttaagaaaacccagactcagaaggaggtggagcgggactgcgttcaggcaaggtggcagaacgcctcgccgtggacgaagagagcacatctcttcttgcgaggcctaaggaagtagggctcccactcgcctcggcaacccaaggacccagccaaggagagagcctccagatgaatccttcctctcctccttccttcccagccgctcaaactttcacaaagaggaactgggtgcggtaaagaggccggacacggaaccgctcgtccggtgaccgaagagacggcgaggaggagcccgcgaacccgcctctgttcaggccccgcccactcgacgtaatttgcccgcccctctccaccctccgaagggtggagcctgaggccccgcctccaagcggcctctccccggagtgcctggcggccagcagggcggggcaggaggctgggagagggacgggtgcgggggtgggggagaggaagggagcgggtcgcgtgtgaggggcggcccgaggtcacgtgacggagcgccggagcggagggagccggggctgggagttctcctgagggaagaggagtggagtaggggggacgcggcggcggcgttgacaatgagttttcttggaggcttttttggtccaatttgtgagatcgatattgttcttaatgatggggaaaccaggaaaatggcagaaatgaaaactgaagatggcaaagtagaaaaacactatctcttctatgacggagaatccgtttcaggaaagaacttttcaatgacaagagtaatactcatgaatttgtaaacctagtgaaagaactagccttacctggagaactgactcagagcagaagttatgattttgaatttatgcaagttgaaaagccatatgaatcttacatcggtgccaatgtccgcttgaggtattttcttaaagtgacaatagtgagaagactgacagatttggtaaaagagtatgatcttattgttcaccagcttgccacctatcctgatgttaacaactctattaagatggaagtgggcattgaagattgtctacatatagaatttgaatataataaatcaaagtatcatttaaaggatgtgattgttggaaaaatttacttcttattagtaagaataaaaatacaacatatggagttacagctgatcaaaaaagagatcacaggaattggacccagtaccacaacagaaacagaaacaatcgccaaatatgaaataatggatggtgcaccagtaaaaggtgaatcaattccaataaggctatttttagcaggatatgacccaactccaacaatgagagatgtgaacaaaaaattttcagtaaggtactttttgaatttagtgcttgttgatgaggaagaccggaggtacttcaaacagcaggagataattttatggagaaaagctcctgaaaaactgaggaaacagagaacaaactttcaccagcgatttgaatctccagaatcacaggcatctgccgaacagcctgaaatgtgaactgaacaggagaaaaaaagaaaagcaaaaaactcctgtaacccttgagattaagttcagcaggttaaagatggttgcagctggagggggcggaaaaaggccaaaactccatatatgttagtcttcctttatcttacagcgcagcatttattttatgatataatgaaatgttcgttcatgtatatacatttttaaaagtgctttctttgaaacactggaactttgttaagctgcctttttttttttaacttcctactttgatgataagcactcagatatatatcagcgtaaacatgaaaaattttcatgtgagtaggctggtatttgtaattttgctttctttctgcataatgttgattataaatcctctcttttcaggctaatgattacctcttattctctacatgcaaaaaattaaatattttgtgttcaaataaaattagaaaacctgagtggcctcttgtgtcctgcagagatttaaaacatggcatctcaatatttttgagaactacatttgtttttaacatatgtgtttgagaaaagcatatggagtgtttcaccgcaggcacttctgagtaccattccatggcttccagaattttatcctctttgaggtcttctgtgctatgaatattagatttctttccccaagggattatgtggcaggtcattatggccttcttttttttggccatattaagtaacagttttgctatattccagtagtaccgttgtgtgttttctgcaatgtggagttgacttagcttggcattttagatttgttaaaactattttttccataaatactttgaaacatatttatatatttcaatttaaggaatctttttgccatgtgtatgcaaatattattttcttcatacattcattttcttttcaggggaaaatttgggatgggggactcaggaggacctgtgaagcatgtagttatctagatctgggtaatttcatgtttattaaactcgaactttggctagttaaactcatattgaaacttcatctagtctcttaattttttaacactaaattcaagtcatttgttttaagtctctaaaaaagaagattgcagtcatccattcatatgcatggggtctgatcgcaaatacactaaatgtggagtgtaggaaccaaaatgaaacctgctgtatggaaactactttcacttatggttcattggtttttgtaccaatattttttatgcacttcagtgcaagtcttgtcagttaaccttactttatgagtaagctaaataacccaaattacatttctttaaacctgttttactactatggcactttgataaaatggtcaggaaccaactttactggcaaaagggtccatgtaccaccatgtgctggagcatctgttctacatgtggatatctatgaatggtaatgttttccttcatgtaagtgcctattcagagtttcagaattttaaaatgccaaatattttcatggtcatttgcatgtagtaagccagaaaatattcaaagagattttgaaaaccaattgtatttaaccagcctcaaattgtgcaaccatgatgtataataaagaatttgaaacagaaa

SEQ ID NO: 391420 - DNA, 1817 bp, Homo sapiens
  misc_feature (1541)..(1541): n is a, c, g, or t
  misc_feature (1707)..(1707): n is a, c, g, or t
gcgcctttgccctctcagaacggctgggcggaacgaggcgagaaagccaagttaagaaaacccagactcagaaggaggtggagcgggactgcgttcaggcaaggtggcagaacgcctcgccgtggacgaagagagcacatctcttcttgcgaggcctaaggaagtagggctcccactcgcctcggcaacccaaggacccagccaaggagagagcctccagatgaatccttcctctcctccttccttcccagccgctcaaactttcacaaagaggaactgggtgcggtaaagaggccggacacggaaccgctcgtccggtgaccgaagagacggcgaggaggagcccgcgaacccgcctctgttcaggccccgcccactcgacgtaatttgcccgcccctctccaccctccgaagggtggagcctgaggccccgcctccaagcggcctctccccggagtgcctggcggccagcagggcggggcaggaggctgggagagggacgggtgcgggggtgggggagaggaagggagcgggtcgcgtgtgaggggcggcccgaggtcacgtgacggagcgccggagcggagggagccggggctgggagttctcctgagggaagaggagtggagtaggggggacgcggcggcggcgttgacaatgagttttcttggaggcttttttggtccaatttgtgagatcgatattgttcttaatgatggggaaaccaggaaaatggcagaaatgaaaactgaagatggcaaagtagaaaaacactatctcttctatgacggagaatccgtttcaggaaaggtaaacctagcctttaagcaacctggaaagaggctagaacaccaaggaattagaattgaatttgtaggtcaaattgaacttttcaatgacaagagtaatactcatgaatttgtaaacctagtgaaagaactagccttacctggagaactgactcagagcagaagttatgattttgaatttatgcaagttgaaaagccatatgaatcttacatcggtgccaatgtccgcttgaggtattttcttaaagtgacaatagtgagaagactgacagatttggtaaaagagtatgatcttattgttcaccagcttgccacctatcctgatgttaacaactctattaagatggaagtgggcattgaagattgtctacatatagaatttgaatataataaatcaaagtatcatttaaaggatgtgattgttggaaaaatttacttcttattagtaagaataaaaatacaacatatggagttacagctgatcaaaaaagagatcacaggaattggacccagtaccacaacagaaacagaaacaatcgccaaatatgaaataatggatggtgcaccagtaaaaggtgaatcaattccaataaggctatttttagcaggatatgacccaactccaacaatgagagatgtgaacaatcacatcatgcatgatgtgattgttacaaaccttttttttggttttttcctcttctttgagactgggtctcggtctgccgcccaagctgnagttcagtggctcaattatgacttactgcagccttaacctcctgaggcccaggtgatcctaccacctcagcttcccaaatagctggtactacagggacacgccattacacccagccaatttttgtatattatgtagagatggggtttaccatatggcccaagctgncatatgggtcagctggcatatgcctggcctaaaccaaaccattttactagcacctttctgtcacttaatgatgagccatttgattcattgacttcactgaacaatcacat

SEQ ID NO: 391421 - DNA, 1394 bp, Homo sapiens
gcgcctttgccctctcagaacggctgggcggaacgaggcgagaaagccaagttaagaaaacccagactcagaaggaggtggagcgggactgcgttcaggcaaggtggcagaacgcctcgccgtggacgaagagagcacatctcttcttgcgaggcctaaggaagtagggctcccactcgcctcggcaacccaaggacccagccaaggagagagcctccagatgaatccttcctctcctccttccttcccagccgctcaaactttcacaaagaggaactgggtgcggtaaagaggccggacacggaaccgctcgtccggtgaccgaagagacggcgaggaggagcccgcgaacccgcctctgttcaggccccgcccactcgacgtaatttgcccgcccctctccaccctccgaagggtggagcctgaggccccgcctccaagcggcctctccccggagtgcctggcggccagcagggcggggcaggaggctgggagagggacgggtgcgggggtgggggagaggaagggagcgggtcgcgtgtgaggggcggcccgaggtcacgtgacggagcgccggagcggagggagccggggctgggagttctcctgagggaagaggagtggagtaggggggacgcggcggcggcgttgacaatgagttttcttggaggcttttttggtccaatttgtgagatcgatattgttcttaatgatggggaaaccaggaaaatggcagaaatgaaaactgaagatggcaaagtagaaaaacactatctcttctatgacggagaatccgtttcaggaaaggtaaacctagcctttaagcaacctggaaagaggctagaacaccaaggaattagaattgaatttgtaggtcaaattgaacttttcaatgacaagagtaatactcatgaatttgtaaacctagtgaaagaactagccttacctggagaactgactcagagcagaagttatgattttgaatttatgcaagttgaaaagccatatgaatcttacatcggtgccaatgtccgcttgaggtattttcttaaagtgacaatagtgagaagactgacagatttggtaaaagagtatgatcttattgttcaccagcttgccacctatcctgatgttaacaactctattaagatggaagtgggcattgaagattgtctacatatagaatttgaatataataaatcaaagtatcatttaaaggatgtgattgttggaaaaatttacttcttattagtaagaataaaaattcacctattggggttccgttggtccaaaaggggtccctggattgggcgcagttccacacgaaaggaaacattgccatttgaataggttgtgccgtaagggatcctcccaaaggcttttggggtgccaca

SEQ ID NO: 391422 - DNA, 255 bp, Homo sapiens
ctctgctattttctaacattaaaattacaaatcaatcatcagattaaccatgtaaataaaagtcaaaagctacgaaaagcatactcattcaattcattgatctatacctttatatttctatgtaagaatcagcctgatcttttaaaatactgtaagaattcataaaattgaagtaattccatatgtagtgctgctctgttacttgtgatcttttactattctggtaataaccgataaagaagcagagcacatttg

SEQ ID NO: 391423 - DNA, 728 bp, Homo sapiens
ctgagagtaggcatttgtgctgactggcagtacccagagggccgacatctgttgcctgcaaggattgactaggaagctggacagctttcaagtacatctaacagtcatggcaagtctaatgctggtaaatggtgcagaatcaatcatgcagtccagttttgatacagttctaaaacctcatattcctgactaaggaagccagaggtaaagggacaatggtctctttcttcccctgaagttatttctgttagctggtaaaccagagaccacatgagaaagagaagaaacaggttttctcggaggtctttccggtgtgcaaggcctgcctagacaaaatatggttcaaactccgccaaaaatgttcatagaagacacatttgagatcatttgttttcttcctgcctttctgggaaaaaaagaattgctttgttttgtgaatatatgtacacatcaggtataaaaaaacacgtaggctttggtttgtattcaaagacttccagtgaaactgcgatagtccaaattgcaccgtgttgtttttcaaggaaacactcagtacagccacgcagcctgtgcagggcgacatcgtaggggcctggggtgggaaagggcaacaccaccgcacacccccaccccactggtgtctctgtccctcccacgggccctgcccgcctgactcagacaagggccagcctcagttctggctggaaagaagtcagccgttccctccc

SEQ ID NO: 391424 - DNA, 376 bp, Homo sapiens
gccaggctggtctccaacccctgacctcaggcgatccgcaagcttccacctctcaaagtgctgggattacaggtgtgagccactgagtctggcctgctttgggtttttaatattgttctatcaatttggattcccaatggtaaatttgcatagtttgcatagttagaagtactggttgttcactgtttctgtctggatagattagaatcataaaatgttagtgctgagaggacttagagatgatctggtgcagccccataatttttttacatcaagagactgagaatgtgagaacagtaatttcctgtttcccagcttccaccacagcaaactttaatttctgcactttggtcaagaaatgatcatcatatgacca

SEQ ID NO: 391425 - DNA, 500 bp, Homo sapiens
ctgagagtccagaaataaactcttacatttgtggccaatcgatttttggcaagagtgccaagatcattcaaaggggaaagaagagtctgttctacaaatagtatgagacaacatacatatgcaaaagaatgtgtttggacctctaccacacaccatatacaaaaattaactcagatggatgatatacctaaaggtaagagctaacactataaactcttgaaataaagcatgagtaagtcttcaagggttcggatcagaatatgggttttgagatctgacaccaaaagcacacgggacaaaagaaaaagtagataaactggtcttcatactacagtctaagggcttctacttttctcagctaagtttagtgtgagacactcagctgagtatggaaaaaggtagagaggtatgaggaaaggaaatataaaaggggtgatctgtagaacgaaagactaagaaacacaataagattgctagctagtgttcagagtccaaatcca

SEQ ID NO: 391426 - DNA, 490 bp, Homo sapiens
cagtgttgatccatttcccacacaaaggtggtgggggtgtggtctgggaggggagtcctgcagaggcccatggacaagtgcagccttggacccactgtgctctcagctccacccggtcccgtgggggcccaagacttgccctgtccttcagatgaacgaaaaacacaagcacaggcaagacttgaaacagcacaggactgtttgtaatccaaagtcaggaatgtgctatggacagtggcccatggcatgggtcatcctgagggtccaggggaggcaggctctgccaaaggaggctgcaggtaggatgtgcttgatacagtcttggtactagtatggtagtcactacccacatgccgctatgcaattttacctttttgacttgatattactaatcattacgcctgcttacttatttattttttgagacagaatctctctctgtcacccaggctggagtgcagtggtgccatcttggcacactgctacctct

SEQ ID NO: 391427 - DNA, 645 bp, Homo sapiens
tttcgtgttatatgagttttaccttaataaaaaacagtaacaattttaaaaatcagaaaagggggccgggcatgttggctcacgcctataatcccagcactttgggaggccgaggcgggtggattgcctgaggtcaggagttcaagaccagcctgaccaacatagtgaaaccccatctctactaaaaataaaagaattagctgggcatggtggtgggtgtctgtaatcccagctactcaggaggctgaaaggaggctgaagcaggagaatcgcttgaacccaggagacggaggttgcagtgagctgagattgtgccagtgcactccagcctgggcaacaaaagcgaaactccgtgtcaaaaaaaaaaaaaaaagaaaagaaaaggatttgaatagacgtttctccaaagaagatgtgtaaatggctaagcatattaaaagatattatcagcatcagtagtcattaggggaatgcaaatcaaaaacagaatgtgatactactttacacacactagggtatctacaataaaaaagacagatattaacagttggaggggatgtaaataatttgcaacccttatgcattgctggtggaatataaaacagggcagttgctgaggaggtcaatttgacacttcctcaaaaa

SEQ ID NO: 391428 - DNA, 358 bp, Homo sapiens
tttgggtatcaccatcaaacaagtatctgaagaaatctcaatgaatgttattattattattgcttatttatgaatctcatttcacaaacttgggaataaagtaaatattactgtctttactttcactaatgtatcctaatttctgtctccgagtcctattttgcttacctagtagaaaacttaagcttaggtctttctggcattctcaacctcaagagtgaatcacaattccttgggcttactgcaaagtatgaatataggacaaccttgtcttgagtcattgagcctacaggctgacttgaccataagaagtctgttgtttctatcctcatagcttctttaggtttactataacagc

SEQ ID NO: 391429 - DNA, 526 bp, Homo sapiens
ttaccaacgtgacagttgaggctgagagaggttcatgagcttgctcaaggccacgggtagtaataagaggcatggccttggtgccaagcgcctcccaaacaaacagccggggccgtggtcctgcctaaactctcacatccacggcaccacgctgggcccaggcaacagagataaggagagccctggctcttgggatggggtcgcgccgattcacatgctgtgccgcggagccccggcttccatccatgatgtgcccctgtggcgggataattgggaaacaacctttttctgattcccagagaactaatgagctgcaaaaagagattagacagggaagaattgctttcggggagaagccacttactcggctcgccttggtttttgctaacaacgtctccttaaactgctgtcaaatctttttctccctgtgtaggattcatcaatcttcgtatgcaaaagaacaccactgcactgcactgctaaaaattcacacaataaaatggactttaacttgcaaaaaaaaaaa

SEQ ID NO: 391430 - DNA, 178 bp, Homo sapiens
catccattctctgttatcacttatctatttgtctttctgttctgctttctgggagatttccctgagcttatggtttaacccttttaagaaaaagcatgggggaggggtatcatcatttttatttttagattctcttttccagttgttccttgttttattggcatctgaatgttgttca

SEQ ID NO: 391431 - DNA, 127 bp, Homo sapiens
tcaactctactttctcttctgcttttccttttattcttatttaataatttgtgaacaaaatttctttcttgaagtcaaaaatctatcatctttttatcaaacatgcccaatttgggttcattgatta

SEQ ID NO: 391432 - DNA, 366 bp, Homo sapiens
ttgcatggcagaaacagtactcttatttatagttttactacagtgtttaagtgaacagcctactataaggtaaataatgagggctaggattaggagtacaattaccagttttaaaagcaaagatttgcttctaaccctcaaagaatttagaatttagtttaaactgcagaaaaaacctcaagaacagctaacaacagtgtagtatagtttttcttttgaatcataatttttctctctccagtcatcatttttattaaaaacaaatcaagaaatggtttgtttataaaatgaattttactcttactgtacttggcctgattatttgcataaagtacagcaagagtaattatttttcatgtaagcttt

SEQ ID NO: 391433 - DNA, 513 bp, Homo sapiens
acacagcccaggacgctaggccttttctgggccgcccccgccgccccaggccgaaactccatccctttcccccaccctgccgagctcccgaagccctgtggcggctccgggcaagaactaagggcggcccctgcaagcgtacctgctccgccggctccgcggggccaacgaagcgtcccggaaggatccgggttcccggggccgctgcgcctccctgcggccggggcggagccgcgcaaggaaacgcgggcggggcgcgggtctggaatggcctggggaccagtccacctcgaggcagggtcaggcgccagggagtttggagacccggcagagtcaccccgcaaccgtcccgttgccttgggtcgggattcctttgctttgcagtctacagtagcgctccccgctcttgcttaaggtgcaccagacgcttcgcaaacgttctctcttttctttacaacccgtcaaggcagtagtctcccagttttacaaatgagctaaactgatacaggaaga

SEQ ID NO: 391434 - DNA, 718 bp, Homo sapiens
agacagtggagcagctgggctgtgtggtgtagacagtggagcagctgggctgtgtggtgtagacagtggagcagctgggctgtgtggtgtagacagtggagcagctgggctgtgtggtgtagacagtggagcagctgggctgtgtggtgtagacagtggagcagctgggctgtgtggtgtagacagtggagcagctgggctgtgtggtgtagacagtggagcagctgggcggtgtggtgtagacagtggagcagctgggctgtgtggtgtagacagacagtggagcagctgggctgtgtggtgtagccagttgctcttaggctgtttttcctgttgcttcaggcctaaatttggacagtgtgtgactgtgctgaataatgtgggcagttgtaacacaacagcaagtatttgtgtatctaaacatagaaaaggtgatgtgttgtgctccgatgttacaatggctacaacatcattagcaataggaatatgtcagttctgttataattttatggaaccactgtagtatatgcagtctgtagtgtaccgaaacaccatcatgtgacacatgtatgtatacagtggatatacacaggtgatctgcaaatattatgccattttatatctgaaacttcagcatcctcaaattttggtagctgtgggaggtcctggaactaactcccatatataccaaaggatgactgtatataaaactagccta

SEQ ID NO: 391435 - DNA, 660 bp, Homo sapiens
agacagtggagcagctgggctgtgtggtgtagacagtggagcagctgggctgtgtggtgtagacagtggagcagctgggctgtgtggtgtagacagtggagcagctgggctgtgtggtgtagacagtggagcagctgggctgtgtggtgtagacagtggagcagctgggctgtgtggtgtagacagtggagcagctgggctgtgtggtgtagacagtggagcagctgggcggtgtggtgtagacagtggagcagctgggctgtgtggtgtagacagacagtggagcagctgggctgtgtggtgtagccagttgctcttaggctgtttttcctgttgcttcaggcctaaatttggacagtgtgtgactgtgctgaataatgtgggcagttgtaacacaacagcaagtatttgtgtatctcaataggaatatgtcagttctgttataattttatggaaccactgtagtatatgcagtctgtagtgtaccgaaacaccatcatgtgacacatgtatgtatacagtggatatacacaggtgatctgcaaatattatgccattttatatctgaaacttcagcatcctcaaattttggtagctgtgggaggtcctggaactaactcccatatataccaaaggatgactgtatataaaactagccta

SEQ ID NO: 391436 - DNA, 380 bp, Homo sapiens
acatacccaaacaggctctagaagaaaaagaaaattgagagacctataacaagagactgaggcagtcatcaaaagccattaaataaaaagtccaggaccagctgggcacggtggctcacgcctgtaatcccagcattttgggaggccgaggcgggtggatcaggaggtcaggagatcgagaccatcctggctaacacggtaaaaccccatctctactaaaaatacaaaaaattagccaggcgtggtgatgagtgcctgtagtcccagctactcgggaggctgaggcaggagaatggtgtgaacctgggaggcggagcttgcagtgagccgagattgcgccactgcactccagcctgggcgacagagcaagactccgtctc

SEQ ID NO: 391437 - DNA, 712 bp, Homo sapiens
gtgggtggatcaactgggttcgagttcgaaaccagcctgaccaatatggagaaaccccgtctctactaaaaatacaaaattagccaggcgtggtggcacgtgcccgtaatcccagctacttgggaggctgaggttgtagtgagccaagatcgtgccattgcaatctagcctggacaacaagagcgaaactccatctcagaaaaacaaaaaaaaattatcctcttattctcagaattctgggaggaagggtgaggtgaggaggaggtgacactgatcaacaacagtgggcatttggatgagcttgggtgttcttcaagcctcctttcaaagcagtcatattttaaattctgataataacagaaactggttctttctttttaccttctttgaagagagctcataccagatctttcagcgtcactgtgtatctggcctcttgtgctttaaatttgagcctgacaaaaatccacggtgcttcagcataacaaaatgccgaatatgggacttctttgttcagtatgagaagacatgtttgagatatggacttaaccataggtgatactaagaacttatttcttcaggaatagtaatgcatggtgtttatgtttttttcaaaagttctcatcagttatagacaacacattgtagtagttataggcagaattacatagggaactcgaacccagtgtggggtcctctaggtcgcccgcga

SEQ ID NO: 391438 - DNA, 330 bp, Homo sapiens
tatattatgttaataaaatcatgtataagcaaaagacctatgaaagtataaaacagaccaatggattttagtataaaagtacaaaacgttcattgaggtgggttcagttttcccacaaaaactaacctttaagaaactaccacttatcaagttttggtataaggtataatatgaaagaagaaaatccataattatttgaaaaacacgacttaaatacttttcttttttcctactacatatctctattaggctgggttttcttcacaactaattgaatacaaaaacaaatatgagaatttagctgtaatctattaatccagacattacaga

SEQ ID NO: 391439 - DNA, 343 bp, Homo sapiens
ggacaagaggctctactgtggattcagtggcaaagaatgggaggggcagagtaagcaggtttaggattatcgggtttgaatgacttgattgagctgtagggtgtagagactgcctctactgtctggcaccaggggtaattagggcagctggatagtggtctggagtgtgagagctccctaaaggaggtggttggaggtgtaggttttggattggttgatctgtatatgaaaggtgcacgtgcagggtgagtcctctactatcactagaaattggctggtcccaggagaagtagtctctctagagacagcaatgccccagatgtcaaagcatcagaaaatacag

SEQ ID NO: 391440 - DNA, 700 bp, Homo sapiens
taagttatcacagggttggagaatgcagttgcattattagcttttaaaatgatgcaactgttgattaaagaaaattaaattgaactttgtaggttctttcatataagtaatccatttcttttttgtgtgaaaaggtgagctgttggctcaagctgaggccatctcatcctatatctaaaaaggatatctcaggaggtgaggagagggtggtgcctccttcatgggctgacaggattgtaggttggtatgccctctttgcagaacaagttggcagacagaacctaacagatctgaagatgtatgctcctagtacatagcaatttcacctttaattatgtgacttggacaaaatcttttacatatgcagaaagagatgttcattgcagcaatgtttgtcatgctggacatttgtaaataacctagatgccacttaatggggacatgaatgaagcaaaggtggtgtatttcgtgatagactactgtgcatcagtcagaaggaatacaagtaggtctctttttaatttgatactgcatgtgggttccctgcattaatatggacaggctcagaaacgatattgagtgatgaaaagaagatggagactggtatctacgttggatgttacttgtgtgaatttttactcaatgtaccaagcaacatggaatgtagaaatgtatcaagaggaagatacacacagagttt

SEQ ID NO: 391441 - DNA, 306 bp, Homo sapiens
gctgccaccctcctttggtgactttgcctctctctgcctctttactccctgcacagaggggcaaagaggcacatcctccagggaggcagggctaggtggaagttaaggtgatgggctttggggtccggcaggcctgagttcaattcccagctctgctgtgtgctgttatagctacgtggccttgggcaaatcccttaccactgtgagtattgctttattcacctgtgaaatgggagtaacacggtacctaccttctaggctgttgtgaagattaactgcaattctgcatggtgcttctgatagggt

SEQ ID NO: 391442 - DNA, 250 bp, Homo sapiens
ggtcgacgaaagggataatctcttctacacatggtattggaaaaactgaataacctcatgcaaacaatgaaattggatccttctcttacgctatacaaaatacatcaactccacatggaatacattttttctgtattttttctaggagttttaccgtttcacgtcttacatttaaaaatttattccatgtggagttgatgttttttgtatagcgtaagagaaggatccaatttcattgtttgcatgaggt

SEQ ID NO: 391443 - DNA, 777 bp, Homo sapiens
cgcggtggctcacgcctgtaatcccagcactttaggaggccgaggcgggtggatcacgaggtcaggagatcgagaccatcctggttaacacagggaaaccccgtctctactaaaaatacaaaaaattagccggccgtggtggtgggcgcctgtagtcccagctactcgggaggctgaggcaagagaatggagtgaacccgggaggcagagcttgcagtgagcggagatcgcgccactgcattccagcctggggacagagcgagactccatctcgaaaataaataaataaataaataaaaaataaaagatactaatcacctcaaaggaagctgctggagagctcctttaattcaactaatcaacaatattatgcaacggcttttttaaaaaacatgttcaaggatcatacattttactcagtcttttatataatttggcagggaatcaaggcatattaggaaattcacagaaaccataaacataaaaaaatgcataagtcctcagttcagtaaccacacaaatatttccgagaacacatccaaagccactttcccttctgcaaagctgttataaaatgtacttagcgtcgggcatggaggctcacgcctggcttacaggcgggcacctgtaatcccagctacttgggaggctgcagcagagaatcgcttgaagctgggaggtggaggttgcagtgagccgatattacaccctggccctccagcctgaatgaccaagtgagactctgtctaaaaaaaaataataataataaaataaata

SEQ ID NO: 391444 - DNA, 405 bp, Homo sapiens
gataactctgagagcaggcaggtgttccgagggccccagccagggtcagggccaggaggcctgggcagagccctcaccctatgccgatggccagcctgtgacctcacataagccaagaggcttcctgggccggatttctatagtaaccggccactgggtctgccggcatacgtcgcctgactttctgctgttctattctttggcagaacacccttcccctgcctgctggctgcctggaactgaatgaagccaccgtgatttcagggagagatcccggctcctgccctccccaccagcttcagcagaactctgccctcttgggtcatgcatttcctttccttacttcaccagctctggttgtacacatccgagactccccaggactctaccaagggcctgatagag

SEQ ID NO: 391445 - DNA, 106 bp, Homo sapiens
aaacgctgaataaaaccaagcaatgacatttctggtatgtcactccaagtagcttaattttaatggataaaatgtgctcattcatatacccatccattcattcatg

SEQ ID NO: 391446 - DNA, 788 bp, Homo sapiens
tacaggacttatataccaaaaactataaaacactgacgaaagtaatgaaggaagacctaaataagtagacatatcatattcatggattaaaagactcaagatgatgtcagttttccccaaattgatatacagatttaatgcaatttctgtgaaaatcccagcaagattttttttgtagataagatggttctaagatttatatggaaaggcaaagaaactaaaatagctaaagcaatttatttattattattattatttttttttgagatggagttttacactccagcctgtgtgacagagcgagactccaatcaaaaaaaacaaaacggaaaacggtaattatccctgtgaagactttccttaaaagaggggtctacaagaagggaattgttggccggcttgggtgtccccaaagtgcgggaataacgggcgtgacccaatgtggcccggccaattgatgggagaattctcaggaaaactggacggttaaagcaatgtgcaggatatttcccacgttacggaaggacacgaattgttaatctagaaatcgtgtaccccagctggacaatatttgtccgggaatgaacgcaatctggacaattcttttgtgatgatcggggacgggatcaccacttgtgggcccccaggaggagggcggggaaaacatcagtaggggacatcggcctaagtaagcgaaattggggccgctcggaaatggcagagaggaccccaggggaaatggcttacggaggaagtcaggtagcgagtgttaaacccgaacgggggca

SEQ ID NO: 391447 - DNA, 292 bp, Homo sapiens
aggtgggggggggggcaatagggagccattgaagatgcttcagttgtggagagggggccaggatatgacttgtgttttaagatccatccagctgtcaggtggataatggattcatcaaagggctgcaggaggcagggaagagggacagacgaggacttagatgaggatggtgtaggggcggggtggccagcagtagacaggggcccaccgtccagtagaactttctgcagtggaggaaatgccgtgcacctgccccaatcactgcattagccatgagccccgggcggcagtt

SEQ ID NO: 391448 - DNA, 420 bp, Homo sapiens
gctacacagtggtagaaaattagtacaagatgaaaaagatttaaaaggaaatgacagatatacatatataggaaacaggcaaggaagaccctgtacacatgggtacacgtgcatgcgcacacacacacagatatattagttcctaaagaaataaaatcagccaggcgcggtggctcacgcctgtaatcccagcactttgggaggctgagacaggtggatcacctgaggtcaggagttcaagaccagcctcaacatggagaaaccctgtctctactaaaaacacaaaattagctgggcgtggtggtgcaggcctgtaatcccagctactcaggaggctgaggcaggagacttgcttgaacctgggaggcggaggttgcagtgagccgagatcgtgccattgcactccatcctgggcaacaa

SEQ ID NO: 391449 - DNA, 272 bp, Homo sapiens
tccatttcagatttccatttcaccctatatgttggttataatctttgcgatacgattgcttatcctagattagaaatgcataagtagaatactacccttatatctaggtgaagtgactgcctttatgatgtggtattaggaatccttaaaaagacaacacgccttctcgttaacatgtagccctttgccatggtatttccattttagtaagctttccttagtaaagtctgctttcaggtaccattcaatgagataagtattaacggtcgacg

SEQ ID NO: 391450 - DNA, 122 bp, Homo sapiens
agtggagagtgagtggtagaaggtagaaggcagaaaacaggaagctgttatagttttccatttattttttgagacagggtcttgctctgttgcccaggctatagtgcagtggtgcaatctta

SEQ ID NO: 391451 - DNA, 355 bp, Homo sapiens
tctagaggatcctacgagtgtatgtggcggagtgatattggcggagtgaatggctggcggagtagatagctggcggagtggatgctggcggagtgaatagtcacacttgcaattccatcactttgggaagctgaggtgggaggattgcttgaacccaggaattgaagatgggcctggacatggtgaaatcgccatctctacccaaaaaaaacacagaaatgaccggtgtgatggcgtgtgtctgtagtcccagctactcgggaggctgaggtaggaggattgcttgagcacaggaggtcaaggctgtagtgagccatgatcacactactacactccagcctgggtggcagagtga

SEQ ID NO: 391452 - DNA, 432 bp, Homo sapiens
ccacccttcttcagtaagcgcttacctaccccgaaaccaccccatacccctcttggtagttttccttggtagcactacagttggacttcactagcaccccccaaggtttcatctcctcttcctctactctgatgtcttgacgttttgactcttttgtgcctagtttaactctcacactattttaagataaagctggtctttctgtgtcttggctctaagccccaccaggtctatttttcaaatgcaattcatcaaagtcctggcccactctccatgtgtggcttgccctcgctcctggactgagatgctcctagaagtagctcctttccaggaccctgaaggttggatacaattttacttgacaataaggggaaggaaaatattctatggagaagatatgtcacagccaattagccttccttggactaaaag

SEQ ID NO: 391453 - DNA, 498 bp, Homo sapiens
ttaagatagtacgtcttatgttatgttaccacgatttaaaaattggaaaaaagttggcgtgctgaagccctggcctgcagagaggggcgagcagtccccagagattctcgccagctgcttcacgtccgagaatccaggagcccagaggctgagcaaggcctcagacagcagagccctgcattcccagtttctgggagttgagcccaagtgagccctcctgaaatggtgcctaggagagagcagcagaccccgcagcaatgtcctccctcaatggcctttcacagccatcggggacaccaggttgaaggcacagggactgggaggcaccagagaagcctcagctacccagggtggtgtgagctgggcattgggagccagggcaggcagcacgtgcttctccatggggaggtgacaggcagccttttggggagatgactccagtgaaatgcacatgatgccagacaggccctgctgggtgccctgagcccacacacagga

SEQ ID NO: 391454 - DNA, 621 bp, Homo sapiens
ataaataggatattaaattcaactggggtattagattataaattagttctgtaataggcgtcataatgttatttaggttttcagtttacacagaccttgtagcaactccccagagctatgctacagaattagaagtagatggaagttgatgtaagaaaattggtttttgtaatatgctgatgccagtagagttgtgctgtgtgtaagtaaacgtatttaaatagcacgctcctacttacttgattgtacagacaaaagattgataataatttcaaatgattgatttgttggtgctgatattggccatatgtgaaactaaaatatttctttccaaaattgaagcagtacttcccgtgtgagggctaagaatccgggttgtagaaagcataagactatcctctgaatagatgtttctttttcatctgattggtgtaacagtggtatcacaaatatttcttagcggcaaagtttcttggtccttttagttatatttcacatggaggaagatactctacccaggaaccctgtgtggttattgaagtcattagcaaggagggtataaccttagtgaatcattacccatgggacacaaatggaaaacatgcacatttaatttaaaaa

SEQ ID NO: 391455 - DNA, 380 bp, Homo sapiens
gtggaggtgactggatttctgacccgatttacagagagatgcctgtgtcccagcaccatcactcagagaaaaacgtggaagccaatttgcacaggcatgggaagttttccatcaaccaagatagcagaaacacaaatgagaatagatgagcgcacccaatgctaggaagcagagagtctggggcaaaattccaaaaagccgagccacttacagaaaagtttcacaaggtggggaggtattgcaacaccgagaggatgatttggattcttacgtgcagccgttggatgccagaaagatagagaagatgaagatatggtcatacatttctgtcttgagaagaagatctggtagtaatacttcagggattttgtagtcttccc

SEQ ID NO: 391456 - DNA, 362 bp, Homo sapiens
ccagcactttgggaggctgaggcgggcggatcatgaggtcagaagtttgagaccagcctgaccaacatggtgaaaccccgtctgtactaaaaatacaaaaattagccaggcgtggtggtgtgcacttgtaatcccagctactcaggaggctgaggcagaagaatcgcttgaacccaggaggcagaggttgcagtgagtcgagatggtgcctctgcactccagcctgggtgacagagcgagactctgtctcaaaaacaataataattttgtattctataacataaacagcatttggaaccgcgtctccagtaattttcatctctacacaggccccgaatactcagtgcatactccacgtcagg

SEQ ID NO: 391457 - DNA, 560 bp, Homo sapiens
agtattgctctgtggcccaggctggagtgcagtggcgcaatctcagctcactgcaacctcaatgcttttcttctcatatagcacttaagtccttggatgatggacctacagctcttaagaatttccgtgtgtgtgtctgtgtgtgtgtggttagcagaaatggaggtttcaaatgaaaacactggaaaaaaatgatttctcatctatccaattataataccaaaacagcaacagcagcagcagccaatgctgtcttaggtacccaggaaggtgaactagtgaaaatcatttgtactcaggagcactagatggcagcctgttatattcatcttacatattgaatctgtgcaaagtcagctatcagtctgattgccctatcccacaaattgcatcccaggagatgattagatgcaataggtgaaagttttcatgttcctcagtggcattcagtgcatgaacaaccattgtccacctaattcctctgcatctacagcaagaaatagaatttttgtggagacttaacatgctgtgtcttacttacatatgtatgcaaaaaaaaa

SEQ ID NO: 391458 - DNA, 106 bp, Homo sapiens
ggtcttatgatccggcggatcctcctggggaggccgggccggggagagggcgcgggcgccgagtggcgggggcagcgggcgggcgcggcgaccggggccggggcgg

SEQ ID NO: 391459 - DNA, 461 bp, Homo sapiens
acctctacagctacccattgttaatacgaagagaaaggcacaaagtgacaaaggagaataattccctctgcaagtcacctaagtgaatattcaactgaagtgtataggagacagaggtcttaaacatccctgatgaacagggctggcacagaaacattatttgttctcacacagcaatatgaaaggtcacaaactatttgacatatttgcacaagagtggtcatgagagatcaggacgatgtgacagtttcgttcaacacacataactgaacagacattagctgaagccccaccaggagccaggtgctgtgtggggtatggaaggtggggaagacagggctcctgcccttaatgagctccagaccccaaactacctgatgagagcaacctggagagtccattttctatcttctgtgcgcctccattcagcatgctaacaacctcggcaacagacaaataaa

SEQ ID NO: 391460 - DNA, 830 bp, Homo sapiens
ttgcaagcggggaaccttgagctacctacgccagcgttctggattattttccaaatttggttcctgataatctgagaaagctatgcgctcagtaagagcagggaccttgttttatcaaactttgatctttcattaagcacacagtgggcattcaacaaacttgtgtaaacttggaatcagatttagcccaggccggtgcggtggctccttcctgtaatcccagcactttgggaagcctaggagggcggatcgcttgaactcaggtgttcgagaccagcctgagcaacatagcgaggctccgtctctacaaaaaatacaaacactagccggccctgtggtgcagacctgtagtcccagctactgaagaggctgaggtgggaggatcccctgagcccaggcggtcgaggctgcagtgagctgagatcgggcctctccattccagcccgggcgacaaaaaatccagctaagtaaaaattggcaagatcctgtgacaagatcctgtgacaagatcctgtgatcaagacaaagttttgcccccaaaggacttgaggctatctgggaattccatgtttgacagaagcgctgacagcataaccaagcaaacaagaaggtattcagggacgctgaaacggatcttcaaagaagactcagtgggtgatttttaatttctgtgtagtattatagagcttaatgcagaacataccaaaaccttggagaggtaatgatagggtcatgcatttcataaggcagagtaatgccctgcaacaacaaaataaagtcaaagagttctacactgagccatgaaccactaaatggggaataccaacaaa

SEQ ID NO: 391461 - DNA, 544 bp, Homo sapiens
gagtatattaggacttactaagggaacagagagaaaggtacaaaaaaggatatcatggtactggctgtgagactctcggggactactaaaaactgcggcggtccatacatgttctggtggacgtaccaggagaaaacagagcaggaacagagcaggtacagagaggcaaaaaggacaataatatatagttaatatgttatgctttaaaaaatgtctgagtcaagtataagatttttgttatatctatttatataacagatatttatattagtttgctggcattatcataagaaagtaccacagactcgatggtttaaacaagggaaatttctcttcccacagttgtggaggctggaagttcaagaccaaggcagaggcaggattagttctctgtccagcagtcacttcggccagagctgaagagttgccccgtatctgttccatgtctcctttaagagctctgggtgactaagggcatgaagctttactggaatttcttatactagcacatgcgtcaatagtttcaaggacttgaaaaatactt

SEQ ID NO: 391462 - DNA, 237 bp, Homo sapiens
gtgagtggggctcctgagggctcgaagtgggtggaggaagccattctagaattgaacagttgctacaggtcacacagatgatgaaacactgcctacaggccagcttcagctcacacaagcccactgtaaaccgtgcagacacagggtttatggccacaattttttttttttttttttaagatgggatcttgctatgtggctcaggctggtcttgaactcctgggctcaagagatcct

SEQ ID NO: 391463 - DNA, 549 bp, Homo sapiens
gcagagaactcaatcccaggtactaatgaccttgctttggcttgcaagactaagcctgaggcctgtggacttaagagggttactgggtacccagacaggcaaatgcctgtttgattggatggctaaattgtgaagaaagcaaagcttacctgtgcaatgtgtccatgccttcattcctactttctgaatcaactgtgcctgttattgttctgcccaactgttaagatgttccacctgtgcctgctctttggcgcagtactccaggctatagaccaacatttctcaaacctggctgcacattagagtcatctggggatcttttaaaaacccagctgccttggctgcacatctgatcattacgtcagactcttgtagggaggagtatagacatcagcattgattaaaactcctgagattaattccaatgtggcagttcagggatttgaggaacagctggtctacaccagtttcctcttgaagtatggtctgtaagtcacaggctgcagaatctccttggatgtttgtgggaaatgcagattgctaggttca

SEQ ID NO: 391464 - DNA, 154 bp, Homo sapiens
ttggaagggagcctctgctgcttgcacttgcaagaaggtggggcccaactgcccctcactacacagaactacagcttcccagcaacagaggccagacaagctgcagagctgcctgctcaggactggtgagagaggctctgccctgagcccattt

SEQ ID NO: 391465 - DNA, 227 bp, Homo sapiens
catctgctgaaataaattagatcaaaataagattgaagagatcttcaagtgctgcaacacctaacaaactgattttattatttagataacaggaaaaagtgaaaagaactgaagtttaagaaaattaaatttgtgtacttagtgaaagatcagaagtctcagtggagaaaaattctaatttgtattacctacaaaagagggagaaggtcacctgaaaaattatacag

SEQ ID NO: 391466 - DNA, 293 bp, Homo sapiens
tgcccctccttgaaaaaaacagataatgtacatttataagttttatgttaaaataagttattgaaggtatgtatatttctttttattttaacaatgtatgggttaactggccttttggttattccttcagataaaacagactttactagattaagtcctcagatattgatgtgaataatcttttcactttttttttttctaattaaggctgctaatctaatacagaagaaatacttgaggctgggcatggttgctcatgcctgtaatcccagcactttgggaggcgaaggtga

SEQ ID NO: 391467 - DNA, 771 bp, Homo sapiens
cactccagcctgggcaacagagcgaataataatactactactaataataattgagcaggattaagagattaggatttggaggatgagtcacaattttaaataatgtggtcagggtaggcttcttgaaaagctgcatttgaaaaatgacttgcaagaaggtagagtttcatctttgatgagacaaatcctttgaaaacccattttgcatggaacccaccagatggaggcatgttaaaaccttatcctaggcgcagtgcctcacgcctataatcccagcactttgcgaggctgaggccagtggattgctcgagcctaggagttcgagaccagcctgggaaacatggtgaaatcccatctctacaaaaaatacaaaataaaattagctgggtgtggtggcccgcacctgtagtcccagctactcaggaggctggggtgggaggatcctttgagcccaggaagtgaaggctgcagtgagctgtgattgcaccactgcactcaagcctgggtgacagggcaagacactgtctccaaaaaaaaaattaaaaaaaaaaacaaaaccaaaacaaaacacccacacccacacaactccacaaccttatcctagaacacttcccctatgtaagtcttcctcatcttaggaaggaggttctcagagtgcatcagctggtgttgctgatgaaggaattagctcacctggaaaccgaccttgtcctttctgaaagaaccatgccaaattttggggtgccttgtcagggcaatcactggaagtgt

SEQ ID NO: 391468 - DNA, 373 bp, Homo sapiens
gggaagggcatggtgatttgctctgatttacatattttaacaaccctctatatacacaaaataactaaaagcaaggtctcaaaagaggttatctgtacactgattcacagtagccaagaggtggatacaacccaagtgtccatcaagagatgaatggataggctgggtgaagtggctcatgtctgtaatcccagcactttgggaggccgaggtgagtggatcgcttgaggtcaggagtttgagaccagcctggccaacatggtgaaaccccatctctagtaaaaatacaaaaactagccaggcgtggtggcaggtgcctgtagtcccagctattcaggaggctgaggaaggaggatcacttgaacctgggagg

SEQ ID NO: 391469 - DNA, 167 bp, Homo sapiens
tccatcttcacagtctttgaactctcacacatagcataatgagtcagtataccctatttatgagcctgagatgtgtttattttctaaaatattatatgttcatttcctgaagaaaatagaaaatgctttatctagaaacatcttgttgcctagtgtgcctaatattt

SEQ ID NO: 391470 - DNA, 279 bp, Homo sapiens
tcaggaccctaacaactcactttctctttttttttccccacaatgcaacattcaatagtggtttgggctcagtggacatacttccagattgtatgaaactgcaattcttgagctatagttttggggtgttggagaagatggggagcaagttgtctttagtttggtcggtcacctaatagaagaaacagatggctccaggatgattctctggaaaggtccagggcagagtggagtggttgaggcagcccactccccaggagccctgtggtctgactgagg

SEQ ID NO: 391471 - DNA, 349 bp, Homo sapiens
taaacagggtgaaaccaagacgtgcatgttaatttaagatatgataaaaggttaattcggaaaacataggaggtggagaaagatattgggttctacatatcatgacatcaaaagggaatgagagaaaaaaaaggcagaggctaattatcccttttgagaaagctttataaaagaccaaagaaaagggtatttaacaagaccctaaaatttctatcaggaaaaaaaaagcaaacgtggcaggatggggacagggtatcactgagaatgaggctttccgtcccagtaacagcaaagacttgctcagttgctgaacagcttcaatatagtttccatacccatagcagcaatt

SEQ ID NO: 391472 - DNA, 659 bp, Homo sapiens
ataacaaacctagtggttttcatttgaaggcagtggtttttaaacaaaagtattttcacaaaaggaatgagaacatctcagtattatatatttgatacaattcccaaataaattgtcacaataaaacaaggttgcttatgcagaacccttgaaatacaatgtatgtaaaaatatttttactactgtgctcaagaatagagattttgaggacaattcttacatatttaagaagcaaaaactttagttaatactcagactttattcaacatcagaaaatatgcaatgaagagaaaatctacaatttaaatcagcttgcagatacatttacttctggatcacaacttactcagcattagaaaattcacactggctgggcgtggtgactcaccctgtaatcctaacactttggaagtctgagggcaggaagaggccttgagtccaggaattccagaccagcgtgggcaacatagcgagacactatctctacaaaaaatttaaaaaattagccaggtgtggtggcgcacacttgtcccagctactcaggaggctaaggtggcagggtcctttgagaccagaacgtcaagcctgcagtgagccacgtttggccaccgcactccagcctcagcaacaaaatgagaccctgtctcaaaaaaaaaaga

SEQ ID NO: 391473 - DNA, 1123 bp, Homo sapiens
ataacaaacctagtggttttcatttgaaggcagtggtttttaaacaaaagtattttcacaaaaggaatgagaacatctcagtattatatatttgatacaattcccaaataaattgtcacaataaaacaaggttgcttatgcagaacccttgaaatacaatgtatgtaaaaatatttttactactgtgctcaagaatagagattttgaggacaattcttacatatttaagaagcaaaaactttagttaatactcagactttattcaacatcagaaaatatgcaatgaagagaaaatctacaatttaaatcagcttgcagatacatttacttctggatcacaacttactcagcattagaaaattcacactggctgggcgtggtgactcaccctgtaatcctaacactttggaagtctgagggcaggaagaggccttgagtccaggaattccagaccagcgtgggcaacatagcgagacactatctctacaaaaaatttaaaaaattagccaggtgtggtggcgcacacttgtcccagctactcaggaggctaaggtggcagggtcctttgagaccagggtcctttgagccgaggctatagtatgccatgatcacgcctctaaatagacactgcattccaaactaggcaacataatggcatcctgtctctaaaataaataaataaataagaaaatatttggctgggcgcagtggctcacacctgtaaccccagcactttggaaggctgaggcaggcggatcacctgaggtcaggagttcgagaccagcctggccaacatatagtgaaaccccgactctactaaaaatacaaaaaaattagctgggcatggtggcgtgtgcctgtaatcccagccactcgggaggctgaggcaggagaattacctgaacccacgaggtggaggttgcagtgagccaagatcacgccgctgcactctagcctgggcaacaagagccaataactccatctcaaaaaaaaaaaaaattggctacatgcagtgtttttatcacattaaccggtattatggtgaagttaccttttgaaaagtcatctggcgaaaacaactgttaacatcagatgacagtgactttgacaaagcattatacta

SEQ ID NO: 391474 - DNA, 612 bp, Homo sapiens
gtggagctcctactacaacagaaatgctgcaagggcctgctctgagatgtgctgatgggtcactatggtatttagaaaaaggagagtggatgctcaagattccgtgaatgggtctctgacatgcgttctgtggaaagataataagaataatgataccaacatggctccagtctttatgcatctcaggtatacctcactgtgtctttaccatcgccccctgtgaggcaggtattattatttgtcccaagattcagagaggtaaaaggagcttgcataggtagacacggatgagttgggaactgaactcagacaaatttcatttactcagacagaaatactgttggagtggaagaggaccattcatcagaatatcacatttggagagaactattcccaaagaacatctatcttacttaactttgattctaggacctccaagtagttgaaaaatatggtttccaggatggctggacccatcaatataccatgtgcaagcctggtcttattctccagtccccgtctcactacacctccacctctaggtccaagccactattctttttcacctggcaattgcaccagcctcttcactgggctccctgttgccaccct

SEQ ID NO: 391475 - DNA, 811 bp, Homo sapiens
gccccggggctcaggggcagcccaggactctccctcgcccggctcacggccctgcctggggggcgcctccgggagcagatcacgagccctggggctcagccctcaggcgcgtctagctcggcggtcaccccagtgccgggaggaccctgaagacgcgccccaggcggccctactcagagcctcctcccaaggcccaggaatgcggcgctgtcggaggtgtgcgcggtggccacaccgctgtccgggtccccaaagcgggccccgctcccacttctcgccttggccccgaaccctgggtccagccccagcgctttgtgtgcgaacaccgctccgccccggacccagctccgccttggggcccctctctgcctgcccctccgtgcccgactacactgcttcccctccggcgggcgactcagcccggtccatcgtggcggcttccagggcggcaggctccgggagtactcccggggccggctccaaggactgttcccctcctccccactcccactccgcggcggcggcgggcgagagcggcgacatagggccagggtccggagcggtggaggctcctggccggggagcacgtcgccccacccggcaacgcgaggatggtggcggcgcagtcggctgctttggggtctcaaggcacaggggacgcgaggcacagatgtcccacagcagccactgcggctcccgcagctgctccgccgccgctgcccgcccctccctgctgcagctggcgtgatggcagcggcagctctggacgccccactgctgccaccatcagccttgtgaaataggtactacc

SEQ ID NO: 391476 - DNA, 471 bp, Homo sapiens
cgcctacttagctggtgactaatatgactgttctatttctcaaagtctacttataatgaccaactgatcaacgcgagtctgatgtctgttccctggcaatcccattcttccttacctttttttactcttccatttaaaacctgctatattagttctgctctcatactctgttgttactggtcgactgataactaagatcgtgactgatttcaagtgtatattattagagaaacatgtaatatatatcctaaagactacttccggggaaaatatattaagccttaagtgttacaaacaagagaaaataaatcagtaaaaatacaaacactttattagacaataaaatcatcttttttaataacttaaggtaaaatcctaattactggagtctttttttctctcccttatcattcccctcttacacctttcatttttcctcccctccggcccatgtttaatggtctattagta

SEQ ID NO: 391477 - DNA, 108 bp, Homo sapiens
attcatagtttctcagaaaacatttcctgcatgggagaaaggaaacattgtgggtaggttgcaggaacccataccctgaagcctctctagcttttaaatcacaaataa

SEQ ID NO: 391478 - DNA, 396 bp, Homo sapiens
aatgaaagtctacctgaaatcatgcctcactgcaaccatgcacttctgggcttaagcgatcctcctgcctcagcctccctgaaggtccacctgcatttgaataaggatggatgtgcgcccaggtatgtctttgtgggtttccatcctatagttctggagcaaaggacaaatggaagaaagttgctaaagaaaagaagagcgtttctgtggctccttcaagagcagttacagatttctgtcctgaagccaggagggaatatgtggcccaggtcccacagtggagagttgcaatgctccctcttgggcatctctgtcctcatttggattcagggctgaaacttcgggatcagtttcacagaagaggtttcaagtagatttcttgcagtcctgaaagtc

SEQ ID NO: 391479 - DNA, 642 bp, Homo sapiens
cgcggtggctcacgcctgtaatcccagcactttgggaggccgagacgggcggatcacgaggtcaggagatcgagaccatcctgggtaacacggtgaaaccccgtctctactaaaaatacaaaaattagccgggcatggtggtgggcgcctgcagtctcagctactcaggacgctgagggagggagaattgcttgaatctgggaggtggaggctgcagtgagctgaggtcacgtcactacactccagcctgggcaacagagcaagaccctgattcaaaaaaagaaaaaaagggtgaatattttgactacacggaaactgagacttctgttcatcaggacatcataaagaaaatgaaaagatatgccagaaactggaataaatttgcgaaacaaaaaactaattaaagattagtatttaaactacatatataagaatacttacaaataagaaaaagataacacattaggcaaataggcaaaaggcttaactgtaattatacagaaaaggagatttctaaggccaacaaacatgaaacaatgttgaatctcactgcccatcagagaaatacaaaccacacagatgtcatttttaaattcattagaatggtaaaaactaggaatgttgatagtgccaaataatggc

SEQ ID NO: 391480 - DNA, 482 bp, Homo sapiens
ctcggccagtcttcctactactacagcttttaaatatttcttacatattaacaaacttaaacttaaatttggtaggatgctttccaacttttttttttctttttaaaaatggctttgactattctaatttctttactttttcatgtaaattttagaagcaccctgtctatatctacaaataatcttgttagaattattttgtggatacattctttttgtacatatttatggggtacatgtgatattttgttgtatacagagaatatgtaatcaagttcaggtatttgaggtatccatcaccttgaacatttattgtttctatgtgctgggaagatttctagttctcccttctagctattttagaatatgtgagacattgttattaattgtagtcaccctactgtgctgtcaaacatgagaacttattccttctaattgtatgtttgaacctatcaactgatttctctttatcttcccccctc

SEQ ID NO: 391481 - DNA, 1226 bp, Homo sapiens
tggcctcccaaagtgctaggattacaagtgtgagccaacgtgttcggccggcctcgtctttttttaagagctgtttgcgtttaacttatttatttatttatttttgagacggagtttcactctgtcgcccaggctgcagtatagtggcgcaatctcagctcactgcaacctccacctcccaggttcaaacaattctcctgcctcagcctcctgagtagccgggactaccggcgcatgccaccacgcccagctaattttttgtattttagtggagatggtgttccaccgtgttgcccaggctggtctcgaactcctgagctcaggcaatccacccgcctcggcctcccaaagtgctaggattacaggcctgagtcacctcacctggtcttaacttaatttttatggctgtatttgctttgtaacttttaatgcagtttacttgcttacataaattctatcaaattacaatccagtttggcagtttgtataaaaacaatgtaatcaaaactttaaaaatcattcaaaactagaatttatccaacaaaagtaaaacaatttgaaacaattaaaaattatttagtgagtttttagacttttgcttgataatgaccaaagcccaagtcacacaatccactgaggataaaacataaataacattcatgaggcagccaacaggcctgcacaggccatctcttgccatatcgagatccagcgatcaatcaagagaaagttccccagtcacggccatctggtcaccataattttgtagcatagatcctgcatatattttgggctgccttccatgaagtcactgtcagtcctgctcatgtaatagtaagattttgttgggtaaggttgagctttggagggctacgcaccattctaacgtcttaactttttttctccctcgccgacaaacctattttgccctttgggtatgatattgcccccgttgagagtgtatgccttttaagaaattattcatgccagatgttccagaatcctaattttttgaattttagaaaggcattatggtgcatataacttgtataacacctccagtgaggtttgggatagaaccctgtatagtcaaatattatgaatgtttctgtagcaaaaatatccagttgaaaattaattgagattatatatataaagactataaataatctcatgtgaggttcagattttgccgccaaatgtgttttgagactatatttactaaa

SEQ ID NO: 391482 - DNA, 409 bp, Homo sapiens
gaaaaaaaaaaagccccaaaaactatcatcttaagtcatttaatccagagaataaccttgtgatatgggaattagtatggtcatttcaggtactcattaggtgctgcctgtttaaacaatataattgactgatgcaagtatttctgaagaatgatctggcaataataaaattaagtatgcatatacccaacagttgtagataaatttttacacaggtccaaaaatcaatgcatatttgcgctgttcactgcagtgctgtttgtaagaacaaaaatttggcagtaacctaagtgaccatcaccagatgaaaatgtaacaaaatataatactttcaggcatacaagggaatactctgtaatagtcagaagcagttgtagatttatatacagtaacacagatttcgatgttg

SEQ ID NO: 391483 - DNA, 726 bp, Homo sapiens
gttttcttgcttgtcaatgcattacagtctacttcatccttttgatttattttagttgatgtttatcaaattaatacatgcacataatctgaaaactagcattgaaaacgctaaatagccaggtgcagtggctcatgcctgttaatcctagcactttggaaggccaaattgggtggatggcttgagctcaagagttcgagactagcctgagcaacatggcaaaaccctgtctctacaaaaaaatacaaaaaattagctgggcatgatggctcacacctgtaatcccaactactagggaggttgaggttgggaggattgcttgagcccaggaggctgaggctgcagtgagccgtgttcatgctactgcactccagcctggatgacaaagtgagaccctgtctggaaagaaaaaaaaaaaaaaggctaaataaaaaacaatggttctctgtcccacgtgtcctgttttcctaatccttttcctcagagacaacctctttctagtcttagctgtttctcctgccatcatataccttcacatttctaaataataggcatatattgctatcaatcatcaattttgggcattacctacttatcttttttatggtaaatcagtttggttctctcactctgccatctctctgctttacacatttcttccccaccctttcaatgtagttacattgcaatctttttgttaaatcagtgtttgcattattgtgccta

SEQ ID NO: 391484 - DNA, 319 bp, Homo sapiens
tgggcacaagcaagccctggcaccacagctttcccagagaaatccctctgtaacctgttcctctgtcagtgcactgattaagttagaaaaggtgagcccacttctctgtggctcgctgacctcaggacatgaggaactgtggatttgaatacacaaggcaacagccgtagtgcagtggatcttctagtggacccgccactggtacacattttcttgactctgaggacattggctgaagagcactcagagcagtacctggtgccatcactcagactttgaagccatgttgcataacagataatgatgtgcgcaatggcga

SEQ ID NO: 391485 - DNA, 678 bp, Homo sapiens
caattcctttatcagcatttttatagaattcacaagaggtgtttctaacatgggccatcagtaaaatccaagtatacaacactaaatcataaacatattgtctaagtgtctaagtttgtagcttttaggtaatctaaactgattcagggctggagctttaaaatcaagaggatgctgggcacagtagctcacgcctgtaattccagcactttgggaggccaacgcaggcagatcgcttgagctcaggagttccagatcagcctgaggaacatagtgagacttagtctctaaaaaaaaaaatttttttaattagctgggcatggccgggcgcggtggctcaagcctgtaatcccagcactttgggaggccgaggtgggtggatcacaaggtccggagattgagaccatcctggctaacacggtgaaaccccgtctctactaaaactacaaaaaattagccgggcacagtggcgggcgcctgtggtcccagctacttgggaggctgaggcaggagaatggcgtgaacccgggaggcagagcttgcagtgagccaagatcatgccactgcactccagcctgggtgacagcaagactccgtctcaaaaaaaaaaaaaaaaaaaaaaaaattagctgggcatgtgatatggtttggctgtgtccccacccaaatcttgtcttt

SEQ ID NO: 391486 - DNA, 333 bp, Homo sapiens
ccccgactagctccgacagagggaggagagaagcgcaggtgtcgtggctcatcaggtccgaggtccaggaggcgggtccggtcctgttggtcctggtcggggccccgactagcccgacaggtggctgtttggggccacctgtcacttgtcgctggcttgtcagggctgcccttgttgggttcctctcaccatcactcagaaccatggggactctggccctgactgggcagtcctctaaccctcgtctctctctccctctcgctagagtgctgtgttgcgggcgggggcctttctctacacatttgtggctcttgctgtcacccacacacctga

SEQ ID NO: 391487 - DNA, 280 bp, Homo sapiens
ctttgaaggtctacagcaagtggtctaggctaactcagtgctgggcaaatggagcaaaaactcttttctgcttccttgcctccatgtctttcagagctagcagatacagcttttgttctataggagtgattctttctaaatgtcagctcaacaggatgatggtcactcttgtatatcacttaggcatgagttctgttgaatcccagcacaatttaccagactttgtcagtggcttttggagtagcaaagactcaatttttaataaagtgttattttgttt

SEQ ID NO: 391488 - DNA, 317 bp, Homo sapiens
  misc_feature (38)..(38): n is a, c, g, or t
  misc_feature (43)..(43): n is a, c, g, or t
ttcagacaggggaggggcgaatggacgggacggcctcnggggnacagagagacctctgtggctgctggggggctgtggcatgatgggggagtggacacgacgtggaattcttgggatgtggagcctgaaggcatcgagggctgttcctcaggcaagagatgagtggggcgaggtcaaggctgaggatgcagagctgggagtcattagaatctctgcggagtgtctgatgtgctgagaaccgttaaaatccatgaatgagtgagtggttaaatttacatttttctgcagaaaaaaactttttgaacccacccacccta

SEQ ID NO: 391489 - DNA, 454 bp, Homo sapiens
ttagcctctctgatcctccagttttcttgtttgtaaaatggggctaattatagcaccatcctcctaggattattacaggaattaaattatttaacagatgagaccaaattcgcactgcccagaagttaataagcactagataaatgtcagctatgattattagttactaatctaattattatcattaggaagtcatttaatttaactgatttgactggtaggttcttcatgagttatcaatcacacagagatttaccaaggaaaggccataaagaaaagaaggaagaaaattagcattctttgtcagcttcctacacatgtgatcatttcaggtcaggatttcacattccctgcaaaactgagattgtgatccccagtttgcagatgaggacaccaaagtttggagaagccaaggcaatagagtcagattccaaagctaataaatttattatgg

SEQ ID NO: 391490 - DNA, 564 bp, Homo sapiens
aactatggctctacttcttactagtgaaacccctggagaagcaacttaatgtctctgaacctgttatctatcatttgtgaaatgggagataaaacttgcctgaccctaaccccagcactttgggaggtggaggcgggcggatcacttgaggtcatatgttcgagaccagcctggccaacatggtgaaaccccgtctctattaaaaatatactaattagccgggtgtgatggtgggcgcctgtaatcccagctactcgagaggctgaggtagggagaatcgcttgaacctgggaggcaggggttgccatgagctgagatctcaccattgcactccaactggggcaacagagcgagactctgtggaaaaaaaaaaaacaaaaacttgcctgaccaaactcaaaggatgtccctgggaatcatgtaggattatgtatgtgaaagtacttggtcaactatgaataaaacactataaatatattgtcattgctacataaattagtgtcgttaaacaagtattttggaaactataatcattaattctgtaaacatttcttaatacctatg

SEQ ID NO: 391491 - DNA, 317 bp, Homo sapiens
ggggtcagaggatcacctgtgctcccagccgtctctccccacagggacccccatccctcccctgtgcatctaactgagtcctatcaatggggtcctcccacggcttttaaatatcctccattcaccccttgccctggagccgataaaccttctcccagctgggcagggctgcaggcaccaatgtgggggactgcgggattcaggggtggcaccaggggaggaacccctgtccacctgtctctcagagggtacaccgggattctcctgtcaccaggagaatcagaggcagccccacagagggaacaggacccatctat

SEQ ID NO: 391492 - DNA, 377 bp, Homo sapiens
ctgaaatgaaataccacttttcatttgacttccaggtcatcagcttcctttgttcttctagctctgttgccatctcctcagctgtctttgttctttctcatcttcctgacttctgaatgttaaagtgtcctagggttcagtcctcagaccctttctctttacactgatgctttaggggacctcatttagtctcttgtcttcaaatacctttttatactgaagattgtcccaaattaatacttccatcccagactaccagctcttgaactcagaccaaaatatcaaaatgcctcctcaatatcgctacatggatgtccagcagacatctcaaacttaagatgtctaagatctaagctcctgccctcgctctccctttg

SEQ ID NO: 391493 - DNA, 327 bp, Homo sapiens
cttagatgtgatctccctgtgacatcccctgatcactgatagcagcaaagagatctcctctaggatttaaaatgccttaaaaaatcaatggcacctagtataaaatactaataaagtaaataaacatgaaaagcaatttgaaaaagttctttgatattttgccaatatctaaaacctatcaataaatataacccagtcattgaggtacatcaagacataatgaattaacaaacctccagcaggcttaaaatatgtaacaattgtatgtttcacttggttagaaaaaatgaaagtgttttctcccaaagaatgatttattaggttgcg

SEQ ID NO: 391494 - DNA, 388 bp, Homo sapiens
accacagagatatttgtcaaaaagcagcggcaaagtcttgaaagtagcccccaccaaaaaattctgtattgctttgccttcagtttcaaaaaaggaacacttcctcatgttttcttcattatactcactcaaaaagaaatggagtctttctattgctttaaaaaagaaagcaaattataagaaagaatatttttagatcaatcacttgagccccttaagattatacccaggccaggcacagtggctcacacctgtaatcctagttcttcaggagcctgaaatgggaggagaagtgcttgaggccaggagtttgagaccagcctggtcaacacagtgaaaccccatctcttttgtttttaaataaattttaattttaaaataagaccaa

SEQ ID NO: 391495 - DNA, 369 bp, Homo sapiens
aagacttcaatctaacgaggattaatacgttaaggaaatggacaaaacgccggagagtctcagcagagacttgaaatttatagaaaagaatctcaaggaccttccaggactggataatacaatacccgaatggacccactgaacagcttttttaccagcagcctgaacacagcacaaaacacaattagtggaatcaaaaggaaaccaatgtttacaagaccaaaaccaaagtgtaaaaggaaagaacaccgtttagggtagtacaagacagtgaggcaacctctaagatacgtgtaaatgagtgacagagaaagcaaagaaggaggcagcacaaaatctgaagaggtaacagccaagaattcttcaaaa

SEQ ID NO: 391496 - DNA, 730 bp, Homo sapiens
ggaacagtatttcacaagcagtagctgacctgggattttaactactattggggaactgtgaattttttaaacagacaaatcactctaagcaaattacatttgagcagggtgtcatgttttatgttaattcagagaataagatactatgtctgtcaatatgtgcatgtgtgagagggagagagcctgagtctgtgtgtgtacatgaggatttttatataggaatgtagacacatatataaagaggctttgtctttatatatttgtgtatagatcaaagcacacaccctctctcatataattggatatttccaagaattgaaaacccatgtgaagcattatagatagttttaaatttaacccactggagttttcttgaaataccacttcttttatattatataaaactaaaaacacgactgttaccttttgtgtgaaccaaaggatacttcagatctcagagctgccaattatggggtactaaaggtttttaagacatccagttctcccgaatttgggattgcctctttttcttgaaatctctggagtagtaatttttttcccccttttttgaaggcagtaccttaacttcatatgcctctgactgccataagcttttttgattctgggataacataactccagaaaagacaatgaatgtgtaatttgggccgatatttcactgttttaaattctgtgtttaattgtaaaattagatgcctattaagagaaa

SEQ ID NO: 391497 - DNA, 453 bp, Homo sapiens
gtactttccacaggggggaaggagatgggagggggtggagagtgacgttatagtttgaatttataatttgaaagcagagaaaatggatgaaataaaaagattaccatatgagtatcaccagatcctccctcccacacacacatacctatccccaggcaatctttctgtgagaatttaccttggtgtttaaaaatcacggcaatataaaagtgatattaaaaatagtatactaccactgtaagaagtatgacaaacatgtgagatcctgagaaactgcagaatattttctcattcaaagtttagtaccttggtcttatagtgtttgacactaaaaaacatagcaaatactcttttatatttagcctattccgtgatgccttgtttcttaaattaattcatgggcaatgaatgggggaggaaaaataacaacaacaaatatgccctgtggtatag

SEQ ID NO: 391498 - DNA, 353 bp, Homo sapiens
gaccaaggtttgtgtagaggacctaataaaccctaactgtgttaaggatacatcttttcttctttaaatagagtgtttagtttatgtagtggttagggattggaaaggcacacacatcactgtcctccttggaattttggctagagggattagatgggctgaggtgttccctgtagttgttcttctgacaggttctttgttcctcacaaggtgacagcatttctggaggtctcagcacatcagggtgcagtacttatgctggaccaaaatcactattaaatatgagcaaaggagctgggcacggtggctcatgcctgtaatcccagcactttgggaggtcaaggcatgaggat

SEQ ID NO: 391499 - DNA, 209 bp, Homo sapiens
gccacttcacctatccacatccaatcccaaaagccctttacacctacaaacgcacaacgcccaccccaacaaccaagcactccacacaccacaacaacctttacacacatgcacccaatgaccaaagtactttacacatgcaacccagaaatcagaagggcttcacacatctgcccaataagcaaagcacttaatatacacacgcacag

SEQ ID NO: 391500 - DNA, 236 bp, Homo sapiens
ggtacaatggagctctgcagaaggccagtcacagctcagcaaggtgagcctggaggaggagggtggccatttctagtccactgggtggagatcaccagttaaggagcccactggcttctgccctacagattacaaaccatgtaataccctccagcccatcaagtggcaaaagccaagtgactgctttgcttcccaaagctctaaactctgggaaccccagggcctggcatggtgcc

SEQ ID NO: 391501 - DNA, 352 bp, Homo sapiens
atagggtggccaggcaagactaccaagaaggtgactctaggcaaagatgtgaaggaagtgaagggctgagccaggtgagtatgtggaggggaaaatctccaggtagaagtgacagcctgtgcaaaggccctgaggtgtgtttgacccagacccttggggagcacccagtctgatggaggaggctgatgtccgccagggacagtgagcaacttttgagacataatgcagaatacaggagaatagtgtcaaagccagagagagggtgccaggctgcagctgtggccgagcaaagacgtgatcttccacgggtcctcccttctcacccttagcaacaacctccttcgtggggtgg

SEQ ID NO: 391502 - DNA, 362 bp, Homo sapiens
gtgagggtatggagaaattgtaaccttcttacgttgttgatgggaaagtaaaattgtgcagctactgtggaaaatagtttggtggttcttcaatgttaaacatagaattaccatatgatcctgcaattccactgccagatatataccctctccaaaattgaaaacaacgacttaagcaggtattgacatagcagtgttagttgcagcattattcacaatagcctaagaatgggaacaacctgagtgcccaccaagagatgaatgaataaagaaaatgtggtatacacatacaatggaacattattcagcactaaaaaggaataaagttttattttattttatttttgagacaaggtctctct

SEQ ID NO: 391503 - DNA, 220 bp, Homo sapiens
tcaccttcatgcagtagttccttcccgctaccttccagacatgcacgcgcatgtaaatccccggacaaaaactcaatcattctgacggctttcatagcaaccgtccggctcctgattcattcaaagcttctcttcatgaacctcttctccctgtgctccttttttgtggaagcagcagtttcagcctgggcagctctgagacagtgcaaagaacactgga

SEQ ID NO: 391504 - DNA, 221 bp, Homo sapiens
tgctgggattataggcatgagccaccacaccgggcctctataaccactacttgtaaggcatttcagttctatcctctttgggtaaatatgcctctcttctttcctaaaactgtttctatagtggcttccttggttcgaaaccaaactgccacctctttccacatgacgggacttgtaaggtctgctgccccagttgatttcagtaaactgtcaggtcaatc

SEQ ID NO: 391505 - DNA, 171 bp, Homo sapiens
attggctcacatggtagcaggcatttggttataccaagactaatagcaactcaagtatttcacaaatcaagagtcttgaataatttgttactgaaagtatataaatcattctctttgtgactttatgggcaaaaaggaaacttgtttatactttttttctctttatgaact

SEQ ID NO: 391506 - DNA, 397 bp, Homo sapiens
caagtggaatgtatttccttagcaaaataataaattcaagttccttgccatatctctcgagtccccaggtcttctccaggtctctgacctctgacgttaaactgctttattctgtaacagtcaactctgaattacccaggagagagaaggcttggaggtatgatgggctgatctgagcactgactttgccatgccctgcaccaagcttagaataaaattctcatcctgtattcacttgcccaaggtcacataagtggtttagacagtctgcaatttttaaaaaattccaagccccactcttacttatttgtttcttaaggcaatttagcatcagttctgtcatgaactagcaattgatgttatctctctgggttttctcatctgtaaagtgagggaa

SEQ ID NO: 391507 - DNA, 319 bp, Homo sapiens
ggcccactccggaccagggctggggcggcctcccaggcgctcactccgctggcaccccaccggaaaacacgtctgcggcccgccccctcccccaaagcacgaccactccgcccgggcccctcgaggatccactcaggttcacgacgggcccgtcctctcggtggtctgaccaccggctggtggagtgggctctggggccgccaggcgaccagggcgcaggcgggggcggacagctcattgggaggggcgccggggcacagtgcggggctcgccccacccccaggtgccccttccccgctctcgcctcgcaggcaccgca

SEQ ID NO: 391508 - DNA, 276 bp, Homo sapiens
ctaatccctttaaaaggcattggattatctcaaccacaattacaataaaaatatgctaagaatttaagttaactggtattccaaagttttttccactgacaggaaaatttcagccgggaaggctctattgcaaaaagacagaaaagtgaaggcacactccagtttcatacttagaatgttgcaatcactgctaatcctctgattttaataataactcttggttgataaacttaaacatgacagttttgagcaggcaccttaagttctgtatactac

SEQ ID NO: 391509 - DNA, 278 bp, Homo sapiens
ttaatcttgtttttcctttaatatatattgaatccatccttatttccaaccctgtgactctaccacctgcctttagttcaagctcctgccatttagtttagtttatgtcctgccattacttcttaatagttctagacttgtttatctcactgtttaaaatctgttagtgtttccccaatggttacagaataagatctaaactttatgtgacatctaacaaccttctttatcaggcccccacctccctctccagctcaatctcttaccacttgcataag

SEQ ID NO: 391510 - DNA, 710 bp, Homo sapiens
aatgtgatgtcacaaatgacaacacgttgggaagggtttaaaatataattttggtcacattctttagctcagattgaattttataaaaacctgatcatcaatcctctaattcatcccgagatgaagagaggcctagacttctcttcattactctagttattcagagtttttttaaagtagccctatgagagttgcaacaagtaaattctcctggagttttcgtgataaagagggcattttttccacaagctgaggacggcttcatagaagagcagatttgaatgaagacatacaaactgatagacatctaaaaacaatatagggaaaaaatgcaacaaagagcaaacaaataaaccacaagcgttcttggagctttcatggagtttctatcagccttttactttaggcaaatctctgatgaagagttcagatttcatttccgctaccacagcagttttccagagctgtgccatataccatgaggtactcaagatgtttgcagtttcagggagacctggagatcaaaactatttccacaatgatagtaaactgatatatttgccttttttactgtgttgaaatttaaactcatggtacaaaacgagtggtggataaaaccattgatgctttcacaccaatcaagacaagcgaaagcagaccgtactactaaactttttataacttccctctacacaatcagagggagaaac

SEQ ID NO: 391511 - DNA, 793 bp, Homo sapiens
tgaccatttaggacttacaattgtcttaggttttcagtttgcctaagcataaaaccacaaagtgagatcctttacatttcccttatattttatgcttatttgtcttgggagaaggaagcctttcctttttggcagaagtttcaaatggttcttatttcttgtctcactaaggcagtaatagcatagtgatggacctggttgggtagtgggggacagctgaaaaggcaggagttttacttttgtttgaaaagagaccacatcacatatagcatctcaccattcacaaagtgtacatccaccgatactactccactgttagagccttcgtcctcctatggcagtagtataagaaaccttccaccaagtcagagtgctctaactgatgccaaacctaaacctggaaataaagattttcctggagcagtaagacttcagactgttggttgagctattatctcaaggtagataagaaagcctttcagaaggtgagcacaaggttctttgaaataactcattggtgtctttaagctgaagcctttaagcaaagacagcaaagaaattgcatctgaaaatgaggaattcttccaactgcaccagttctttctaatgtgccaaaattagcttctaatttggctcctaaaataaaggtttccctagtgaggagaatgcatttaaaaaaattttttttgtaatatggcaaacttctaccttaacggggtccttggttctaccagagacataagaagctatgaatatttaataggacaaagatggcattttaagtcagtatgtg

SEQ ID NO: 391512 - DNA, 328 bp, Homo sapiens
cccacaaatttccgcaactctcctgatgagaatcatccacattcatttggcccttttgcagtttcaagaaaactgtttatagtgtacaagtgcacgccaaagtagcatccaatatgcaaacctatcacatccaaatttcatcacatacacatgtaagaatctgcagcaaatgagaagataaaggtaagatgcacctttattttatttaaaatttttttttaaaaaagtcttgctctgttgcccaggctggagtacagtggcacaatcacagctcactgcagacttgaccgcctgggctcaagtgattctcttgtctcaaattcccaag

SEQ ID NO: 391513 - DNA, 727 bp, Homo sapiens
gtagagagggctgactaccacttggctaaccatgggacctgaatatacatagatttgggtatacttgggctgtcctggaacaagtaccccgagtataccgagggatgagtgtactcttcttcataagtatttaaaatttaccaaatatccttaatcctttgtctggttgtgtactctggtgtacatgtaatgtttggtggaaattgtattgtttatattctaggacatgtttctctactcacctctctcatcccacaaattgcctttccagtgattagcatgtatgtaataaaggatttattcatttgacatgtatttgttgagtgtttcctataaatctggtactgaaaagtacagagagaatggtattagctgccatttatcagtactaagtgctttacatacacagtgtcattgagtcttcatagctctttgaggtataagttttatacctagggatcagaaaaatttaatttacccaaggtcacagttaattagaggctgtcttgaagcaaatttgacttctatagatatttgtctttgaacttagtaagtagtagttaagggagagaagaatcagtggttttaacaccaagctagagtgctttagtattttggaagtgtttatcctggggtgggactcaaagcccttttctccctaccaccaattaaaccatagcaacattgcctttgtttctcttacctgttgggcttctgagtaagatgt

SEQ ID NO: 391514 - DNA, 660 bp, Homo sapiens
cagagaagttttaactctagaaaatagagacttctggtttccagtctagcatgtagaaacatagttgccacttgcttctaacaacaaataaaaagctgaacaaactgaaaaatcagatgtctttgatctatcaaataagtgagaccgcagcacaaaatgcttcccccaaaattggagagacagaaagatacaaagaattacaacttactggagcagaaatacatgagcagaaacctctgcaggaaccagtaatgagctaagaaaccctgaaccataattcataaactgctagaggctcagtgtagacaactctgagagttaaaaactccaggaggacccagtcataggaggcactccacacttttgtgagttttactccaggagctatatcaagttctcactgtaaatatctgataaaaattcccttttgcttctggcagcaggagaataaaaggaaccaacttgatctatgcattcaatgcaatcccagtcaaaatcccagcaaattattttttggatattgactggctagctgattgtaaacttgatgtggaaagatgaaagacccagataggcagatcaatattgaaagagaagagcaaagttggaggactgatactacccaacttcaagacttaccataatcaagattgtgtgata

SEQ ID NO: 391515 - DNA, 749 bp, Homo sapiens
tactcatgtttctatctagtaactacatttatctgaaactctagaataaccgatgtacagagtctattaatcagattcagaggaggtttctcttggtctagacaactgtgaatgaaacaaataagttatcagttggtctaaaacaatcatcttagtttttttgtgtgtgtgtttgttttgctttttgagactccatctctaaataaataaataaataaataaatggaaatattttaaaagcctaaaacttttaatcctcacatcagctctttctattagataggtatcattatcatctccgttttacaaataaggacattgaattactgggatgttaaataacgtgcgcaaggccacacagccaaggaagtagtaaagagaagggtcaaagagccaggcagtttagctcaagtgtactgccttaaccaccaggctatgctgcctgttataaaaatgcagtatttaaaacagcgtgatactggcacgtaatttgacaaaagaattctcttatcccaatttcatactaaatgaaataatgtatagcatgtggggccagagctggaacatgagacctgagacctaactgtaagctattgcctaccaagatgcctttcttaatgcatgggcttctttgcatagcttgttacaataatacaaatagaggttattttttttttcttatttgcagtgaacatagcaacaaaaaaaaaagactgtttactttgagaagaatgatctttgggataata

SEQ ID NO: 391516 - DNA, 697 bp, Homo sapiens
attgcagaggggcgtgaggtttcaagatggcggggctgaagggttgaccgccaggctgaattgaaggcccttacaaagtgaaagagggcaggaatcgcacctcttggctgctcgcagtcctgggagcacagcagaagtgtttttcttttcttttctttttctttttttttaaatgaacaagtaaaccatacaaattgtcaacatgggaaggagatctgcatcatccaccaagagtggaaaatttatgaaccccacagaccaagcccgaaaggaagcccggaacagaagaacaaaaaacagctcatgatggtttgagctgaagttttaaagatgaaggatcccaaacagatgatccgagacatggagaaattggatgaaatggagtttaacccagtgcaacagccacaattaaatgagaaagtactgaaagacaagcgtaaaaatagctgtgtgaaacctttgaacatattctatgactctatgaaaaagaggatccagatatttagaaagaattgagaaagctagaaatagagtatgaacagaagaggactcaaccaatatttgaatgctgtcgagaatgcccagcacgtggaagtggagagtattcctttaccagatatgccacatgcttcttctaacattttgatccaggaaattccacttcctggtgcccagccaccctccatccttaagaaac

SEQ ID NO: 391517 - DNA, 276 bp, Homo sapiens
tctttggttcacagtgtggatgcacgactcaaggggttgacgcttagctctttgacatgtggtgagaccctcaaggatcgaagaaagcaggatgtgtccacagcttgaaataatccctcttctattttagagggaagataccaagaaataaaaaaagagaatctgtgtcagtaaatcctttaaaaaacactgggggtggtttgacaaactgtacagttcgttggtttctacacttcatccaggattggtttctgaataaagttttggctgtggtgg

SEQ ID NO: 391518 - DNA, 243 bp, Homo sapiens
cttaaaggagattggtcagagtgctcaactagcaacaccctgtctagcacagaagtcattctgagcaacggcatgcagttgtcctaccaagagagcgtgcaggtcatagagtggtgagaccactgggaggaggtactggaagaccaggggaacacaggaaagagttcaggtccatttacaccaggagcctgccagacaggcacccaagaatggacagtgggttactgatggtcatagagaggg

SEQ ID NO: 391519 - DNA, 324 bp, Homo sapiens
gtgagtgacagacacacaaaggcagctacgagactatcaaattcactcagcttaatttttgtggtggttgctattatctatttttatttgtgtatatttgaatgccaaataccaaaattcaagcataaactttgtgatggattgtttgaaaagtggagatttattaaatgaggaacgattccttttgaaactttttgtgcagtatgcaaaaatggagaaagacaccagcacataataacagctaaacatggaagatatatgatttcctcaactaatatataaaattgtaaacagtttttttttattaaaaagaattcaaggcca

SEQ ID NO: 391520 - DNA, 450 bp, Homo sapiens
gatgctcagccatcgtgtttcagccctcatgctgtaagcgagggtcctttccatgatacgtttaatgctgtgtttttgaattcttgtgtttttcactggtgattttgtcatgtgaaatggcttccaagcatagtgctgaagtgctctccagtgctcctaagcacaagaaggctgtaataagaagaaatctggccaggtgccctggtgcatgagaccagcctggccaacatggtgcaaccccatctctactaaaaacataaaaatcagctgggcctggtggtgtgcacctgtaatcctagctactcgggaggctgaggcatgagaatagcttgaacccgagaggcggaggttgcagtgaaccgagatcatgccactgcactccagcctggatgacagagcaagactgtgtctcaaaataaataaataaataaataaataaaagaaaagaaa

SEQ ID NO: 391521 - DNA, 338 bp, Homo sapiens
gccagaatttgttttcattctttattttctttccctagctttttattgttgttgttatttagtttttatttcataatcataaacttaactgcaatccagctaggcatgtaagggaacaaggaaaacacggaacccaaagggaactgcagtgagagcacaaagattctaggatactgcgagcaaatggggtagaggggtgctctcctgagaggagagcacagaaggaatggtctggtggtgaagacaaaacaagtcaaacttactagacttatccacagtcagcaatggtgatcttcttgctggtcttgccattcctggacccaaagcgctccatggcc

SEQ ID NO: 391522 - DNA, 414 bp, Homo sapiens
agtattactttgtcatgtgtctggcttacttagcaatacttctgagattcatccatgttgctgcatatatgattagttcttttattcctgagtatttcattgtatggatataccacaatttgtttatccattcagttaatggacacttggtttgtttccagctttcgactattataaataatgctgctacaaacagtcacatacaaatttatgtgggcattttttaatctcttgggtaaatatctaaaaatggaattactaggtcatatgttaagcatatgtttaacttaaaaagacattgccaaaactcttttctcttttgcactcttatcagcaatgcatgagagttaccattgctccacagtcagtgtttttaattgtagccattttagtgtgtgtgcagtggtatctcac

SEQ ID NO: 391523 - DNA, 450 bp, Homo sapiens
gttatcttcagcctgttaactgttgtcagccctggagagaaaccatcccttctccttaaaaacatgaaccacatactaagttgcttcttgcctcttaaagattcaggtcactcaggtacatcagactgagacaggacgctcaggtacatcatactgagacaggacactcaggtacatgatactgagacaaacactcaggtacatcatactgagacaggacgctcaggtacatcacaccgagacaggacatgttgattgttggtgtgtatttctcccaagccaccactcaaaccagtgtttgatttccatggaggttggctgatggcttttagcttgagccccaacagtgtgacttcatacaaggcaatttcttcagaaatatcatggaacttcagggacattatattattaaattaaaaaaacctaatatgttaaaatttttcattaaag

SEQ ID NO: 391524 - DNA, 272 bp, Homo sapiens
gaaatgttttgaggtttctaaacagtatcatttatttcaatcttcattatcatttattattactgaaaatctctttctacttaaggcttgaaatcttgactattgttgctgagacaaaagttcagtcatttgatgttaccattagtggcaaaagtttttgttcctttattgaggacttaccgactgctgaaaaagaccagctgatctagggtcaggcatgattgtaaataatatgtttcaagagatgattgttgaatatattcttaaataat

SEQ ID NO: 391525 - DNA, 499 bp, Homo sapiens
gaaagctaaggcaaggggattactgtattaataaattctcatgctgttaataaagacataaccaagactggataattcataatgaaaaaggttaatggcctcacagtttcacatggctggggaggtctcacaattattggagcaagcaagagactttgttcaggggaacctccacttataaaaccatcagatcacgtgagacttttttgctatcatgagaacagcatgggaaaatcccacccccatgattcaattacctcccacagggtccctcccaggacatgtggagattattacaattcaagatgagatttggttggggacagagagccaaaccatatcaattacttaaggctaggagtttgagaccaccctgggcaatattgtgagaagctatatgtaaaaaatatttttacagattaatcatgaatggtggaatgttcctgtagtctcggaagttggaggctgatgtaagattattccttgagttcccaggaat

SEQ ID NO: 391526 - DNA, 380 bp, Homo sapiens
agtgtaatggtatgatcatggcttactgtcgcctcaaattcccaggctcaagtgatccttccacctcagcctcttgagtagctgggcctacaggcacatgccattacccttggcaattttatttttggtagagacagagttttgccgtgttgcccaggctggtctcaaactcctgagctcaagtgatactcctgccttggcctcccaaagtgctaggagtataggcatgagccaccacacttggtctagtattgcttttgatttcacactaaaaaacataacaagagagcatgcttgacttctggcaaaccctaatcccaggagaatattctacttgtatgctttcttttatataaataaatgctgtcctggttgcattt

SEQ ID NO: 391527 - DNA, 232 bp, Homo sapiens
aataagacgtggcctctgctcccatggatcttccagccaaacaggggagagaaaagctctgcataaatgatcacagtacagagtcagctctacacactgatagcttatcagccttggagtctgggtcagggaaagaagagatacatctagctaggggaggaagcattagaatagggcctcacttctctttccaaatttcgggttaagaaattggatgttggagggccgggcg

SEQ ID NO: 391528 - DNA, 754 bp, Homo sapiens
agttgagaagtaaatgtgaacaaaacagacataatttatttctgctcatagcttgacatttagtggaagatatggaaaaaaataaacaagtccacgaaataattgcaaacttccataagtgctatgaaggaagcagagtgttgagacttacagaatttagacaaggcaaggttcttctctgctttaaacctcccagagctccccatgggctgggtaatgcagttccaagtccttagcatggcattcaaggctctttaaaacatcacatcttgcctgatgttcccggccactgatgctctcaatactccaggcacaactaattactggccactccctggacatgtgtgttgtgccaaggagctcagatattgacctgtcagtgataggagtggttctaagcatgatggtgacacaatctcatccaatgtacactgtcgatggtaattctgcagagtgtgtaagagggcctggtcagggagagacacgagaacctgttaggaagcatcagttagggcttcagcaagaggatggcatggcctgaaatgtgagtgggaaggatagatctatgagataccgaagtgatccattcttaatactctgtcatggattggctgtgagggcgaggagaaggggatagcaaatgacttccaactcctagccttgaacaggttgttgagctgcagactgaggcagtaaaagtggcagaaaagtggtcttaagatggtaatactcctttaatcagtgtataaattct

SEQ ID NO: 391529 - DNA, 688 bp, Homo sapiens
gtaagttttatatttaaaagttattttatgatttaaagagtgttaacattccacagtatattaagatggaagctatttgtcataccaaaaaaattggtttctagttatcaagagaaagcttcaagagcaacattccctacgcccctttaaaaactaaatgcaagtaatattcctccaagttttactaacctatgcacacaaatgaactatcattaaatgtgatacttcacatatcgattgcccccatgtacatattagggcacccatagcataaccacaaaatttcctagaattatttattatttagaatttcttagaatattattaagctccagagagaatcttggaaagattcctcacatagtctttttattccaaacttcacagccaaaccagctgtggcccgtgccttgcctgtccctgctcctctgggagaattttgattcttgtcccttgacccaaaacttggcagtgttcccttgagtcttcattatgccaagtctacctacatttgctttgcccaagaaaatgaaggagatgcctcctaccaagttctgtgtaacctgggtcatctgaatcttggagcactattatttgtactgcagatctctctcgggagcttatgaagccaagatatcagcctctacttgagctgtctctgtagacttcagacattgtctgggagttg

SEQ ID NO: 391530 - DNA, 512 bp, Homo sapiens
tgaccctttcccatttacctatttataaagattcccttggtcttcctctgcctacaggatgaatccaaactggcctgccccagcctcgcttcgcgatgcctttatgggtgctgcttctcccatcttgtcctctgcatgacccctacttctcttcagacaccaggtcaaccatcatcatcatcattgctgggaagcattccccagcttttctccagtgtggtactacaaaccacagcatattcaaattattttctcctgccaccagacagcgaaactcatgttcatttctgtatgcttacagtcaggctcagggcctgacctagaacaagtcaatagactggacagttgtcactacaatttggtgtcctcagtgagacagtgtcacgtgaaaacaacacatgggccagggaaaagggagcatgtattgggattttattactcttttggatgcccagaccctgaaccttccttcccatgtctgggagtactaagtcctctcagtaggggaggga

SEQ ID NO: 391531 - DNA, 454 bp, Homo sapiens
tctgaaacctttactaaaatgacaatgaagagatttttaagacatacatcctagggcaatggaaagaacaagacacaggacaggcgataatagctagacagctttggaaactggaaggtagatggatgagtggtaactaattgaagatacctgagaaacttcagatctaaactgattttgagaaaagcttaaaatgaccttcatctgaatgtctaagggagttatgttcccagggggattatggctgcctctgctgcatcacacaggtcaccaggtaagtggggaaagctggcagtgacaggcctcacctagttcccactcagccagcaaggccagtctcattcccaccaccagcaccgagtttatatccaggcagctcatgagtagggctgagatcttgccccaggctacaagcctccccactgagaaagcaagctggcctttcaggccccac

SEQ ID NO: 391532 - DNA, 148 bp, Homo sapiens
aaaaaaaagaaaagaaaaaaagaaaaaggaaaactttacagaaaatttaagttaataaatgcagtttaaagaagggaagctggccaacatcatgagtcatcagagagatgcaaatcaaaaacactgtgggagaccaccacacacctgc

SEQ ID NO: 391533 - DNA, 415 bp, Homo sapiens
gtgcgctcacggcagccctgggtgcctctgcggaggctccacaaggcgggcagactccctgccttcgagcccactctcactggggtggaaagggggagggaggcatggcggccttctgcctgcacccccccccccagaaccccactgtgggctccgcagcagcagctagccgtgctgtcccccgagaagcacggggagtcgggctgggcacaggcgaccctttccagcccttccctgctccaccctaggaacccactgcctaccagaaacagcctatggcactgattttattttaattaattgtttttttgagacacaatttcgctcttctctcctaggcttgcccagcctggaatgcaatgatgcgatctcggctcaccgcaacctccgcctcccaggttcaagcgattctcct

SEQ ID NO: 391534 - DNA, 1027 bp, Homo sapiens
taatataaaattcatttttgtgttagcttggcattatttacaaaatttaaaaaatactcttattcaggtaattctgacatatgctacaatatgggtgaacactgaggatgttatgataagttaaataagccaatcacaaaaagaaaaatactgcataattccgctatatgaggtacttagagtagggatagacacagaaagtagaatggtggtctgcagggcattcaggttccctcaagggaggaatggggagttattgtttaatgagggtagagagtttcagttttaaaagatgagaacaattttggagataatggtggtggtggttgcacaacaatatgaatgtgcttaacattgaactatacactttaaaatgcttgagatagtaaattttatgtgttttttagcacaacttaaaaacttgaaaaaaaaataacacttattcagagatctatcacagaatttgctgcagagtaattttgtattataattgtactgactttaggattgtattaaagtgaattcttacccttgtatatgtcatagatttcttttggtctggtgaagtttatggactctgtctcagaataatattttaatgtatataaaataagacataaaattgcaaagaaaaccaattatattgaaataattaaaatatcacagtaacaaatttttgatatattaatacatgtgcttcaaaatctgtgtgttaacaagatgtattttattggcagatttaatcactgccatgatttccaagtaagataacattgagatacctgtaacaattgtaatgtggtattaacatataagtaattcctgttagtgacaaaaatcacaaatactgatagtaatcaaagtacatgctaaaattttagttagatgttagtaaaaataaaaatataatgtttttctccattaaagttgatggatgacctgaattttctgtatcctttaaccccaagttgaacattccctaaaactgcctctttgctattgagaactttatttgcctttatgttta

SEQ ID NO: 391535 - DNA, 353 bp, Homo sapiens
agaaggcaaggaatgcaggcagcctctagaagccggaacaggcaagagccagaaggaaccagccctgtcgacagcttgactttagcctaatgcgagccacatgagacttctgacctccaatgtgtctgtggtcatctgttacggcagccaaggacactaagacacacactgtagctgcctccaggcactggccttgccactatattttatttcattttcccaggggaaggagcaaatgtttactgagcacatacagtgtcagggcccagaaggctcctcattcactctcttgtacattgtttcctggactctctggacaagaggtgtggtgcgtattaccatgatgattctca

SEQ ID NO: 391536 - DNA, 299 bp, Homo sapiens
gcactaaccacagcaattatggcattaaaatgtcaagaaattagaggtcagaataacagataattttcttctctatgtcagattgaaaattgacattctttgacagtttaggaactctggctgagaaaattatgacagcttaacttattttatacttgtaaagcagtaattgataataaactttatcatgacagcctctgggcagaaacatgacagtacagttctggtacaaagctcttcttaatatgtaaacactagatctgttggatagtagatattatttaaattgtctaaagtct

SEQ ID NO: 391537 - DNA, 322 bp, Homo sapiens
ccaactctacacacatccctctttattaacagaatcaccgcagggaaccctcggatccctttgcattttgcagataacaaaactgcccggagagttcaagggtcttgtccaaggccacagagcgaatcagtaacaaatctggaaagaaaatccagatctccagatcccacgaaatgcttccaacttcaagtacctcccacccatttcacgcacaaaacttctgaacaaccccttccccccacacacacccactcaccacgctcctttctttagctcttcctgcacacactcagagctcccccctcaaccacactggatttat

SEQ ID NO: 391538 - DNA, 243 bp, Homo sapiens
tgagaggctgcacagtctggctgcttttccattgttttggggacacacaaatatctgcataattttgagaaactaaaactatttttttaagtcctctttttgcatcaggtctgaaatgcgtgagagtattagtttatcttgcattttttttgtttatttttctgcacagtccattctgtttttatttctataaagtcttcaaatatagattgaaattgtaagtatgatattcttctgctttgt

SEQ ID NO: 391539 - DNA, 872 bp, Homo sapiens
aggaagccttgtgggaggcgtattgtccaagatgatgcgtattgtccaaacgactcagaagaagtcatttctgaagggttgatcataacttccctagccatgttttacctacagagaacttagttagaatttatgagtacagtatgttaaattacttttagtgtaccttaggcagtgtatttgttttgatacagagacaaagactatatgatccctgagacttgttgcctagtgaactcacaagcagatagaattgtacctcagttatttgggtgatttaaagatggtactatggctacactattcccagctatcgttgtgttacagtatttatacaactggaaacatctctctaaatgacaaccattgtatattgttaaataacttatagtcagtggaattctgtgggtttttctttcctacaggcaggaaattatggtgatgtgttgatatgattatatatgtagactattcagttaacatctaggagttagcaaatttgctacattcacaatcagtatgtaagtcagttgtattcctagatatcagcaactaacagaaatggaagtttttagaaagatctcttcaatatcattaaaaaatacaaaatactctacctaagaataagtctaacaaaagatgtacaagatcttgatggagaaaatgttagaccatgtcaggaagcatttaaggagatcttaaataaatgtagtactccataatgtacacgaattagaagactcagtcgtgtaaagatgttcatttacatttgtagattcaatgtaatcccaaccaaaatattttttgcattattacctctatctactgtgtgtttccttaagacaagggcattcctacgtaaccatagtaca

SEQ ID NO: 391540 - DNA, 378 bp, Homo sapiens
ctaaaaaatttaaatgtgtggctcacgttacatttcaactgaacactgctatgctggttccagcacgaaagacaggtgagatggtgcagagaaaatcctcagcaaccctgcaggcccaggcagggggcatcgcccactccagcctgctgctggcagtgactgtgaccagcgcctgcagcctttcccactaagcggaggcccctccactccccactcagcttcccggagtcttgcaacccccaaggactcctggggtctgatgagaagtaaatggtctctgtgatcagccactgtacacttctggtcgtacggagctgtgtgtcctgtgaatagtctctgtgggacctcgctcggttcgtgttcctcaagagcaaccag

SEQ ID NO: 391541 - DNA, 314 bp, Homo sapiens
gtctaatatgaccagtgtccttaaaagaagaggagattaggacacagacacccacacaggaaagaccatgtgaagacatggagagaagatggccattcacaagccagtaacaggcctgaaaagaaaccaaccttggcaacaccttgatcttggactaccagcctccatccagcactgtgagaaaaaaaaatgttgtttttttaagccaaggagttggtggcactttgttatggcagccctagcacactagtacaatgactgactctagtcaagcatacagaagtgtactgaagccagaagacgtgggagaatct

SEQ ID NO: 391542 - DNA, 777 bp, Homo sapiens
agcggagcggcgcgccgccctggacggggcgcaccgactgcgcgcgcggctgcgggcaaacatcgggagtcctgcctcagctgccgcttctccagcagcagcttcaggcttctcccgcaggagcttcgggcttctcctggtagagacgtgggaacttttcttctcctggcgaggctgcagaggtgatgggccgctcccggggctcccgcggggaggcggcacggtcttctgagctacgataattttttggaacggcagaaatgattggttctagcaacagatgggaatttggagtcactctgaaatatatcctggaataagtgtgtttgactagaaccacatcttatgaggtccccaaggatgagagtctgtgctaagtcagtgttgctgtcgcactggctctttctagcctacgtgttaatggtgtgctgtaagctgatgtccgcctcaagccagcacctccggggacatgcaggtcaccaccaaatcaagcaagggacctgtgaggtggtcgccgtgcacaggtgctgcaataagaaccgcatagaagagcggtcacaaacggtcaagtgctcttgcttcccgggacaggtggcgggcacaactcgggctcaaccttcttgtgttgaagcttccattgtgattcagaaatggtggtgtcacatgaatccgtgtttggaaggagaggattgtaaagtgctgccagattactcaggttggtcctgtagcagtggcaataaagtcaaaactacgaaggcaagtatagacaaaatgcaa

SEQ ID NO: 391543 - DNA, 1146 bp, Homo sapiens
agcggagcggcgcgccgccctggacggggcgcaccgactgcgcgcgcggctgcgggcaaacatcgggagtcctgcctcagctgccgcttctccagcagcagcttcaggcttctcccgcaggagcttcgggcttctcctggtagagacgtgggaacttttcttctcctggcgaggctgcagaggtgatgggccgctcccggggctcccgcggggaggcggcacggtgagcgtcctcgggctccggtgcggcgatcagtacctagttccggacgcgccggtccgacttggatgccggctctagtcgagtcttctgagctacgataattttttggaacggcagaaatgattggttctagcaacagatgggaatttggagtcactctgaaatatatcctggaataagtgtgtttgactagaaccacatcttatgaggtccccaaggatgagagtctgtgctaagtcagtgttgctgtcgcactggctctttctagcctacgtgttaatggtgtgctgtaagctgatgtccgcctcaagccagcacctccggggacatgcaggtcaccaccaaatcaagcaagggacctgtgaggtggtcgccgtgcacaggtgctgcaataagaaccgcatagaagagcggtcacaaacggtcaagtgctcttgcttcccgggacaggtggcgggcacaactcgggctcaaccttcttgtgttgaagcttccattgtgattcagaaatggtggtgtcacatgaatccgtgtttggaaggagaggattgtaaagtgctgccagattactcaggttggtcctgtagcagtggcaataaagtcaaaactacgaaggtaacgcggtagcgaagagagaggtgtgcttcaatcctggaggggcagcaggaggcggagctcttttgcttggattcccatacatggcccctctgcagaaaatgtctaggatttcagcaacttcatatttgtatattgtgagctgtgagaaggtggcattcacttaactggccagcctctctgcttcgtgatttatttcattgaattataaccacaagcacaacccatttgacatcctctctcggattccaaggagcatactccaaatcagaagaagaaccaaatcgagtcttccaaatggtttcaca

SEQ ID NO: 391544 - DNA, 362 bp, Homo sapiens
agttcgacggagaactctctgtacacattacttgttacctgtacaggtaataacaatgtccacttgtcggatgacctcatttaatttcaccagtcgaactagttcgacggagactcttagtttcctgagcatagaagagaggtaactatatccccttactcttaatcaagaatgcttcaataagcaaacttgaggaagaggtagctggaaactgcagagaagatagtgatccattgtatttatgtaactttctctctctctctctctctctctacacacacacacacaaacacacacacacacacacacacacacacacacacacagagctctccatattctggggttccacatccatagat

SEQ ID NO: 391545 - DNA, 886 bp, Homo sapiens
cccagtgaaatcctacctctcctcttggctcagctcaaatgtcgcctcctctgtagaaccttcaatgagtgtccagtgggaggtcagtgtgccctcttctggactcaacaaccatttggttgggtgctcccctacactctaaaatgagggtgtttagcaaaggtcttatctcccctgctgggctgtgaacaagtgagtagaaggttgctgagcatcgaagctaggataagccagaaaggtggcacttgttttttcagctgccattaaattcctgtaaaggaacttctcactgagggtgctcattctgtgtgtggggaactgcatgaaaacactcctcatggccttttgtttgcaaaggcacagttaggtctgcaaacacagaatttgagcagctgtggcaaagcagccctgatcacatggcccatcttttccattctccagctgtcctgaccaaaggccacgctggaaacagctctaagagccactaagagctgtggaggcaggagtagaggaggaaagacaaatgtcaaaattattggatgatcctgggtagcaactggccaagggggattagaatgggtgacagagcctttcacctttggggtcagcagcatgtctgacttcaggaccagaaggccaaaacatctgtcagctgagcagcagctcctgtgaatgaatcgcctttgtcttgttggaggcggggatgagtgtgaatttatttgctcaacagaaagccatgtaaacctgagatcagatggaagctctggtggtggcaagaagcccagtagcccttcagacagaagatgcccatcaacaatggaaaggagtacacaggacctcggaaggaagggtcctctctcttggcggaaggcccctcacctctttg

SEQ ID NO: 391546 - DNA, 336 bp, Homo sapiens
ggcgattacttcctctatcaaagctcagtttccccacttggagtgggagttgtagattatacaagacaatacatatgaagttcctaacccatgtagcagctgtgcgatggttatggttattcagattttatcaagcacctacaagggcccgatgcaggcagtttcaaccttacagagagtgtgctttcctggttgcaaacccctgaagccctatttacttttatcacagtggctcccaaatgtctggaaagcaggcaggcatgtaggggacgtgctggctcctacacaccatcctatctaaacttctgtagggcctgtattctcagtaacttctgc

SEQ ID NO: 391547 - DNA, 124 bp, Homo sapiens
tagagaaaggagatcacaagaaatcaattcatggtccaaatgaactactacttggagccagtcaaatttttttttatacactgaggccaggtgatttggaaaaggcaattaagtaagtgtacag

SEQ ID NO: 391548 - DNA, 689 bp, Homo sapiens
ctcccgagtagctgggattacagacatgtgccaccacccctggctaatttttgtatttgcagtacagatggggtttcaccatgttggctaggctggtcttgaactcctgacctcaagtgatctgcctgccttgacctcccaaagtgctgggattacaggcgtgagccactgcatgtggcctcttatgttcctttttaaaaggcattgaaaaaatgtgaacatttgatagtatcctgttgattttatgaatgtatcttactcttaacattttttttctttaagatatatctgtaaatgttaagtagtattcatattttattaactggctattttaaaattgaactttcttcccatttggtatataactagcatttttccactttgttttcagaacctgtttcatatccatgcactctgttcctctagggtattaggtatcttcatgttagaatgtaggaatttgctagggaatatttatttattaattgtgtcctatatgttcaacattggaaagtcacttggtgatcatccatgaaaagtcctcttgttttctttccagctattacacattttatctatctagtccccactaatacagatccattatatcttttccatataattttccttgtttgccccaagttatcttctccattgtaagatctcatctggattaattttgaagattg

SEQ ID NO: 391549 - DNA, 711 bp, Homo sapiens
cagtttcatgcctcataacaatttaataaatattactaaaatatggcaactgctaccatggctcattagcaagctgttggtgtaatataaagttatccagaattgttttgggtagttggtttgtcaatataatgcacacagtaatctctgaagaaagtcaggaacatatggtccatgttcatcagctaaccccagggaactgcaccagaatctctcttcttacaactacatgacgttgagaggagagcttgagagaagatagggaaaaaaagaatgggtggaaagagaaacattgattactcaaaccataaaatcacacttgcaagcataaatcaagaatcacaaagctaacatcttcaaggaatctgttaaaatacaagttgaacattgtagcatcagaaattctcagaatatgaattctgaatcttgcttggcacacagctaaagttaatcatttcagcagcagcagtaaaatgctgcatatagcatgctactggccaacataaatgaatctaatgccatctatttaccaaaatcaagattcctttgaatatattttcaataatttatatgctaagatgtacatacatattacactctctctctcaaaagaaacgtcatattttctaatttaaagagacatatcttgtccaattaaattcgtttgagtaggaaactgtagagttaacaactgtcaatgatcatctatgt

SEQ ID NO: 391550 - DNA, 199 bp, Homo sapiens
aactagggaatattgaatataatgaagtcacataaagatgcctccctcacccggacagttgaactaaatgacctctaagtttcttttgaaggccgagattctttgcttctgagatcttaactaggatacaacctgatgggcttgactagctcatggaggaggcatttgtaaagggtgggctttagcctgaattagggca

SEQ ID NO: 391551 - DNA, 460 bp, Homo sapiens
tcagcctctctctgatgacattaccttgtgaaattccttctcctggctcagaagctcccccactgagcaccttgtgacccctgcccctgcccgccagagagcaaccccctttgactgtaattttccactacctacccaaatcctataaaacggccccacccctatctcccttcgctgactcctttcggactcagcccgtctgcacccaggtgattaaaaagcttcattgttacaaatacacagtttcacttgggctagaaaactgtttatcaaaggtaacaaattccatgttttaaataaatggaatttatcttaagtttttaaagtaacatctttagacagatgcattttccagatttacatcttattgtagatgttattgtcaatagacaatcagggttaaaaattattggggctgagtgcagtggctcacatctctaatcccagcattttgagaggc

SEQ ID NO: 391552 - DNA, 398 bp, Homo sapiens
tgtgtcttaaatttcacctagtgtctttatttaaaatgacggtaaactctatttcatatcacctataaatgaataccctaggaggcctcatgataacgcatcccaccctgaaggatcccaaagccagcattttgaatcatggccttggccgagagcagtgtttaccctcttggtgagctgtgagctctttgagccaaaggccgcaggaccagagaaggccttgaacgcatgttaattcatggtatgttttccatcagagtccctgagaatattctttacttgggatcgttctgcagttgttatgtgtgctcagtaacttcccggaactcagtgcctgatctcttttgttttattagcctcctggttctctgaccccctgaggatcgcagtgacctgac

SEQ ID NO: 391553 - DNA, 728 bp, Homo sapiens
gggtctgtctcacatcatatcatcctaacagtgactcttctttctccctcttccacatttgagggcccttgtgattacagtaggcccactggataatctaggataatcttcctattttaagatcatctaattagcagccttaattccatctggtaccctaaattcccttctgcatgttaatgtaacatattcataggttctggggattaggacagggacatctttgggaagccattattctgtctaacacattttgtcttctgaaagggtaaattatgtatactgaactgactgtaacaatgtagattatgtgagataggagatctgactgatgcattttattaccacctgtttgccagaattatattcagactcctttctagacttcttctcatgttggttggttggtcttgtagtttcctagtactttatgcaggtgactgcactcctacattgtggacattttctataccagagtcattcaggactactgttgagaaaatgtcagtgtttgccatctcttctcactcctggtaagtacagtcctattaagtaatcttttggttgtttactttttaccaaaaaaaggcctgttcccatccttatctatcatcaagtctctcaccattatcgtagttgatatgtcttaacatctagtcattgagggtgcttttatgacacttttaattttaccctgattttcttgatgccaactgtactctgttctt

SEQ ID NO: 391554 - DNA, 657 bp, Homo sapiens
aagcagtggaagcagaagcagcagaagcagtggaagcagaagaagcaacagaagaagcagaagaagaaacagaagaagcagaagtaacagaagaagcagcagcagaagcagaagaatttcacaaatactgaactaattttttagattacataatatacacatagtattattatatgcacatgaagttcaaaaacaaggaaaactatattgtttaaggatgtatagctaggacttaaaattatgaagcaaagcaaaaaacagtcacaaaggtcaggataataactacctccactgaggggggatatgttgacaaggatggtgaggttggagggaagcacttctggcttgttgacctgggcaatgacaacactaatattcactttattatttcccttaaactgaacattttatgccttctcttgtatacagatggtccacaacttatgacggttcaacttacagtttttcaactttagcacagtgcaaaatcgatatgcattcagtagaaaccatacttcaaattttgaatttttatcttttcccaggctagcaatatgcagtatgatactttctcataatgctgggcagcagcagaaagcagcagctctcacaagggtaaacaactgatcctcaatagatatactgtgtgccagatga

SEQ ID NO: 391555 - DNA, 127 bp, Homo sapiens
aatcaatatgaaactacatatagagacatagaacaggcagagaaaactgggagaatcttctaactttaaagtgttaaaacttagacctcctcaagattttttctgtgatttggcacatgtgatgtac

SEQ ID NO: 391556 - DNA, 442 bp, Homo sapiens
ctccgagggagaggggctttcagtgaaggtgacccagattccatacactcaaggcaaacatgttctgaataggactccacatgttcatttcagtgctctccagagtgagttctaggatccaattttcttactgtttttttaagtctggcaaactgaaaatggacttcttccagaaggtctgtcagagctcaagccttacttgacaaatccaggaagatgccttgacagtgacaggactcagcctgggaaggaacttggcagaccgggacaccttcctagaatcaggcacccagtactcggtttgcctgctttctcttttcggatctcacttctaaagctttgcatatcttcacaatgtatgttatgacggattgaaattgtttaggcccccattactccctgcccaggcgacttgctccccaagccctgctaggtgcagcag

SEQ ID NO: 391557 - DNA, 776 bp, Homo sapiens
tgactgggtaatttataaagaaaaagaggtttaatggactcacagttccacctgtctggggagacctcataatcatggcccaaggcaaaaggcacgtcttacctggcagcaggccaagagggaatgagagccaagtgaaaggggtttccccttgtctcgtgagacttgcttattcactaccatgaaaacagtaaggaggaaattgctcccgtgtttcagttatctcccactgggtccctcccacaacacatgggaatgatggaagctaaaattcaagatgagatttgggtggggacacagccaaaccatatcacatatactgtaccaaattctcctaggtgattttattataaaaatgaactaatacgcatattactttatatcctgattcttttcacttaatgtgttagagacatctttcagaaaatatgttcattcaaaagttcattcaaacttttaataattgcatagtattccattttatagatagggtcattttgtggatatggatataaatagtatttcattttatgaaagtatgtctcccattgacaggtatttatattgtttgcaattttttttcttataaagagcaccgggatgaacatttgctcagtaaatacacttaacatgttagcactggggctatagcagtgaaataatctgactactatccattcccttaaagagcatatattttagttggagaaaggtaataaacagataaagaagtatgtcatatggtgaaaaatggagaaaaatgcagcagaaaaggg

SEQ ID NO: 391558 - DNA, 515 bp, Homo sapiens
gtgtcatcttgaaaatctataatgttgtgttgtgttgttgttggtttgagacagagtctcactctgtcgcccagggtggaatgcagtggtgtgatctcagctcactgtaacctccacctcccgggttccagtgattctcctgcctcagcctcccaagtagctgggattacaggcacgcgccaccatacctgcaaatttttgtatttttagtagagatggggtttcaccgtattggtcaggctggtctcaaactcctgacttcaggtgatccacccgcctcagcctcccaaagtgctgggattacaggcgtgagccaccacgcctggcctgaattcattttcttgcagctgtggagaattcgtggtgcttgcttcttcaaggccaacaggagagtctgcttctgtagggtcttatgacagattgttatcactggaatgactgtcttaccgcctttaatgtgcagcacagcctaattaagggaacagctctcccatcttgttctctggtccctccca

SEQ ID NO: 391559 - DNA, 118 bp, Homo sapiens
gtccagcaaaactaaaaggcataaaacagcgctttgctgcggtgttacacgccctcaggcaagcttcatcgaaggcatcccatctgcaatccatgatttctgctgccatgttcttcct

SEQ ID NO: 391560 - DNA, 759 bp, Homo sapiens
agtctccagttggccattggaaatgtattgctcagacttataaaataggaggaacaactagttttgatgaaaatgaaatctacaaactacaaacaccaaatattaatatcatcaaggagctcaaacaaaaaagaagtcaggatactgatgaccatcagcttgaattatcagtattacagaatgttcatcaacagaaattgagggaaataagttgtaagcatcaagaaaatctaagcaattaggaagaaaagattgaagaactggaaaatttgttacagcaaggtggctcaggaattacagtacatgatctctctaaacttcaagagaaggaaaacactattcatgcaagctctacaaattgaaaaagtagagtctaccaaaaaattgaagaatttgaacatagagtaaaagacaaataaaaaattatcttctggggccaggtgcagtggctcacacctgtaatcctagcactttgggaggtcaagatgggaagatcacttgagctcaggagtatgagactagcctggacaacatactaaaacctcatctctatgaaaaatttaaaaaaaaaaaaaaggccagaagcagtggcatgcacctgtactcccaactagttgaaaggctgaggcaacaggatcatttgagcccaggaatttgaggctgcagtgagctattatcacaccattgcactcttgtctgggtgacagagtgagacccctagctgaaaagaggctattggaagaaacaactctgagaaaa

SEQ ID NO: 391561 - DNA, 132 bp, Homo sapiens
catgctttcatttttcctttcctacacaacttcatatattctacactatcttctactttcctacagaacttgacctattaggacaagtgatttaagaccaaaagatcaaaacacaagaatattaagtagtca

SEQ ID NO: 391562 - DNA, 363 bp, Homo sapiens
ttgattaacttttcaaatcatcttgaataaaactttcttataagtcctcatttagcagtatggcagttctggtttacaattagttaagaaaagatcctgtagtaacaggagacttttcctttataaatgttactgttgcaaaaaaaatccagatacttaagtatccacttcaaatattttgtgcatatattatatatgtatatacacacatatatattatatatatgtacaaacacacacatttaggaatgatatgcactaagattatgaaagtatagctacattccttttctttttcatttgatttgattttatttttttgagacggatttttgctcttgtcgcccaggctgtagtgcagcg

SEQ ID NO: 391563 - DNA, 294 bp, Homo sapiens
aggatgggaggtgggaaggattcaggttgtcttctgccaacctctagctcaacagcctcatctgccctgtctgtccccatagaagctgtcagtcaggcctccagcacgtgccctaatggcgtaacccacagacgagatggcactacagtttttgtactcatttgcaccagtacaacccggcataggcagatgagctcaaagatgactcttgtgtgcgatccccacccccagatgctggctacaggtctcctaggctctcttggtcaccatcacctgtgtgtactcggacacagg

SEQ ID NO: 391564 - DNA, 213 bp, Homo sapiens
cccagggtacccaaccgcattttctaggtaaatgactatagatttgaagaaaaggttaaacttttcctaaatctttgatcttcaattgtttaggttatcttcctgtattattttacatcccctcccttaccgtactgccctctaaattttccattttccacttccatttggtcatttagttcatgtaaatagttactggaactttttaatttg

SEQ ID NO: 391565 - DNA, 237 bp, Homo sapiens
cttcagatgagtagcagaaatgtggatgttttctttatttaatcctttaaagtgtatctacatgttatatattcccttccacatgtatgatatacttcataatctaaagaagtaaatgaacctgagtgaactttgttagaaatgcattttaaagtcaatgttacttcaagttggaaaacacaggcatttaggaagttctttttctatatctaagttttgaattaatatttattattt

SEQ ID NO: 391566 - DNA, 197 bp, Homo sapiens
tcatggagaaggcgccattgtttgcctcttgacgcttgtctttctacccgcatgaaagctctttgagagaaaacacagttggtctttttcctttgtttctggctgttagcacggtgtccagcacacggcaggtgcccagtaaatgatgacaatgaacgtgagacccccgggcctcttcttggtggattctctctttt

SEQ ID NO: 391567 - DNA, 407 bp, Homo sapiens
ctgttgcacaacacagtgactatagttaataatattgtatatttttaagtagctccaagagattttaaatgttcacactacaaagaagtgacatgcttttgaggtgatggatatgctaattagcctgatcttatcattacaaagtgtatacttgtgtagaaacttcacattgtatcccgtaaatatatacaattattgtttggcaactaaaataagataaaacaaataagctctgtttcctcactagctctgtttagacaacagagacagaatgttttgtaagtgctcctccatctgtataattgtgattcctaagattgtaatttcatttttacagaaggcatatatgcataatagaaggggattctgttttgaagcaagaataacttggaatatcaggtgatctg

SEQ ID NO: 391568 - DNA, 394 bp, Homo sapiens
cgccatcttggctcactgcagcctccacctcctggattcaagcaattctcctgcctcagcctcctgagtagctgagactataggcacacaccaccacattcaacaaatttctgttatttttagtagagacggggtttcaccatgttgtccaggatggtctcgatctcctgacctcgtgatccacccgactcagtctcccaatgtgctgggattacaggcgtgagccaccacaccaggcctacagtacaaaccttaaccataatgtcttttgatggaaagctgcttacattttttttccagataactccttggagcttttaaagtactccatcttcagaagacaatgacttaaattcacagaattaaaatgttaagtctttttcctattactaat

SEQ ID NO: 391569 - DNA, 461 bp, Homo sapiens
tactactaaattcgcggactgcgactacatccctcacgctgggagctgtagaccggagctgttcctattcggccatcttggctcctcgatcctgaatcatgtaaaaggcactggggatacagcaatgagaaaatgaagaataagaacaataattactcatgcaattagaacagtatcacttgctattactgctgagagtatccctaatcatctatttactgaactgttactaagattctactttggactatgctttgtattgggcacagatgctacaatggcagacaaggtctaaaccctactgggaagaaggtatgtggcctaatgtaaggtttccaggcctgaatatcctgagaaacccataagatttattaaattgtaatatttacagttctacccaaggtatttgtattaaaagaaaataaaaatgtaaaaaaaaattccagatgattctgacaaac

SEQ ID NO: 391570 - DNA, 807 bp, Homo sapiens
aagaaccacgtatgtcaaccaacagtttttagatcttgtgtttaaaagacaagggtttccagcctcctaaattgaggccacctacggtgtggtagaaaatttttaaaaaatgctaaagatgtagactaatatattcaatattgcctaatattcctcaaagaaaggactttgtgttttcctactcgatagtttgtagaaacaaaacaaaacaaaaattgtagagatggggataatctgaagtgtgtacttatgcagtaattaagaatgtacaaatttttataaaatttgaccttcattttacatatgaacataaaattgtgatggcaccatggaaaagagaggataatactcaggtcagtaccttgtacagaaaggcatcgccacttgatttcctttatagacctaccccacaattaacctggcctttcttagacctagaaatattgcattaaaaccttcaaattgtttttttgttcaatattatgattgatgttgcacttctctctgctctcagaagtataataagtaattaagaatagtaacaaaaatagatgcttttttccagtacactgaaatagtaattgcaataatctacagaaactatgtatattaaaagcagcattctctcttctagagaaaaaaattaaatgattttaaatagttggatatgtaagaagaaaaactctcatgaaaataacccctttggatggacatgttgtaaagaagcagtcagttttggttgtgtttggttttattataccttgagttctagggtacatgtgcccatgtgcaggtttgttacatatg

SEQ ID NO: 391571 - DNA, 286 bp, Homo sapiens
tgcttgtcctgcctctgggcggtaccactgatctgcatcagagttgcctgctattctctggtgtatgttgtcctcatgaggatgcaaggagtttaggacagagtgaaccaaagcccagattaagcaaatgtgggcagaataatatgttcccctttatgaacaattttaaattgtcagccaatttcgtcccagagtttgagttttaaatttccctcagtaggaaaccaagggtaaaggagttttacaacctcaaacagttcaattaacttatcagtagagactttta

SEQ ID NO: 391572 - DNA, 729 bp, Homo sapiens
cgtggtagctcacacctgttatcccagcactttgaggggccgaggcgggtggatcacaaggtcaggagttcaagaccagcctggccaatatggtgaaaccccatctctactaaaaatacaaaaattagctgggtgtggtggcgggtgcctgtagtcccagctactcgggaggctgaggcaggacaatcacttgaacccaggaggcggaagttgcaagtgagccaagatcacaccactgcacttcagcctgggtgacagagcaagactccatcccccacaaaaaatactttattgttaaaaaaacactaacaagccatcatcgaaatcatgagtaagtcataatcttttctctggctggagggccttgcctcaataaggatgcctgctgactgatcaaggtattggttgctgaaggctggggtagctgtgaaaatttcctaaaataagacagtaataaagtttgccgtatcgactgattcttccttttatgaaaaatttctctggagtacatgatattgtttgatagcattttacacacagcagaacatccttcgatattggaggcaatgctctcaaaccttgctactgctttatcaactaagtttatggaatattcaaaatcctttttcaacaatgttcacagtagattccatctcaagaaaccactttctctggtcgtccaccataagaagcaactccttatctgatcaagttttatcaagagactgt

SEQ ID NO: 391573 - DNA, 337 bp, Homo sapiens
ctgagcccctcaccctttgtaattagaattgtaaaaagaaaaattgttcattatgtgattcatcatttcttaatgtcacgtctacatatcacccaaatcaggctgcatgggccacctgataccacctgcgtgccctagtcgaccttatgactgggcctccatcgttgcatccccagagcttcaaatgtcacataggaaaattgtaagcacacaacacaactgggtgaatgactgaatgaatggatgcatcgcttagcctcatcattctttctttcttatttttatttttttcgagacagagtctcactctgtcacccaggctggagtgcagtggcac

SEQ ID NO: 391574 - DNA, 180 bp, Homo sapiens
gacggcgtgttgctctggctgctctagatggatccctataggcgctagtgtgacaaaatatctgtacactaaacccccacaacatgcaatttacccatgtaacaaactcgtatatgtaccccatgaacctaaaaataaaagtgggaaagaaaaaaaagtaaaaaacttttgaggatgatt

SEQ ID NO: 391575 - DNA, 280 bp, Homo sapiens
gacggcgtgttgctctggctgctctagatggatccctataggcgctagtgtgacaaaatatctgtacactaaacccccacaacatgcaatttacccatgtaacaaactcgtatatgtaccccatgaacctaaaaataaaagtgggaaagaaaaaaaagtaaaaaacttttgaggatgattaaaaaaaaaaaaagaaaatgggttgaatcaaagaacacaagcttttctactatttggctcagggctctttctgaaatcaaaaccacctccttatactctg

SEQ ID NO: 391576 - DNA, 232 bp, Homo sapiens
acccttcatccatggcacccatgattctactgtctgcttctatgatttaaactgttttagattctgcatatgattgagatgagatactctttgtcttttggtgtctggcttatttcgcttagcataatgtcctccaagtttatccatgatgttgcaaattgcaaaatgttcttcttcttatggctgaacgatattctcttgtttagacacaccacattttctttattaattc

SEQ ID NO: 391577 - DNA, 639 bp, Homo sapiens
  misc_feature (219)..(219): n is a, c, g, or t
  misc_feature (579)..(579): n is a, c, g, or t
tactttaggcctgctccctggctctgtgacagatgtctcatgacaggggggattggagggacagagggacgtgctcagtgtgctgaggggcagacgaggctaccaaagggcaccttggacactggatggccgcaggaaggcccctgaaccccatcctgattgatccagggccagtgaccttggcccagactgcaggcctggggactcaggttcctttgntttcttaagaaactactatactactttttggcatagctgtacgattttacattcccaccagtcatgtgtgaaagctccagtttttactcatgctccccagagtttgatgatttattagagactcttggaatacagtattagtaggatttactgtgtcagtttagctatttatccattaacagtaacaatagtaggaaacacatactgtttaccataggtcaagcaatgttgtaaacattttacatggattaactcatttcattctcacaacactatgaagtatatttataaccatcccccctaagttcagagccagggccctgccacgcctatctccatggtgatgtcttctcactttgncttcctcctgagaaatggcagtgccatctgaatgaaatctggttcagaggaggagagact

SEQ ID NO: 391578 - DNA, 650 bp, Homo sapiens
tctaatcggcgccacacgacgggccttccccacaacctcatctgcttggggacgtaaagggctctgtgggggagctgcagctttcgtgcccatctgttaaaggccagaacttcccatctctgaaatgcgggagggaacagagctcaagcttgaataactgagcgcggcccggcagtcccccaagtgaaggtgctagcgctagagcagcggcagggcggggagcgggaggccgggccccagggaaccgcggggcgcgcccggcgccgcattacctctccagggcctgtagggtgtagctgatgagcggcctctccaggatggggcagaattgcttcggggtggggacccccatcctctccccgcaccccccggcaggcaacacagctgccacggcttgcgggtggcgcccgggctcggtcccggccacgctctgcagggaggcggaagccgtgtggtccgcgccgcgctgaccactcaggcaaggacccggctccgccggcctggcgctgcccggcggcccggcctccatggctgcgggcggaacggcgagccccgctagcctcgggccgatgcgaccccgcgctgctcccaccctcggccggggtcgcggggcgaagggcagaccacggagagggacgcagagcgcgcaa

SEQ ID NO: 391579 - DNA, 819 bp, Homo sapiens
cacatacttgacagttaaaaagagtttctgtctccccaggggttcctcatagctctctctacctctcagtgtttttctctatagttccctagagctgctaagtcagctatttcagcatcttctttggaattccacttgacttttccttcttacaggctacatgctgtctttccccatctgccttcctttaaaacataggtatccctgggatggcagcacgctgagtgccgctgtcagcaggtgcactgggtcagctctccttatgaactggaagagggatgagtgcctagggtaaatggaaggagaactgaccagaagttaggatggggcttgtgtctcattcagtcccagacttgctgggtggctttagacaagtcgcttcacttccctaagcctcaatattctcttctgaaaagtcaagtgaataataacacccacctcattgggctgatgaaagattcagatgagaaattggatgtgaaaggactttgaaactgtaacatgaggtgattttattgatcatctggaggcagggaaagaagccttggggtaggtgaaaattcactttgccaacctcaaaattgcactaagtgttggccctgttaaaaaagcctgatgcaactgaacattcccttaatatagagaatgacgaatctgtatttgttgccagagttgtcacattcttccaagagtgcagacttttatgggcccctggaagctccgccggggtctatttctgaggatgggaacattgtgcttcgttggcaggcttcttaaaccaaggcctcttgtggtcattgaagaatctgggtctgcctt

SEQ ID NO: 391580 - DNA, 361 bp, Homo sapiens
cccaaccacagcgaggtcttgcctttgcagaaggaaattatcacccagagaacccggccgaccgtgtcatgcacacgacgatcccacggtgctgttttctgtcaacagtgtttcccagccattccctcctgcctgccagctcctctgctctccagggctttcactaacccacctgcccaactgaccagcattaggctgtccagttagcccacatctgtccaggggtctcaaaggctcaggaccccaagacaccatccaggtagccaagaggacagggaacccagtctggagagtagaataacgtttcgctccaatttgagatcccaaaatgagatgctgcccgggaccagaagtcagtttc

SEQ ID NO: 391581 - DNA, 151 bp, Homo sapiens
atactcctggcaatcgcttcataactctcaatgctgtagactagggggtcagcgaacttttttttaaaggatcagataataaatgttagttctgagggccataagaactgttgcaatgccaggtgcggtggctcacgccataatcccagca

SEQ ID NO: 391582 - DNA, 811 bp, Homo sapiens
tataagacaaaaagcaattgatacttgtgtatcaaagagaattatctggatatgtggtattaaacatggtaaaatgtatttggagcccaagttctatgaaaagattataaataaggacttactcactctaaatgaatttgtcttctggctcaggcaaatgacattccagggtactgagagaacttgagaatgaggtcactgaacagctctcagtgatccataaagaactgtggccagtggactatgttccagaaggctgatgttaaaatcataaatttctcccaattatcctgtttttttaagtttattataaaaaattttaagcagtttcattttggcagttattttgtagatggtgctatgtagttcatatttcatcacattaggagatgtacttttagtaatgctaagactgagcaatgggttcagttggtgacagtctaatccactataaagtttcccatcaaccttaaacttaattgttttaccatccattgatgaacattgcctgattccgtcattttgctagaggtgacaaaaaggtaattttgaattctgtcattccttttgtattttttattggctaaagtagttttatagagaatactgtcattcaccctagcacacattcgaagaacccgtatacacttcaaactcctaggaacgcaacaaacaacagacaagacacaagaaaccccgtctgtgcggcacacctcgcgcccgggagaaaacagatcaaagacccttccatatcggagcccgggccccaacgggtaacggacaaacgggccaaaacggcaacacaagaaaa

SEQ ID NO: 391583 - DNA, 272 bp, Homo sapiens
gtcccctgaccatgtgttgctcctattttcggcataatgctctaacatgatcctcgtcaagtgcctgggtccctatttgaagctcatggtgtcatcattttttctgtgtgaaaaaaccctatggacgccactaaataagcctttattctaggacagacacagtgcattagtgcacctcatgttatttcttttaggaggtagcacatacctctacatttcaaggagcataaagcaaacccttcagttgtttaagaatttggatcaataaatgg

SEQ ID NO: 391584 - DNA, 411 bp, Homo sapiens
gtgagattcatattatcacgtgacgatcatgctatactcgtgagacgtgttctgagctgcggactcctctttgatcctgctcacctcctcccaatctctactcagcatcctaccccgactgaatctgacactctgtgagcttccccaccaacacatcctctccaaattcgggtgttggaatgggcagaataaacagagctgattacaaatttagccccattctttggatcacagactcaaaccacaagaagcagaaaggacaacaagaatgacccgcagggtcaagactcctgagtctcaagctgggagtgtcaaatgcttccgaaatgctccatgggttgggaaatcaaaaaggaaagggatagtgccagtagaaagaatggaagagagtctcacaataatttaatgcca

SEQ ID NO: 391585 - DNA, 179 bp, Homo sapiens
ggtcatacaggctcttgcacaagttaaatgtgaggggcccggacccgtcaggcatggttcagcaggtggctgtggtctcatcacacactcagcagctgaggtcttttgcggagtgggggttaggtggagagctactgaaataagcatggagaggcacccccctcacctcctgctgggtt

SEQ ID NO: 391586 - DNA, 232 bp, Homo sapiens
gctacaagagcaatggagagacgacagaaacacagtgaatcatgaggttaaagtcagagagattcgatgaccaagggaattaatatttaggacagaggctgatttaaattcattcacattttattcattcaaataaaaacaatttttactgtgggcttgctatataccaggcactcttctaggaactgggacatagcagtgaacaaagttatagccctcatggagcttacag

SEQ ID NO: 391587 - DNA, 419 bp, Homo sapiens
gatgaattataagaagaatcagaatctcggtcatgcaaagacagacccagtttccccagtgattcctgtcagctacaacattttgaagtatattaacattaagccctgaatatgcttcttattttaaatactgtggcatagtgcaattcattagcctttttgaaaggcatagaaaggatttgaagtcaagcatgtcttaaagaagcaaagagactgatagtcaataccaatcacccagacccagaagtggggcaacaagcacggagcacaggcttagtatcaacctgattgtgtctaatgcattctgctgacacctctgcaactgagcgttagcatccatactgttccaattctccatacggcatcttctacagaaacagatctctaagagaagaaatgaaaaagtttcatccaatctt

SEQ ID NO: 391588 - DNA, 3024 bp, Homo sapiens
caagagaagtcctcgggcgcgggctccctggggaatagcaggccgagctttctgaattcggctctgtgggacgtttgggacggggaagagcagaggcctccagagacccctcctccggcccagatgccaagcgctggtggagctcagaagcccgaagggttagagacacccaaaggtgctaatcggaagaagaacttgccccccaaagtgcccataacgccgatgccacagtattccattatggagacgccggtgctgaagaaggaactggataggtttggagtccgccctctgcctaaacgccagatggttctgaagctgaaggagatattccagtacactcaccagaccctggactcagactccgaggacgagagccagtcctcacagccgctgttgcaggcgcctcactgccagaccctcgcctcccagacctacaagccttcaagggcaggggtccatgcccagcaggaggccaccacaggacctggggcccataggcccaagggacctgctaagaccaagggcccccgacatcaaaggaagcatcatgaaagcatcacacccccaagcaggtcgcccaccaaggaggcacctccaggcctcaatgatgacgcccagatcccagcctctcaagaatccgtggccacctctgtggatggcagtgacagctccttgagctcacagagttcttcctcctgtgagtttggagcggcatttgagtctgcaggtgaagaggagggcgagggggaggtcagtgcctcgcaggcagccgtgcaggcggcggacacagacgaggcgctgaggtgctacatccgctccaagccggccctgtaccagaaggtgctgctgtaccagccctttgagctgcgggagctgcaggcagagctgaggcagaacggcctccgtgtgtcctcgcgcaggctgttggacttcctggacacccactgtatcaccttcaccactgccgccacccgcagggagaagctccagggcaggaggcggcagcctcggggcaagaagaaggtggagcggaactgatggggccatcccgaccccaccccaacctgccatcagcagcccccacccccgccatttgcagggaggacctgggacacccagcgtgggtcaggcctccacaggcatttctgggcctggggaccacatcagctctgcgctgtgatgatgaccacagcccaatccagggcttcctcctctgggctctgctttctagggtggcatttggagcatgtcacccactggatttacagactccagccccttcctctgtccgtgctcacagtgtgtctccctttttggttttctttttttttttctttttgagacagtcgtgctgtgtcacctaggctggagtgcagtggcacaatctcggctcactgcaacctccgcctcccgggttcaagcaattctcctgcctcagcctcccagatagctgggactacaggcacacgctgccacgcccagctgattttttatattttagtagaaacggggtttcaccatgttgctcaggctggtcacaaactccagagctcaggcaatccgcctgctgcggcctcccaaagtgctgggatcacaggcgccagccactgcgcccggcccagtgtgtctcccttaacccaagagggccctcagctgtcccagggggcagtgggccatcaccagctggccagggcatggcctattctgccacatttgccaccctctgagcccaccagtcctgggcacagctgccctacatgtctgtcctgagatggacgtcaggtccagcctgccccggcagcccgggcccgtcctcctcagcactcaggccaaccccagccaccgccagcctgagaccaggtgtcctgaggctccctgcactgccacagcccagatgcagttctcctgacccagccgtgctacccggacacttgtcattgttaccagcagtctccaaactggacagtgcacaagggcccagaacaactctgatgccaccacaaaacaaacatgttcactagcggattccattctttgggttaaagctgcctccagcctcaggagcagtgtggaggaagatgagggccaggaaagaaggaaaccttggtttctccatccttgtgaatgtcctcgtctgtttcaaatacagtgcagtcagttttatatgatgtgcaataaaccaaaaaggctttattaaaatctggctgccacactccagggagaccacgagcgaaacgggggacctggaggcaccgtggcccctcagcccgtgccccacgcctgcagaagtccccaccttgcacctgccctttactttggagtaacctgggcctgctgtctcctcatttcagttcccagaccagagatgcagatgttcatccattaatccacacacccgtatccaacagagccctggctgggtgccaagctccagcccccgcacctcaaagtggggcccaagcacccccagctgctgcctcagccgggagttgctacaaaagcagattcaggccccaccccacaactcaccaagacagcacatgcctttaccattgcgtccggtccagtggaggagacagacgctggcctatcccagcctggtggggagtcgggctccagtggcttgaagggccgtgtcagggacagcctcccagaagaggggtttgtgagctgcatcttagggctcagcagcatttagggggtgaaatgtgatttctggcgcacatactatgtcctggcacgtgaaccagcggagaggcccaggcctcccagcttacggtgcccggggcgaacaatttgagaggctgagatcagctgtgatcaatctgaggctggcctctggcctgtttcggaaggcatcacgcactgcttccttgatgggctgatccccctccctggtgttagggaagcgagagggagtggtgcaggtgggggactcggggcccctgtccggcctcgcagggtttgtggtttggggaagtatgtgttatgtgccatgacttgaaagttcagaacttcaag

SEQ ID NO: 391589 - DNA, 2198 bp, Homo sapiens
caagagaagtcctcgggcgcgggctccctggggaatagcaggccgagctttctgaattcggctctgtgggacgtttgggacggggaagagcagaggcctccagagacccctcctccggcccagatgccaagcgctggtggagctcagaagcccgaagggttagagacacccaaaggtgctaatcggaagaagaacttgccccccaaagtgcccataacgccgatgccacagtattccattatggagacgccggtgctgaagaaggaactggataggtttggagtccgccctctgcctaaacgccagatggttctgaagctgaaggagatattccagtacactcaccagaccctggactcagactccgaggacgagagccagtcctcacagccgctgttgcaggcgcctcactgccagaccctcgcctcccagacctacaagccttcaagggcaggggtccatgcccagcaggaggccaccacaggacctggggcccataggcccaagggacctgctaagaccaagggcccccgacatcaaaggaagcatcatgaaagcatcacacccccaagcaggtcgcccaccaaggaggcacctccaggcctcaatgatgacgcccagatcccagcctctcaagaatccgtggccacctctgtggatggcagtgacagctccttgagctcacagagttcttcctcctgtgagtttggagcggcatttgagtctgcaggtgaagaggagggcgagggggaggtcagtgcctcgcaggcagccgtgcaggcggcggacacagacgaggcgctgaggtgctacatccgctccaagccggccctgtaccagaaggtgctgctgtaccagccctttgagctgcgggagctgcaggcagagctgaggcagaacggcctccgtgtgtcctcgcgcaggctgttggacttcctggacacccactgtatcaccttcaccactgccgccacccgcagggagaagctccagggcaggaggcggcagcctcggggcaagaagaaggtggagcggaactgatggggccatcccgaccccaccccaacctgccatcagcagcccccacccccgccatttgcagggaggacctgggacacccagcgtgggtcaggcctccacaggcatttctgggcctggggaccacatcagctctgcgctgtgatgatgaccacagcccaatccagggcttcctcctctgggctctgctttctagggtggcatttggagcatgtcacccactggatttacagactccagccccttcctctgtccgtgctcacagtgtgtctccctttttggttttctttttttttttctttttgagacagtcgtgctgtgtcacctaggctggagtgcagtggcacaatctcggctcactgcaacctccgcctcccgggttcaagcaattctcctgcctcagcctcccagatagctgggactacaggcacacgctgccacgcccagctgattttttatattttagtagaaacggggtttcaccatgttgctcaggctggtcacaaactccagagctcaggcaatccgcctgctgcggcctcccaaagtgctgggatcacaggcgccagccactgcgcccggcccagtgtgtctcccttaacccaagagggccctcagctgtcccagggggcagtgggccatcaccagctggccagggcatggcctattctgccacatttgccaccctctgagcccaccagtcctgggcacagctgccctacatgtctgtcctgagatggacgtcaggtccagcctgccccggcagcccgggcccgtcctcctcagcactcaggccaaccccagccaccgccagcctgagaccaggtgtcctgaggctccctgcactgccacagcccagatgcagttctcctgacccagccgtgctacccggacacttgtcattgttaccagcagtctccaaactggacagtgcacaagggcccagaacaactctgatgccaccacaaaacaaacatgttcactagcggattccattctttgggttaaagctgcctccagcctcaggagcagtgtggaggaagatgagggccaggaaagaaggaaaccttggtttctccatccttgtgaatgtcctcgtctgtttcaaatacagtgcagtcagttttatatgatgtgcaataaaccaaaaaggctttatt

SEQ ID NO: 391590 - DNA, 1670 bp, Homo sapiens
caagagaagtcctcgggcgcgggctccctggggaatagcaggccgagctttctgaattcggctctgtgggacgtttgggacggggaagagcagaggcctccagagacccctcctccggcccagatgccaagcgctggtggagctcagaagcccgaagggttagagacacccaaaggtgctaatcggaagaagaacttgccccccaaagtgcccataacgccgatgccacagtattccattatggagacgccggtgctgaagaaggaactggataggtttggagtccgccctctgcctaaacgccagatggttctgaagctgaaggagatattccagtacactcaccagaccctggactcagactccgaggacgagagccagtcctcacagccgctgttgcaggcgcctcactgccagaccctcgcctcccagacctacaagccttcaagggcaggggtccatgcccagcaggaggccaccacaggacctggggcccataggcccaagggacctgctaagaccaagggcccccgacatcaaaggaagcatcatgaaagcatcacacccccaagcaggtcgcccaccaaggaggcacctccaggcctcaatgatgacgcccagatcccagcctctcaagaatccgtggccacaaaacaaacatgttcactagcggattccattctttgggttaaagctgcctccagcctcaggagcagtgtggaggaagatgagggccaggaaagaaggaaaccttggtttctccatccttgtgaatgtcctcgtctgtttcaaatacagtgcagtcagttttatatgatgtgcaataaaccaaaaaggctttattaaaatctggctgccacactccagggagaccacgagcgaaacgggggacctggaggcaccgtggcccctcagcccgtgccccacgcctgcagaagtccccaccttgcacctgccctttactttggagtaacctgggcctgctgtctcctcatttcagttcccagaccagagatgcagatgttcatccattaatccacacacccgtatccaacagagccctggctgggtgccaagctccagcccccgcacctcaaagtggggcccaagcacccccagctgctgcctcagccgggagttgctacaaaagcagattcaggccccaccccacaactcaccaagacagcacatgcctttaccattgcgtccggtccagtggaggagacagacgctggcctatcccagcctggtggggagtcgggctccagtggcttgaagggccgtgtcagggacagcctcccagaagaggggtttgtgagctgcatcttagggctcagcagcatttagggggtgaaatgtgatttctggcgcacatactatgtcctggcacgtgaaccagcggagaggcccaggcctcccagcttacggtgcccggggcgaacaatttgagaggctgagatcagctgtgatcaatctgaggctggcctctggcctgtttcggaaggcatcacgcactgcttccttgatgggctgatccccctccctggtgttagggaagcgagagggagtggtgcaggtgggggactcggggcccctgtccggcctcgcagggtttgtggtttggggaagtatgtgttatgtgccatgacttgaaagttcagaacttcaag

SEQ ID NO: 391591 - DNA, 390 bp, Homo sapiens
tgacttaactctgtgtttggcacacaatatccattaagaaatgttcacttcattcttgttagtagtaataaattataaaaatgtctgatgaagcgttgtcacaaatgagccaagcatatcaatcagtgaaataagtcaaaaatagtctttctaccctatctctttgaggtaaaatgttaatatccatttcagggaaatagaagaaaaatgataaccttagcttgatatcaagatttattttttaaatgacattagttaaaactaatgcttttcatgagctctgaaatgagttccaattggctaagtcagtagaaaccttactgcaaacgaaattgttatttatttaatatttggaatttgcaactgttttaatcaattaaattatgtttc

SEQ ID NO: 391592 - DNA, 320 bp, Homo sapiens
accagttttacacactgagaaaaagttcctttcaaaagaggagaagacagcccatgaagcaattaaaggaaaagggaaaaggaagggaagaagcaagggagtgagggaaggagagacagaaaatccacctaaccacagggaaaggcgaggtgtcagcaccccccagttttccaagtgaccaccaggcggcactgttcgcagttcccacagctaggtaaagcaacccccttttaaaaacaaaaacatggaacaaatcaccaaaatccttcatcttaactgcggtgccttcatctcaggaggccccatagctacccaaaaag

SEQ ID NO: 391593 - DNA, 144 bp, Homo sapiens
gtattaaacttgtcttagctggaaccaactctctataccctgctgaggtttgtgggtcttactctgtccttcagagtgttaatgaaatttttcttagcttcccgtcgttcaaatgttttttaaacatacctgggtctttcatgc

SEQ ID NO: 391594 - DNA, 216 bp, Homo sapiens
ttgttttacttctacatttaagacatatcattcacactataattccaatatcaatcattgttgctactactaatactattactaccaccactacatctacagccaaaatttgctgtgcatctactataggccagtgctttatctgtgtttttgtttgtttgtttgagacagagttccgctcttgtcgcccagtctggagtgcaatggcacaatctc

SEQ ID NO: 391595 - DNA, 2180 bp, Homo sapiens
ttttttttttttttttgagacggagtttcttgtcgcccaggctggagtgcagtggcatgatcttggctcactgcaagctccgcctcccgggttcacaccattctcctgtctcagcctcccaagtagctgggactacaggcacccgccaccacgcccgactaattttttgtatttttagtagagtcggggtttcaccgtgttagccaggatggtctcgaactcctgaccccgtgatccgcccaccttggcctcccaaagggctgggattacaggcatgagccaccgcgcccggctgaactgatttttttttaatgaagtgcatcgtgttcccacttgcacttaaagttcacatttggtgccaggctgtattgcttcttctcactggtgagtggcagctgtgtctcctttctgccagtccagcagtcccagctgtcagtggcacctgcataatgacacgtctgcatttccccccaatcagcgtgcagcggttttgggaggaggaatgcgactgcatggcgcgctcgctgcaacctcagtctgcagcctgctagggacgcacggccacactcctgtctttcagcctcagtctgcagcctgctagggacgcacggccacactcctgtctttcagcctcagtctgcagcctgctagggacgcacggccacactcctgtctttcagcctcagtctgtagcctgctagggatgcacggccacgctcctgtctttgaggtgctgtcagaacagctttctcctcggtatcccgccgggtttgactggctagtgggcttgctttggtttggactcacccagatctagtgcagggacacacacgggggccggcattgctcctttccgccatgtggagttggccggggcagaaggacatgctctggtttggacagcccggccctgggggctggaataggaaatgcctgcgtccctttaccctgcccaggggccaacacccccagcctagctacggcttcccccaggtgaacgaggtggtcttcagccccggggagtcccactgcgccacatgcagtgaggatgggagtgtgcgggtgtgggccttggccagcatggagcttgtgatccagttccaggtgctgaaccagagctgcctctgcctggcatggagccccccgtgctgtggccgccctgagcagcagcggctagcggctggctacggtgacggctccctgcgcatcttcagcgtctcccgcacggccatggagctcaagatgcacccccacccggtggcgctgaccactgttgccttctccaccgatggtcagactgtcctctctggagacaaggatgggctcgtggctgtgagccacccctgcacagggacaaccttccgtgtgctgagtgaccaccagggcgccccaatctctaccatctgtgtcacgtgcaaagagtgtgaagacttaggggtggagggcacagacctatggctggctgccagtggggaccagcgggtcagcgtctgggcctccgactggctgcggaaccactgtgagcttgtggactggttgagtttcccaatgcctgccaccacggagactcagggccacctgccaccctccctcgctgccttctgcccttgggatggggcgctcctgatgtacgtgggccccggtgtttacaaggaggtgatcatctacaacctctgccagaagcaggtggtggagaagataccactgcccttttttgccatgtccctgagcctgtcccccgggacccacctcctggctgttggctttgctgagtgcatgctgaggctggtagactgtgccatggggactgcccaagactttgccggccacgacaacgcagtgcacctgtgcaggtttacaccgtccgccaggctgctcttcacggccgcccgcaacgagatccttgtgtgggaggtccccggcctctgagatgcagcagggactgtggtggtgggcatcacgcctggtcatgccaggcacctggacacaggcttggcagaggcgccaggttgtcaatggcctcatgctgggacaggccaggattcacgtaaatcgcctggagcaagctgttgtaaatttggcgccctgtgaatactttcatacctgttgcccttttgcctaagaaatctttaatgtttctatcttgtaataaacatgggcatttattgcaaaaaaaaaaa

SEQ ID NO: 391596 - DNA, 2633 bp, Homo sapiens
gctgctgtcgagtacgggcatgggcccagaagccccagctccatgggctttctcttcttccaccgggagggcacagccaggtcctgagatgcaatgctgagggccctgcctcggctggggacccagctggctcttgtcatcggccttgagacccattgttctctccttccctgcaccctgaggtccagttctgtgttcatggaacacgagctggtgctggacggggctgtggtgagtgccagcttcgatgacagcgtggacatgggcgtcgtgggcaccacggcgggcacgctgtggtttgtcagctgggccgagggcaccagcacacgtctcatcagtggccacaggagcaaggtgagggacttccagcctgggcagaggcggggcagccgaacctggtgccctccctgcctgccggctccatctccaccagcccagatgattccaagtcctgccgtcactggctcgcagcggccgccttggggttcccagcggggaagtcttgggtgtgcacgtcccctcaaagccgtcccggttgtgtctgcacaagcgagccgcctggcaggccttgcaggtcttctcaaactgtcctttccctgctattgctttgcgtttttttgtttgtttgttttttgttttttgtaattgtcaaagaaatcacatcatctcgaactcctgaccccgtgatccgcccaccttggcctcccaaagggctgggattacaggcatgagccaccgcgcccggctgaactgatttttttttaatgaagtgcatcgtgttcccacttgcacttaaagttcacatttggtgccaggctgtattgcttcttctcactggtgagtggcagctgtgtctcctttctgccagtccagcagtcccagctgtcagtggcacctgcataatgacacgtctgcatttccccccaatcagcgtgcagcggttttgggaggaggaatgcgactgcatggcgcgctcgctgcaacctcagtctgcagcctgctagggacgcacggccacactcctgtctttcagcctcagtctgcagcctgctagggacgcacggccacactcctgtctttcagcctcagtctgcagcctgctagggacgcacggccacactcctgtctttcagcctcagtctgtagcctgctagggatgcacggccacgctcctgtctttgaggtgctgtcagaacagctttctcctcggtatcccgccgggtttgactggctagtgggcttgctttggtttggactcacccagatctagtgcagggacacacacgggggccggcattgctcctttccgccatgtggagttggccggggcagaaggacatgctctggtttggacagcccggccctgggggctggaataggaaatgcctgcgtccctttaccctgcccaggggccaacacccccagcctagctacggcttcccccaggtgaacgaggtggtcttcagccccggggagtcccactgcgccacatgcagtgaggatgggagtgtgcgggtgtgggccttggccagcatggagcttgtgatccagttccaggtgctgaaccagagctgcctctgcctggcatggagccccccgtgctgtggccgccctgagcagcagcggctagcggctggctacggtgacggctccctgcgcatcttcagcgtctcccgcacggccatggagctcaagatgcacccccacccggtggcgctgaccactgttgccttctccaccgatggtcagactgtcctctctggagacaaggatgggctcgtggctgtgagccacccctgcacagggacaaccttccgtgtgctgagtgaccaccagggcgccccaatctctaccatctgtgtcacgtgcaaagagtgtgaagacttaggggtggagggcacagacctatggctggctgccagtggggaccagcgggtcagcgtctgggcctccgactggctgcggaaccactgtgagcttgtggactggttgagtttcccaatgcctgccaccacggagactcagggccacctgccaccctccctcgctgccttctgcccttgggatggggcgctcctgatgtacgtgggccccggtgtttacaaggaggtgatcatctacaacctctgccagaagcaggtggtggagaagataccactgcccttttttgccatgtccctgagcctgtcccccgggacccacctcctggctgttggctttgctgagtgcatgctgaggctggtagactgtgccatggggactgcccaagactttgccggccacgacaacgcagtgcacctgtgcaggtttacaccgtccgccaggctgctcttcacggccgcccgcaacgagatccttgtgtgggaggtccccggcctctgagatgcagcagggactgtggtggtgggcatcacgcctggtcatgccaggcacctggacacaggcttggcagaggcgccaggttgtcaatggcctcatgctgggacaggccaggattcacgtaaatcgcctggagcaagctgttgtaaatttggcgccctgtgaatactttcatacctgttgcccttttgcctaagaaatctttaatgtttctatcttgtaataaacatgggcatttattgcaaaaaaaaaaa

SEQ ID NO: 391597 - DNA, 2493 bp, Homo sapiens
gaggcggatgacggtggcattgggctgttgctgttctcgggttctcgattggtcagcggcagcagcacggggcggctgcgcctgtgggccgtgggggctgtgtcggagctgaggtgcaagggctcaggcgccagttctgtgttcatggaacacgagctggtgctggacggggctgtggtgagtgccagcttcgatgacagcgtggacatgggcgtcgtgggcaccacggcgggcacgctgtggtttgtcagctgggccgagggcaccagcacacgtctcatcagtggccacaggagcaaggtgagggacttccagcctgggcagaggcggggcagccgaacctggtgccctccctgcctgccggctccatctccaccagcccagatgattccaagtcctgccgtcactggctcgcagcggccgccttggggttcccagcggggaagtcttgggtgtgcacgtcccctcaaagccgtcccggttgtgtctgcacaagcgagccgcctggcaggccttgcaggtctttctcgaactcctgaccccgtgatccgcccaccttggcctcccaaagggctgggattacaggcatgagccaccgcgcccggctgaactgatttttttttaatgaagtgcatcgtgttcccacttgcacttaaagttcacatttggtgccaggctgtattgcttcttctcactggtgagtggcagctgtgtctcctttctgccagtccagcagtcccagctgtcagtggcacctgcataatgacacgtctgcatttccccccaatcagcgtgcagcggttttgggaggaggaatgcgactgcatggcgcgctcgctgcaacctcagtctgcagcctgctagggacgcacggccacactcctgtctttcagcctcagtctgcagcctgctagggacgcacggccacactcctgtctttcagcctcagtctgcagcctgctagggacgcacggccacactcctgtctttcagcctcagtctgtagcctgctagggatgcacggccacgctcctgtctttgaggtgctgtcagaacagctttctcctcggtatcccgccgggtttgactggctagtgggcttgctttggtttggactcacccagatctagtgcagggacacacacgggggccggcattgctcctttccgccatgtggagttggccggggcagaaggacatgctctggtttggacagcccggccctgggggctggaataggaaatgcctgcgtccctttaccctgcccaggggccaacacccccagcctagctacggcttcccccaggtgaacgaggtggtcttcagccccggggagtcccactgcgccacatgcagtgaggatgggagtgtgcgggtgtgggccttggccagcatggagcttgtgatccagttccaggtgctgaaccagagctgcctctgcctggcatggagccccccgtgctgtggccgccctgagcagcagcggctagcggctggctacggtgacggctccctgcgcatcttcagcgtctcccgcacggccatggagctcaagatgcacccccacccggtggcgctgaccactgttgccttctccaccgatggtcagactgtcctctctggagacaaggatgggctcgtggctgtgagccacccctgcacagggacaaccttccgtgtgctgagtgaccaccagggcgccccaatctctaccatctgtgtcacgtgcaaagagtgtgaagacttaggggtggagggcacagacctatggctggctgccagtggggaccagcgggtcagcgtctgggcctccgactggctgcggaaccactgtgagcttgtggactggttgagtttcccaatgcctgccaccacggagactcagggccacctgccaccctccctcgctgccttctgcccttgggatggggcgctcctgatgtacgtgggccccggtgtttacaaggaggtgatcatctacaacctctgccagaagcaggtggtggagaagataccactgcccttttttgccatgtccctgagcctgtcccccgggacccacctcctggctgttggctttgctgagtgcatgctgaggctggtagactgtgccatggggactgcccaagactttgccggccacgacaacgcagtgcacctgtgcaggtttacaccgtccgccaggctgctcttcacggccgcccgcaacgagatccttgtgtgggaggtccccggcctctgagatgcagcagggactgtggtggtgggcatcacgcctggtcatgccaggcacctggacacaggcttggcagaggcgccaggttgtcaatggcctcatgctgggacaggccaggattcacgtaaatcgcctggagcaagctgttgtaaatttggcgccctgtgaatactttcatacctgttgcccttttgcctaagaaatctttaatgtttctatcttgtaataaacatgggcatttattgcaaaaaaaaaaa

SEQ ID NO: 391598 - DNA, 1216 bp, Homo sapiens
tctgaggctcaagaggtcaggaggcccaggtgaacgaggtggtcttcagccccggggagtcccactgcgccacatgcagtgaggatgggagtgtgcgggtgtgggccttggccagcatggagcttgtgatccagttccaggtgctgaaccagagctgcctctgcctggcatggagccccccgtgctgtggccgccctgagcagcagcggctagcggctggctacggtgacggctccctgcgcatcttcagcgtctcccgcacggccatggagctcaagatgcacccccacccggtggcgctgaccactgttgccttctccaccgatggtcagactgtcctctctggagacaaggatgggctcgtggctgtgagccacccctgcacagggacaaccttccgtgtgctgagtgaccaccagggcgccccaatctctaccatctgtgtcacgtgcaaagagtgtgaagacttaggggtggagggcacagacctatggctggctgccagtggggaccagcgggtcagcgtctgggcctccgactggctgcggaaccactgtgagcttgtggactggttgagtttcccaatgcctgccaccacggagactcagggccacctgccaccctccctcgctgccttctgcccttgggatggggcgctcctgatgtacgtgggccccggtgtttacaaggaggtgatcatctacaacctctgccagaagcaggtggtggagaagataccactgcccttttttgccatgtccctgagcctgtcccccgggacccacctcctggctgttggctttgctgagtgcatgctgaggctggtagactgtgccatggggactgcccaagactttgccggccacgacaacgcagtgcacctgtgcaggtttacaccgtccgccaggctgctcttcacggccgcccgcaacgagatccttgtgtgggaggtccccggcctctgagatgcagcagggactgtggtggtgggcatcacgcctggtcatgccaggcacctggacacaggcttggcagaggcgccaggttgtcaatggcctcatgctgggacaggccaggattcacgtaaatcgcctggagcaagctgttgtaaatttggcgccctgtgaatactttcatacctgttgcccttttgcctaagaaatctttaatgtttctatcttgtaataaacatgggcatttattgcaaaaaaaaaaa

SEQ ID NO: 391599 - DNA, 772 bp, Homo sapiens
gctgctgtcgagtacgggcatgggcccagaagccccagctccatgggctttctcttcttccaccgggagggcacagccaggtcctgagatgcaatgctgagggccctgcctcggctggggacccagctggctcttgtcatcggccttgagacccattgttctctccttccctgcaccctgaggtccagttctgtgttcatggaacacgagctggtgctggacggggctgtggtgagtgccagcttcgatgacagcgtggacatgggcgtcgtgggcaccacggcgggcacgctgtggtttgtcagctgggccgagggcaccagcacacgtctcatcagtggccacaggagcaaggtgagggacttccagcctgggcagaggcggggcagccgaacctggtgccctccctgcctgccggctccatctccaccagcccagatgattccaagtcctgccgtcactggctcgcagcggccgccttggggttcccagcggggaagtcttgggtgtgcacgtcccctcaaagccgtcccggttgtgtctgcacaagcgagccgcctggcaggccttgcaggtcttctcaaactgtcctttccctgctattgctttgcgtttttttgtttgtttgttttttgttttttgtaattgtcaaagaaatcacatcagtccgggcgtggtggttcatgcctgtgatcccagcactctgggaggccaaggcaggtggatcacctgaggtcaggagttcgagaccagcctggtcaacatggcgaaa

SEQ ID NO: 391600 - DNA, 1483 bp, Homo sapiens
ggcacgaggcacatatactaaaattggaacgatacagagaagattagcatggcccctgcgcaaggatgacacgcaaattcgtgaagcgttccatatttttttggactcacccagatctagtgcagggacacacacgggggccggcattgctcctttccgccatgtggagttggccggggcagaaggacatgctctggtttggacagcccggccctgggggctggaataggaaatgcctgcgtccctttaccctgcccaggggccaacacccccagcctagctacggcttcccccaggtgaacgaggtggtcttcagccccggggagtcccactgcgccacatgcagtgaggatgggagtgtgcgggtgtgggccttggccagcatggagcttgtgatccagttccaggtgctgaaccagagctgcctctgcctggcatggagccccccgtgctgtggccgccctgagcagcagcggctagcggctggctacggtgacggctccctgcgcatcttcagcgtctcccgcacggccatggagctcaagatgcacccccacccggtggcgctgaccactgttgccttctccaccgatggtcagactgtcctctctggagacaaggatgggctcgtggctgtgagccacccctgcacagggacaaccttccgtgtgctgagtgaccaccagggcgccccaatctctaccatctgtgtcacgtgcaaagagtgtgaagacttaggggtggagggcacagacctatggctggctgccagtggggaccagcgggtcagcgtctgggcctccgactggctgcggaaccactgtgagcttgtggactggttgagtttcccaatgcctgccaccacggagactcagggccacctgccaccctccctcgctgccttctgcccttgggatggggcgctcctgatgtacgtgggccccggtgtttacaaggaggtgatcatctacaacctctgccagaagcaggtggtggagaagataccactgcccttttttgccatgtccctgagcctgtcccccgggacccacctcctggctgttggctttgctgagtgcatgctgaggctggtagactgtgccatggggactgcccaagactttgccggccacgacaacgcagtgcacctgtgcaggtttacaccgtccgccaggctgctcttcacggccgcccgcaacgagatccttgtgtgggaggtccccggcctctgagatgcagcagggactgtggtggtgggcatcacgcctggtcatgccaggcacctggacacaggcttggcagaggcgccaggttgtcaatggcctcatgctgggacaggccaggattcacgtaaatcgcctggagcaagctgttgtaaatttggcgccctgtgaatactttcatacctgttgcccttttgcctaagaaatctttaatgtttctatcttgtaataaacatgggcatttattgcaaaaaaaaaaa

SEQ ID NO: 391601 - DNA, 2547 bp, Homo sapiens
gctgctgtcgagtacgggcatgggcccagaagccccagctccatgggctttctcttcttccaccgggagggcacagccaggtcctgagatgcaatgctgagggccctgcctcggctggggacccagctggctcttgtcatcggccttgagacccattgttctctccttccctgcaccctgaggtccagttctgtgttcatggaacacgagctggtgctggacggggctgtggtgagtgccagcttcgatgacagcgtggacatgggcgtcgtgggcaccacggcgggcacgctgtggtttgtcagctgggccgagggcaccagcacacgtctcatcagtggccacaggagcaaggtgagggacttccagcctgggcagaggcggggcagccgaacctggtgccctccctgcctgccggctccatctccaccagcccagatgattccaagtcctgccgtcactggctcgcagcggccgccttggggttcccagcggggaagtcttgggtgtgcacgtcccctcaaagccgtcccggttgtgtctgcacaagcgagccgcctggcaggccttgcaggtctttctcgaactcctgaccccgtgatccgcccaccttggcctcccaaagggctgggattacaggcatgagccaccgcgcccggctgaactgatttttttttaatgaagtgcatcgtgttcccacttgcacttaaagttcacatttggtgccaggctgtattgcttcttctcactggtgagtggcagctgtgtctcctttctgccagtccagcagtcccagctgtcagtggcacctgcataatgacacgtctgcatttccccccaatcagcgtgcagcggttttgggaggaggaatgcgactgcatggcgcgctcgctgcaacctcagtctgcagcctgctagggacgcacggccacactcctgtctttcagcctcagtctgcagcctgctagggacgcacggccacactcctgtctttcagcctcagtctgcagcctgctagggacgcacggccacactcctgtctttcagcctcagtctgtagcctgctagggatgcacggccacgctcctgtctttgaggtgctgtcagaacagctttctcctcggtatcccgccgggtttgactggctagtgggcttgctttggtttggactcacccagatctagtgcagggacacacacgggggccggcattgctcctttccgccatgtggagttggccggggcagaaggacatgctctggtttggacagcccggccctgggggctggaataggaaatgcctgcgtccctttaccctgcccaggggccaacacccccagcctagctacggcttcccccaggtgaacgaggtggtcttcagccccggggagtcccactgcgccacatgcagtgaggatgggagtgtgcgggtgtgggccttggccagcatggagcttgtgatccagttccaggtgctgaaccagagctgcctctgcctggcatggagccccccgtgctgtggccgccctgagcagcagcggctagcggctggctacggtgacggctccctgcgcatcttcagcgtctcccgcacggccatggagctcaagatgcacccccacccggtggcgctgaccactgttgccttctccaccgatggtcagactgtcctctctggagacaaggatgggctcgtggctgtgagccacccctgcacagggacaaccttccgtgtgctgagtgaccaccagggcgccccaatctctaccatctgtgtcacgtgcaaagagtgtgaagacttaggggtggagggcacagacctatggctggctgccagtggggaccagcgggtcagcgtctgggcctccgactggctgcggaaccactgtgagcttgtggactggttgagtttcccaatgcctgccaccacggagactcagggccacctgccaccctccctcgctgccttctgcccttgggatggggcgctcctgatgtacgtgggccccggtgtttacaaggaggtgatcatctacaacctctgccagaagcaggtggtggagaagataccactgcccttttttgccatgtccctgagcctgtcccccgggacccacctcctggctgttggctttgctgagtgcatgctgaggctggtagactgtgccatggggactgcccaagactttgccggccacgacaacgcagtgcacctgtgcaggtttacaccgtccgccaggctgctcttcacggccgcccgcaacgagatccttgtgtgggaggtccccggcctctgagatgcagcagggactgtggtggtgggcatcacgcctggtcatgccaggcacctggacacaggcttggcagaggcgccaggttgtcaatggcctcatgctgggacaggccaggattcacgtaaatcgcctggagcaagctgttgtaaatttggcgccctgtgaatactttcatacctgttgcccttttgcctaagaaatctttaatgtttctatcttgtaataaacatgggcatttattgcaaaaaaaaaaa

SEQ ID NO: 391602 - DNA, 2098 bp, Homo sapiens
ttttttttttttttttgagacggagtttcttgtcgcccaggctggagtgcagtggcatgatcttggctcactgcaagctccgcctcccgggttcacaccattctcctgtctcagcctcccaagtagctgggactacaggcacccgccaccacgcccgactaattttttgtatttttagtagagtcggggtttcaccgtgttagccaggatggtctcgaactcctgaccccgtgatccgcccaccttggcctcccaaagggctgggattacaggcatgagccaccgcgcccggctgaactgatttttttttaatgaagtgcatcgtgttcccacttgcacttaaagttcacatttggtgccaggctgtattgcttcttctcactggtgagtggcagctgtgtctcctttctgccagtccagcagtcccagctgtcagtggcacctgcataatgacacgtctgcatttccccccaatcagcgtgcagcggttttgggaggaggaatgcgactgcatggcgcgctcgctgcaacctcagtctgcagcctgctagggacgcacggccacactcctgtctttcagcctcagtctgcagcctgctagggacgcacggccacactcctgtctttcagcctcagtctgcagcctgctagggacgcacggccacactcctgtctttcagcctcagtctgtagcctgctagggatgcacggccacgctcctgtctttgaggtgctgtcagaacagctttctcctcggtatcccgccgggtttgactggctagtgggcttgctttggtttggactcacccagatctagtgcagggacacacacgggggccggcattgctcctttccgccatgtggagttggccggggcagaaggacatgctctggtttggacagcccggccctgggggctggaataggaaatgcctgcgtccctttaccctgcccaggggccaacacccccagcctagctacggcttcccccaggtgaacgaggtggtcttcagccccggggagtcccactgcgccacatgcagtgaggatgggagtgtgcgggtgtgggccttggccagcatggagcttgtgatccagttccaggtgctgaaccagagctgcctctgcctggcatggagccccccgtgctgtggccgccctgagcagcagcggctagcggctggctacggtgacggctccctgcgcatcttcagcgtctcccgcacggccatggagctcaagatgcacccccacccggtggcgctgaccactgttgccttctccaccgatggtcagactgtcctctctggagacaaggatgggctcgtggctgtgagccacccctgcacagggacaaccttccgtgtgctgagtgaccaccagggcgccccaatctctaccatctgtgtcacgtgcaaagagtgtgaagacttaggggtggagggcacagacctatggctggctgccagtggggaccagcgggtcagcgtctgggcctccgactggctgcggaaccactgtgagcttgtggactggttgagtttcccaatgcctgccaccacggagactcagggccacctgccaccctccctcgctgccttctgcccttgggatggggcgctcctgatgtacgtgggccccggtgtttacaaggaggtgatcatctacaacctctgccagaagcaggtggtggagaagataccactgcccttttttgccatgtccctgagcctgtcccccgggacccacctcctggctgttggctttgctggtttacaccgtccgccaggctgctcttcacggccgcccgcaacgagatccttgtgtgggaggtccccggcctctgagatgcagcagggactgtggtggtgggcatcacgcctggtcatgccaggcacctggacacaggcttggcagaggcgccaggttgtcaatggcctcatgctgggacaggccaggattcacgtaaatcgcctggagcaagctgttgtaaatttggcgccctgtgaatactttcatacctgttgcccttttgcctaagaaatctttaatgtttctatcttgtaataaacatgggcatttattgcaaaaaaaaaaa

SEQ ID NO: 391603 - DNA, 619 bp, Homo sapiens
gttttataaaagggagttcccctgcacatgccctcttgcctgctgccatgtaagatgtgacttgctcctccttcacctcctgccatgatcgtgaggcctccccagccatgtggaactgtgagtccattaaacctctttttctttataaattacccagtctcaggtatgtctttattagcagcatgataacagactaatacactatgcatgccaaattttatttgattcaggtattttgggccagaaaacaagacaacaaatgaccaaaaagcttctattttgggagactcaaccaatcagtcaaggtcttcagtgcatatgacttctctaaagggccaataatcctcttctattgagatcttttggagaattccatggaaaggtgtatgcataggtgggaagctctttttcatgatttggatgaaaatatgcttgattataataaatagttaaaaatattttagccaggtgtggtggctcatgcctgtaatcccagcactttggaaggccgaggcaggtagatcacttgatgtcaggagttcgagaccagcctgtccaacatggtgaaaccctgtctctactaaaaataaaaaaaaattagccaggtgtggtggcatgt

SEQ ID NO: 391604 - DNA, 341 bp, Homo sapiens
atagtcccagctgctctagaggctgaggtgggaggatcgcctgagcctgggaggtagagtttgcagtgagcagagatagtgccactgcgctccagcctgcgtgactccagccagagtgagattctgtctcaaaaaaaaaacaaaggattgttgaataaagttccccacctcaataaaaagatgccgaagtgctttggaaaataaagacacatttttgtggagtggctccaccagcaactagttgagtatcctagagcaactgacacccctctgtgctctccgggtcctcactgatattcatttgtaattaatggattaattaacacatttgtaacacctac

SEQ ID NO: 391605 - DNA, 271 bp, Homo sapiens
gtgaaaccccgtctctactaaagatacaaaacttaaccgggcgtggtggcaggcccagctactcagaaggctgaggcaggagaatcgcctgaacctgggaggcggaggttgcagtgagccaagattgcaccactgcattgcagcctagataacagggcaagactccacctcgaaaaaaaataattagggtttctcaatgttggcacttttgacactttgggctctgttgtgggggccaccctgtgaatcacagggtgttcggcagcatctc

SEQ ID NO: 391606 - DNA, 4921 bp, Homo sapiens
ctgcagcttctaggacccggtttcttttactgatttaaaaacaaaacaaaaaaaaataaaaaagttgtgcctgaaatgaatcttgttttttttttataagtagccgcctggttactgtgtcctgtaaaatacagacacttgacccttggtgtagcttctgttcaactttatatcacgggaatggatgggtctgatttcttggccctcttcttgaattggccatatacagggtccctggccagtggactgaaggctttgtctaagatgacaagggtcagctcaggggatgtgggggagggcggttttatcttcccccttgtcgtttgaggttttgatctctgggtaaagaggccgtttatctttgtaaacacgaaacatttttgctttctccagttttctgttaatggcgaaagaatggaagcgaataaagttttactgatttttgagacactagcacctagcgctttcattattgaaacgtcccgtgtgggaggggcgggtctgggtgcggctgccgcatgactcgtggttcggaggcccacgtggccggggcggggactcaggcgcctggcagccgactgattacgtagcgggcggggccggaagtgccgctccttggtgggggctgttcatggcggttccggggtctccaacatttttcccggctgtggtcctaaatctgtccaaagcagaggcagtggagcttgaggttcttgctggtgtgaaatgactgagtacaaactggtggtggttggagcaggtggtgttgggaaaagcgcactgacaatccagctaatccagaaccactttgtagatgaatatgatcccaccatagaggattcttacagaaaacaagtggttatagatggtgaaacctgtttgttggacatactggatacagctggacaagaagagtacagtgccatgagagaccaatacatgaggacaggcgaaggcttcctctgtgtatttgccatcaataatagcaagtcatttgcggatattaacctctacagggagcagattaagcgagtaaaagactcggatgatgtacctatggtgctagtgggaaacaagtgtgatttgccaacaaggacagttgatacaaaacaagcccacgaactggccaagagttacgggattccattcattgaaacctcagccaagaccagacagggtgttgaagatgctttttacacactggtaagagaaatacgccagtaccgaatgaaaaaactcaacagcagtgatgatgggactcagggttgtatgggattgccatgtgtggtgatgtaacaagatacttttaaagttttgtcagaaaagagccactttcaagctgcactgacaccctggtcctgacttccctggaggagaagtattcctgttgctgtcttcagtctcacagagaagctcctgctacttccccagctctcagtagtttagtacaataatctctatttgagaagttctcagaataactacctcctcacttggctgtctgaccagagaatgcacctcttgttactccctgttatttttctgccctgggttcttccacagcacaaacacacctctgccaccccaggtttttcatctgaaaagcagttcatgtctgaaacagagaaccaaaccgcaaacgtgaaattctattgaaaacagtgtcttgagctctaaagtagcaactgctggtgattttttttttctttttactgttgaacttagaactatgctaatttttggagaaatgtcataaattactgttttgccaagaatatagttattattgctgtttggtttgtttataatgttatcggctctattctctaaactggcatctgctctagattcataaatacaaaaatgaatactgaattttgagtctatcctagtcttcacaactttgacgtaattaaatccaactttcacagtgaagtgcctttttcctagaagtggtttgtagacttcctttataatatttcagtggaatagatgtctcaaaaatccttatgcatgaaatgaatgtctgagatacgtctgtgacttatctaccattgaaggaaagctatatctatttgagagcagatgccattttgtacatgtatgaaattggttttccagaggcctgttttggggctttcccaggagaaagatgaaactgaaagcacatgaataatttcacttaataatttttacctaatctccacttttttcataggttactacctatacaatgtatgtaatttgtttcccctagcttactgataaacctaatattcaatgaacttccatttgtattcaaatttgtgtcataccagaaagctctacatttgcagatgttcaaatattgtaaaactttggtgcattgttatttaatagctgtgatcagtgattttcaaacctcaaatatagtatattaacaaattacattttcactgtatatcatggtatcttaatgatgtatataattgccttcaatccccttctcaccccaccctctacagcttcccccacagcaataggggcttgattatttcagttgagtaaagcatggtgctaatggaccagggtcacagtttcaaaacttgaacaatccagttagcatcacagagaaagaaattcttctgcatttgctcattgcaccagtaactccagctagtaattttgctaggtagctgcagttagccctgcaaggaaagaagaggtcagttagcacaaaccctttaccatgactggaaaactcagtatcacgtatttaaacatttttttttcttttagccatgtagaaactctaaattaagccaatattctcatttgagaatgaggatgtctcagctgagaaacgttttaaattctctttattcataatgttctttgaagggtttaaaacaagatgttgataaatctaagctgatgagtttgctcaaaacaggaagttgaaattgttgagacaggaatggaaaatataattaattgatacctatgaggatttggaggcttggcattttaatttgcagataataccctggtaattctcatgaaaaatagacttggataacttttgataaaagactaattccaaaatggccactttgttcctgtctttaatatctaaatacttactgaggtcctccatcttctatattatgaattttcatttattaagcaaatgtcatattaccttgaaattcagaagagaagaaacatatactgtgtccagagtataatgaacctgcagagttgtgcttcttactgctaattctgggagctttcacagtactgtcatcatttgtaaatggaaattctgcttttctgtttctgctccttctggagcagtgctactctgtaattttcctgaggcttatcacctcagtcatttcttttttaaatgtctgtgactggcagtgattctttttcttaaaaatctattaaatttgatgtcaaattagggagaaagatagttactcatcttgggctcttgtgccaatagcccttgtatgtatgtacttagagttttccaagtatgttctaagcacagaagtttctaaatggggccaaaattcagacttgagtatgttctttgaataccttaagaagttacaattagccgggcatggtggcccgtgcctgtagtcccagctacttgagaggctgaggcaggagaatcacttcaacccaggaggtggaggttacagtgagcagagatcgtgccactgcactccagcctgggtgacaagagagacttgtctccaaaaaaaaagttacacctaggtgtgaattttggcacaaaggagtgacaaacttatagttaaaagctgaataacttcagtgtggtataaaacgtggtttttaggctatgtttgtgattgctgaaaagaattctagtttacctcaaaatccttctctttccccaaattaagtgcctggccagctgtcataaattacatattccttttggtttttttaaaggttacatgttcaagagtgaaaataagatgttctgtctgaaggctaccatgccggatctgtaaatgaacctgttaaatgctgtatttgctccaacggcttactatagaatgttacttaatacaatatcatacttattacaatttttactataggagtgtaataggtaaaattaatctctattttagtgggcccatgtttagtctttcaccatcctttaaactgctgtgaatttttttgtcatgacttgaaagcaaggatagagaaacactttagagatatgtggggtttttttaccattccagagcttgtgagcataatcatatttgctttatatttatagtcatgaactcctaagttggcagctacaaccaagaaccaaaaaatggtgcgttctgcttcttgtaattcatctctgctaataaattataagaagcaaggaaaattagggaaaatattttatttggatggtttctataaacaagggactataattcttgtacattatttttcatctttgctgtttctttgagcagtctaatgtgccacacaattatctaaggtatttgttttctataagaattgttttaaaagtattcttgttaccagagtagttgtattatatttcaaaacgtaagatgatttttaaaagcctgagtactgacctaagatggaattgtatgaactctgctctggagggaggggaggatgtccgtggaagttgtaagacttttatttttttgtgccatcaaatataggtaaaaataattgtgcaattctgctgtttaaacaggaactattggcctccttggccctaaatggaagggccgatattttaagttgattattttattgtaaattaatccaacctagttctttttaatttggttgaatgttttttcttgttaaatgatgtttaaaaaataaaaactggaagttcttggcttagtcataa

SEQ ID NO: 391607 - DNA, 4424 bp, Homo sapiens
  misc_feature (1)..(1): n is a, c, g, or t
  misc_feature (10)..(10): n is a, c, g, or t
nggatacagnctgacaagaagagtacagtgccatgagagaccgatacatgaggacaggcgaaggcttcctctgtgtattggccatcaataatagcaagtcatttgcggatattaacctctacagggatgcccaacgtggggttccggggtctccaacatttttcccggctgtggtcctaaatctgtccaaagcagaggcagtggagcttgaggttcttgctggtgtgaaatgactgagtacaaactggtggtggttggagcaggtggtgttgggaaaagcgcactgacaatccagctaatccagaaccactttgtagatgaatatgatcccaccatagaggattcttacagaaaacaagtggttatagatggtgaaacctgtttgttggacatactggatacagctggacaagaagagtacagtgccatgagagaccaatacatgaggacaggcgaaggcttcctctgtgtatttgccatcaataatagcaagtcatttgcggatattaacctctacagggagcagattaagcgagtaaaagactcggatgatgtacctatggtgctagtgggaaacaagtgtgatttgccaacaaggacagttgatacaaaacaagcccacgaactggccaagagttacgggattccattcattgaaacctcagccaagaccagacagggtgttgaagatgctttttacacactggtaagagaaatacgccagtaccgaatgaaaaaactcaacagcagtgatgatgggactcagggttgtatgggattgccatgtgtggtgatgtaacaagatacttttaaagttttgtcagaaaagagccactttcaagctgcactgacaccctggtcctgacttccctggaggagaagtattcctgttgctgtcttcagtctcacagagaagctcctgctacttccccagctctcagtagtttagtacaataatctctatttgagaagttctcagaataactacctcctcacttggctgtctgaccagagaatgcacctcttgttactccctgttatttttctgccctgggttcttccacagcacaaacacacctctgccaccccaggtttttcatctgaaaagcagttcatgtctgaaacagagaaccaaaccgcaaacgtgaaattctattgaaaacagtgtcttgagctctaaagtagcaactgctggtgattttttttttctttttactgttgaacttagaactatgctaatttttggagaaatgtcataaattactgttttgccaagaatatagttattattgctgtttggtttgtttataatgttatcggctctattctctaaactggcatctgctctagattcataaatacaaaaatgaatactgaattttgagtctatcctagtcttcacaactttgacgtaattaaatccaactttcacagtgaagtgcctttttcctagaagtggtttgtagacttcctttataatatttcagtggaatagatgtctcaaaaatccttatgcatgaaatgaatgtctgagatacgtctgtgacttatctaccattgaaggaaagctatatctatttgagagcagatgccattttgtacatgtatgaaattggttttccagaggcctgttttggggctttcccaggagaaagatgaaactgaaagcacatgaataatttcacttaataatttttacctaatctccacttttttcataggttactacctatacaatgtatgtaatttgtttcccctagcttactgataaacctaatattcaatgaacttccatttgtattcaaatttgtgtcataccagaaagctctacatttgcagatgttcaaatattgtaaaactttggtgcattgttatttaatagctgtgatcagtgattttcaaacctcaaatatagtatattaacaaattacattttcactgtatatcatggtatcttaatgatgtatataattgccttcaatccccttctcaccccaccctctacagcttcccccacagcaataggggcttgattatttcagttgagtaaagcatggtgctaatggaccagggtcacagtttcaaaacttgaacaatccagttagcatcacagagaaagaaattcttctgcatttgctcattgcaccagtaactccagctagtaattttgctaggtagctgcagttagccctgcaaggaaagaagaggtcagttagcacaaaccctttaccatgactggaaaactcagtatcacgtatttaaacatttttttttcttttagccatgtagaaactctaaattaagccaatattctcatttgagaatgaggatgtctcagctgagaaacgttttaaattctctttattcataatgttctttgaagggtttaaaacaagatgttgataaatctaagctgatgagtttgctcaaaacaggaagttgaaattgttgagacaggaatggaaaatataattaattgatacctatgaggatttggaggcttggcattttaatttgcagataataccctggtaattctcatgaaaaatagacttggataacttttgataaaagactaattccaaaatggccactttgttcctgtctttaatatctaaatacttactgaggtcctccatcttctatattatgaattttcatttattaagcaaatgtcatattaccttgaaattcagaagagaagaaacatatactgtgtccagagtataatgaacctgcagagttgtgcttcttactgctaattctgggagctttcacagtactgtcatcatttgtaaatggaaattctgcttttctgtttctgctccttctggagcagtgctactctgtaattttcctgaggcttatcacctcagtcatttcttttttaaatgtctgtgactggcagtgattctttttcttaaaaatctattaaatttgatgtcaaattagggagaaagatagttactcatcttgggctcttgtgccaatagcccttgtatgtatgtacttagagttttccaagtatgttctaagcacagaagtttctaaatggggccaaaattcagacttgagtatgttctttgaataccttaagaagttacaattagccgggcatggtggcccgtgcctgtagtcccagctacttgagaggctgaggcaggagaatcacttcaacccaggaggtggaggttacagtgagcagagatcgtgccactgcactccagcctgggtgacaagagagacttgtctccaaaaaaaaagttacacctaggtgtgaattttggcacaaaggagtgacaaacttatagttaaaagctgaataacttcagtgtggtataaaacgtggtttttaggctatgtttgtgattgctgaaaagaattctagtttacctcaaaatccttctctttccccaaattaagtgcctggccagctgtcataaattacatattccttttggtttttttaaaggttacatgttcaagagtgaaaataagatgttctgtctgaaggctaccatgccggatctgtaaatgaacctgttaaatgctgtatttgctccaacggcttactatagaatgttacttaatacaatatcatacttattacaatttttactataggagtgtaataggtaaaattaatctctattttagtgggcccatgtttagtctttcaccatcctttaaactgctgtgaatttttttgtcatgacttgaaagcaaggatagagaaacactttagagatatgtggggtttttttaccattccagagcttgtgagcataatcatatttgctttatatttatagtcatgaactcctaagttggcagctacaaccaagaaccaaaaaatggtgcgttctgcttcttgtaattcatctctgctaataaattataagaagcaaggaaaattagggaaaatattttatttggatggtttctataaacaagggactataattcttgtacattatttttcatctttgctgtttctttgagcagtctaatgtgccacacaattatctaaggtatttgttttctataagaattgttttaaaagtattcttgttaccagagtagttgtattatatttcaaaacgtaagatgatttttaaaagcctgagtactgacctaagatggaattgtatgaactctgctctggagggaggggaggatgtccgtggaagttgtaagacttttatttttttgtgccatcaaatataggtaaaaataattgtgcaattctgctgtttaaacaggaactattggcctccttggccctaaatggaagggccgatattttaagttgattattttattgtaaattaatccaacctagttctttttaatttggttgaatgttttttcttgttaaatgatgtttaaaaaataaaaactggaagttcttggcttagtcataa

SEQ ID NO: 391608 - DNA, 4867 bp, Homo sapiens
ctgcagcttctaggacccggtttcttttactgatttaaaaacaaaacaaaaaaaaataaaaaagttgtgcctgaaatgaatcttgttttttttttataagtagccgcctggttactgtgtcctgtaaaatacagacacttgacccttggtgtagcttctgttcaactttatatcacgggaatggatgggtctgatttcttggccctcttcttgaattggccatatacagggtccctggccagtggactgaaggctttgtctaagatgacaagggtcagctcaggggatgtgggggagggcggttttatcttcccccttgtcgtttgaggttttgatctctgggtaaagaggccgtttatctttgtaaacacgaaacatttttgctttctccagttttctgttaatggcgaaagaatggaagcgaataaagttttactgatttttgagacactagcacctagcgctttcattattgaaacgtcccgtgtgggaggggcgggtctgggtgcggctgccgcatgactcgtggttcggaggcccacgtggccggggcggggactcaggcgcctggcagccgactgattacgtagcgggcggggccggaagtgccgctccttggtgggggctgttcatggcggttccggggtctccaacatttttcccggctgtggtcctaaatctgtccaaagcagaggcagtggagcttgaggttcttgctggtgtgaaatgactgagtacaaactggtggtggttggagcaggtggtgttgggaaaagcgcactgacaatccagctaatccagaaccactttgtagatgaatatgatcccaccatagaggattcttacagaaaacaagtggttatagatggtgaaacctgtttgttggacatactggatacagctggacaagaagagtacagtgccatgagagaccaatacatgaggacaggcgaaggcttcctctgtgtatttgccatcaataatagcaagtcatttgcggatattaacctctacagggagcagattaagcgagtaaaagactcggatgatgtacctatggtgctagtgggaaacaagtgtgatttgccaacaaggacagttgatacaaaacaagcccacgaactggccaagagttacgggattccattcattgaaacctcagccaagaccagacagggtgttgaagatgctttttacacactggtaagagaaatacgccagtaccgaatgaaaaaactcaacagcagtgatgatgggactcagggttgtatgggattgccatgtgtggtgatgtaacaagatacttttaaagttttgtcagaaaagagccactttcaagctgcactgacaccctggtcctgacttccctggaggagaagtattcctgttgctgtcttcagtctcacagagaagctcctgctacttccccagctctcagtagtttagtacaataatctctatttgagaagttctcagaataactacctcctcacttggctgtctgaccagagaatgcacctcttgttactccctgttatttttctgccctgggttcttccacagcacaaacacacctctgccaccccaggtttttcatctgaaaagcagttcatgtctgaaacagagaaccaaaccgcaaacgtgaaattctattgaaaacagtgtcttgagctctaaagtagcaactgctggtgattttttttttctttttactgttgaacttagaactatgctaatttttggagaaatgtcataaattactgttttgccaagaatatagttattattgctgtttggtttgtttataatgttatcggctctattctctaaactggcatctgctctagattcataaatacaaaaatgaatactgaattttgagtctatcctagtcttcacaactttgacgtaattaaatccaactttcacagtgaagtgcctttttcctagaagtggtttgtagacttcctttataatatttcagtggaatagatgtctcaaaaatccttatgcatgaaatgaatgtctgagatacgtctgtgacttatctaccattgaaggaaagctatatctatttgagagcagatgccattttgtacatgtatgaaattggttttccagaggcctgttttggggctttcccaggagaaagatgaaactgaaagcacatgaataatttcacttaataatttttacctaatctccacttttttcataggttactacctatacaatgtatgtaatttgtttcccctagcttactgataaacctaatattcaatgaacttccatttgtattcaaatttgtgtcataccagaaagctctacatttgcagatgttcaaatattgtaaaactttggtgcattgttatttaatagctgtgatcagtgattttcaaacctcaaatatagtatattaacaaattacattttcactgtatatcatggtatcttaatgatgtatataattgccttcaatccccttctcaccccaccctctacagcttcccccacagcaataggggcttgattatttcagttgagtaaagcatggtgctaatggaccagggtcacagtttcaaaacttgaacaatccagttagcatcacagagaaagaaattcttctgcatttgctcattgcaccagtaactccagctagtaattttgctaggtagctgcagttagccctgcaaggaaagaagaggtcagttagcacaaaccctttaccatgactggaaaactcagtatcacgtatttaaacatttttttttcttttagccatgtagaaactctaaattaagccaatattctcatttgagaatgaggatgtctcagctgagaaacgttttaaattctctttattcataatgttctttgaagggtttaaaacaagatgttgataaatctaagctgatgagtttgctcaaaacaggaagttgaaattgttgagacaggaatggaaaatataattaattgatacctatgaggatttggaggcttggcattttaatttgcagataataccctggtaattctcatgaaaaatagacttggataacttttgataaaagactaattccaaaatggccactttgttcctgtctttaatatctaaatacttactgaggtcctccatcttctatattatgaattttcatttattaagcaaatgtcatattaccttgaaattcagaagagaagaaacatatactgtgtccagagtataatgaacctgcagagttgtgcttcttactgctaattctgggagctttcacagtactgtcatcatttgtaaatggaaattctgcttttctgtttctgctccttctggagcagtgctactctgtaattttcctgaggcttatcacctcagtcatttcttttttaaatgtctgtgactggcagtgattctttttcttaaaaatctattaaatttgatgtcaaattagggagaaagatagttactcatcttgggctcttgtgccaatagcccttgtatgtatgtacttagagttttccaagtatgttctaagcacagaagtttctaaatggggccaaaattcagacttgagtatgttctttgaataccttaagaagttacaattagccgggcatggtggcccgtgcctgtagtcccagctacttgagaggctgaggcaggagaatcacttcaacccaggaggtggaggttacagtgagcagagatcgtgccactgcactccagcctgggtgacaagagagacttgtctccaaaaaaaaagttacacctaggtgtgaattttggcacaaaggagtgacaaacttatagttaaaagctgaataacttcagtgtggtataaaacgtggtttttaggctatgtttgtgattgctgaaaagaattctagtttacctcaaaatccttctctttccccaaattaagtgcctggccagctgtcataaattacatattccttttggtttttttaaaggttacatgttcaagagtgaaaataagatgttctgtctgaaggctaccatgccggatctgtaaatgaacctgttaaatgctgtatttgctccaacggcttactatagaatgttacttaatacaatatcatacttattacaatttttactataggagtgtaataggtatgctgtgaatttttttgtcatgacttgaaagcaaggatagagaaacactttagagatatgtggggtttttttaccattccagagcttgtgagcataatcatatttgctttatatttatagtcatgaactcctaagttggcagctacaaccaagaaccaaaaaatggtgcgttctgcttcttgtaattcatctctgctaataaattataagaagcaaggaaaattagggaaaatattttatttggatggtttctataaacaagggactataattcttgtacattatttttcatctttgctgtttctttgagcagtctaatgtgccacacaattatctaaggtatttgttttctataagaattgttttaaaagtattcttgttaccagagtagttgtattatatttcaaaacgtaagatgatttttaaaagcctgagtactgacctaagatggaattgtatgaactctgctctggagggaggggaggatgtccgtggaagttgtaagacttttatttttttgtgccatcaaatataggtaaaaataattgtgcaattctgctgtttaaacaggaactattggcctccttggccctaaatggaagggccgatattttaagttgattattttattgtaaattaatccaacctagttctttttaatttggttgaatgttttttcttgttaaatgatgtttaaaaaataaaaactggaagttcttggcttagtcataa

SEQ ID NO: 391609 - DNA, 2803 bp, Homo sapiens
ccggaattcccgggatccacccaggccgtaaaattattaagtgaaattattcatatgcttgcagttaataatttttacctaatctccacttttttcataggttactacctatacaatgtatgtaatttgtttcccctagcttactgataaacctaatattcaatgaacttccatttgtattcaaatttgtgtcataccagaaagctctacatttgcagatgttcaaatattgtaaaactttggtgcattgttatttaatagctgtgatcagtgattttcaaacctcaaatatagtatattaacaaattacattttcactgtatatcatggtatcttaatgatgtatataattgccttcaatccccttctcaccccaccctctacagcttcccccacagcaataggggcttgattatttcagttgagtaaagcatggtgctaatggaccagggtcacagtttcaaaacttgaacaatccagttagcatcacagagaaagaaattcttctgcatttgctcattgcaccagtaactccagctagtaattttgctaggtagctgcagttagccctgcaaggaaagaagaggtcagttagcacaaaccctttaccatgactggaaaactcagtatcacgtatttaaacatttttttttcttttagccatgtagaaactctaaattaagccaatattctcatttgagaatgaggatgtctcagctgagaaacgttttaaattctctttattcataatgttctttgaagggtttaaaacaagatgttgataaatctaagctgatgagtttgctcaaaacaggaagttgaaattgttgagacaggaatggaaaatataattaattgatacctatgaggatttggaggcttggcattttaatttgcagataataccctggtaattctcatgaaaaatagacttggataacttttgataaaagactaattccaaaatggccactttgttcctgtctttaatatctaaatacttactgaggtcctccatcttctatattatgaattttcatttattaagcaaatgtcatattaccttgaaattcagaagagaagaaacatatactgtgtccagagtataatgaacctgcagagttgtgcttcttactgctaattctgggagctttcacagtactgtcatcatttgtaaatggaaattctgcttttctgtttctgctccttctggagcagtgctactctgtaattttcctgaggcttatcacctcagtcatttcttttttaaatgtctgtgactggcagtgattctttttcttaaaaatctattaaatttgatgtcaaattagggagaaagatagttactcatcttgggctcttgtgccaatagcccttgtatgtatgtacttagagttttccaagtatgttctaagcacagaagtttctaaatggggccaaaattcagacttgagtatgttctttgaataccttaagaagttacaattagccgggcatggtggcccgtgcctgtagtcccagctacttgagaggctgaggcaggagaatcacttcaacccaggaggtggaggttacagtgagcagagatcgtgccactgcactccagcctgggtgacaagagagacttgtctccaaaaaaaaagttacacctaggtgtgaattttggcacaaaggagtgacaaacttatagttaaaagctgaataacttcagtgtggtataaaacgtggtttttaggctatgtttgtgattgctgaaaagaattctagtttacctcaaaatccttctctttccccaaattaagtgcctggccagctgtcataaattacatattccttttggtttttttaaaggttacatgttcaagagtgaaaataagatgttctgtctgaaggctaccatgccggatctgtaaatgaacctgttaaatgctgtatttgctccaacggcttactatagaatgttacttaatacaatatcatacttattacaatttttactataggagtgtaataggtaaaattaatctctattttagtgggcccatgtttagtctttcaccatcctttaaactgctgtgaatttttttgtcatgacttgaaagcaaggatagagaaacactttagagatatgtggggtttttttaccattccagagcttgtgagcataatcatatttgctttatatttatagtcatgaactcctaagttggcagctacaaccaagaaccaaaaaatggtgcgttctgcttcttgtaattcatctctgctaataaattataagaagcaaggaaaattagggaaaatattttatttggatggtttctataaacaagggactataattcttgtacattatttttcatctttgctgtttctttgagcagtctaatgtgccacacaattatctaaggtatttgttttctataagaattgttttaaaagtattcttgttaccagagtagttgtattatatttcaaaacgtaagatgatttttaaaagcctgagtactgacctaagatggaattgtatgaactctgctctggagggaggggaggatgtccgtggaagttgtaagacttttatttttttgtgccatcaaatataggtaaaaataattgtgcaattctgctgtttaaacaggaactattggcctccttggccctaaatggaagggccgatattttaagttgattattttattgtaaattaatccaacctagttctttttaatttggttgaatgttttttcttgttaaatgatgtttaaaaaataaaaactggaagttcttggcttagtcataa

SEQ ID NO: 391610 - DNA, 1315 bp, Homo sapiens
  misc_feature (76)..(76): n is a, c, g, or t
taactcattgtggtttgattgcatttatctgattagtaatgtgagcattttttcatgttgttaaccgcttgtatgntgtcttttgagaagtgtctgttcaagtctttggcatttttttcctgggtgacaagagagacttgtctccaaaaaaaaagttacacctaggtgtgaattttggcacaaaggagtgacaaacttatagttaaaagctgaataacttcagtgtggtataaaacgtggtttttaggctatgtttgtgattgctgaaaagaattctagtttacctcaaaatccttctctttccccaaattaagtgcctggccagctgtcataaattacatattccttttggtttttttaaaggttacatgttcaagagtgaaaataagatgttctgtctgaaggctaccatgccggatctgtaaatgaacctgttaaatgctgtatttgctccaacggcttactatagaatgttacttaatacaatatcatacttattacaatttttactataggagtgtaataggtaaaattaatctctattttagtgggcccatgtttagtctttcaccatcctttaaactgctgtgaatttttttgtcatgacttgaaagcaaggatagagaaacactttagagatatgtggggtttttttaccattccagagcttgtgagcataatcatatttgctttatatttatagtcatgaactcctaagttggcagctacaaccaagaaccaaaaaatggtgcgttctgcttcttgtaattcatctctgctaataaattataagaagcaaggaaaattagggaaaatattttatttggatggtttctataaacaagggactataattcttgtacattatttttcatctttgctgtttctttgagcagtctaatgtgccacacaattatctaaggtatttgttttctataagaattgttttaaaagtattcttgttaccagagtagttgtattatatttcaaaacgtaagatgatttttaaaagcctgagtactgacctaagatggaattgtatgaactctgctctggagggaggggaggatgtccgtggaagttgtaagacttttatttttttgtgccatcaaatataggtaaaaataattgtgcaattctgctgtttaaacaggaactattggcctccttggccctaaatggaagggccgatattttaagttgattattttattgtaaattaatccaacctagttctttttaatttggttgaatgttttttcttgttaaatgatgtttaaaaaataaaaactggaagttcttggcttagtcataa

SEQ ID NO: 391611 - DNA, 2437 bp, Homo sapiens
ctgcagcttctaggacccggtttcttttactgatttaaaaacaaaacaaaaaaaaataaaaaagttgtgcctgaaatgaatcttgttttttttttataagtagccgcctggttactgtgtcctgtaaaatacagacacttgacccttggtgtagcttctgttcaactttatatcacgggaatggatgggtctgatttcttggccctcttcttgaattggccatatacagggtccctggccagtggactgaaggctttgtctaagatgacaagggtcagctcaggggatgtgggggagggcggttttatcttcccccttgtcgtttgaggttttgatctctgggtaaagaggccgtttatctttgtaaacacgaaacatttttgctttctccagttttctgttaatggcgaaagaatggaagcgaataaagttttactgatttttgagacactagcacctagcgctttcattattgaaacgtcccgtgtgggaggggcgggtctgggtgcggctgccgcatgactcgtggttcggaggcccacgtggccggggcggggactcaggcgcctggcagccgactgattacgtagcgggcggggccggaagtgccgctccttggtgggggctgttcatggcggttccggggtctccaacatttttcccggctgtggtcctaaatctgtccaaagcagaggcagtggagcttgaggttcttgctggtgtgaaatgactgagtacaaactggtggtggttggagcaggtggtgttgggaaaagcgcactgacaatccagctaatccagaaccactttgtagatgaatatgatcccaccatagaggattcttacagaaaacaagtggttatagatggtgaaacctgtttgttggacatactggatacagctggacaagaagagtacagtgccatgagagaccaatacatgaggacaggcgaaggcttcctctgtgtatttgccatcaataatagcaagtcatttgcggatattaacctctacagggagcagattaagcgagtaaaagactcggatgatgtacctatggtgctagtgggaaacaagtgtgatttgccaacaaggacagttgatacaaaacaagcccacgaactggccaagagttacgggattccattcattgaaacctcagccaagaccagacagggtgttgaagatgctttttacacactggtaagagaaatacgccagtaccgaatgaaaaaactcaacagcagtgatgatgggactcagggttgtatgggattgccatgtgtggtgatgtaacaagatacttttaaagttttgtcagaaaagagccactttcaagctgcactgacaccctggtcctgacttccctggaggagaagtattcctgttgctgtcttcagtctcacagagaagctcctgctacttccccagctctcagtagtttagtacaataatctctatttgagaagttctcagaataactacctcctcacttggctgtctgaccagagaatgcacctcttgttactccctgttatttttctgccctgggttcttccacagcacaaacacacctctgccaccccaggtttttcatctgaaaagcagttcatgtctgaaacagagaaccaaaccgcaaacgtgaaattctattgaaaacagtgtcttgagctctaaagtagcaactgctggtgattttttttttctttttactgttgaacttagaactatgctaatttttggagaaatgtcataaattactgttttgccaagaatatagttattattgctgtttggtttgtttataatgttatcggctctattctctaaactggcatctgctctagattcataaatacaaaaatgaatactgaattttgagtctatcctagtcttcacaactttgacgtaattaaatccaactttcacagtgaagtgcctttttcctagaagtggtttgtagacttcctttataatatttcagtggaatagatgtctcaaaaatccttatgcatgaaatgaatgtctgagatacgtctgtgacttatctaccattgaaggaaagctatatctatttgagagcagatgccattttgtacatgtatgaaattggttttccagaggcctgttttggggctttcccaggagaaagatgaaactgaaagcacatgaataatttcacttaataatttttacctaatctccacttttttcataggttactacctatacaatgtatgtaatttgtttcccctagcttactgataaacctaatattcaatgaacttccatttgtattcaaatttgtgtcataccagaaagctctacatttgcagatgttcaaatattgtaaaactttggtgcattgttatttaatagctgtgatcagtgattttcaaacctcaaatatagtatattaacaaattacattttcact

SEQ ID NO: 391612 - DNA, 4867 bp, Homo sapiens
ctgcagcttctaggacccggtttcttttactgatttaaaaacaaaacaaaaaaaaataaaaaagttgtgcctgaaatgaatcttgttttttttttataagtagccgcctggttactgtgtcctgtaaaatacagacacttgacccttggtgtagcttctgttcaactttatatcacgggaatggatgggtctgatttcttggccctcttcttgaattggccatatacagggtccctggccagtggactgaaggctttgtctaagatgacaagggtcagctcaggggatgtgggggagggcggttttatcttcccccttgtcgtttgaggttttgatctctgggtaaagaggccgtttatctttgtaaacacgaaacatttttgctttctccagttttctgttaatggcgaaagaatggaagcgaataaagttttactgatttttgagacactagcacctagcgctttcattattgaaacgtcccgtgtgggaggggcgggtctgggtgcggctgccgcatgactcgtggttcggaggcccacgtggccggggcggggactcaggcgcctggcagccgactgattacgtagcgggcggggccggaagtgccgctccttggtgggggctgttcatggcggttccggggtctccaacatttttcccggctgtggtcctaaatctgtccaaagcagaggcagtggagcttgaggttcttgctggtgtgaaatgactgagtacaaactggtggtggttggagcaggtggtgttgggaaaagcgcactgacaatccagctaatccagaaccactttgtagatgaatatgatcccaccatagaggattcttacagaaaacaagtggttatagatggtgaaacctgtttgttggacatactggatacagctggacaagaagagtacagtgccatgagagaccaatacatgaggacaggcgaaggcttcctctgtgtatttgccatcaataatagcaagtcatttgcggatattaacctctacagggagcagattaagcgagtaaaagactcggatgatgtacctatggtgctagtgggaaacaagtgtgatttgccaacaaggacagttgatacaaaacaagcccacgaactggccaagagttacgggattccattcattgaaacctcagccaagaccagacagggtgttgaagatgctttttacacactggtaagagaaatacgccagtaccgaatgaaaaaactcaacagcagtgatgatgggactcagggttgtatgggattgccatgtgtggtgatgtaacaagatacttttaaagttttgtcagaaaagagccactttcaagctgcactgacaccctggtcctgacttccctggaggagaagtattcctgttgctgtcttcagtctcacagagaagctcctgctacttccccagctctcagtagtttagtacaataatctctatttgagaagttctcagaataactacctcctcacttggctgtctgaccagagaatgcacctcttgttactccctgttatttttctgccctgggttcttccacagcacaaacacacctctgccaccccaggtttttcatctgaaaagcagttcatgtctgaaacagagaaccaaaccgcaaacgtgaaattctattgaaaacagtgtcttgagctctaaagtagcaactgctggtgattttttttttctttttactgttgaacttagaactatgctaatttttggagaaatgtcataaattactgttttgccaagaatatagttattattgctgtttggtttgtttataatgttatcggctctattctctaaactggcatctgctctagattcataaatacaaaaatgaatactgaattttgagtctatcctagtcttcacaactttgacgtaattaaatccaactttcacagtgaagtgcctttttcctagaagtggtttgtagacttcctttataatatttcagtggaatagatgtctcaaaaatccttatgcatgaaatgaatgtctgagatacgtctgtgacttatctaccattgaaggaaagctatatctatttgagagcagatgccattttgtacatgtatgaaattggttttccagaggcctgttttggggctttcccaggagaaagatgaaactgaaagcacatgaataatttcacttaataatttttacctaatctccacttttttcataggttactacctatacaatgtatgtaatttgtttcccctagcttactgataaacctaatattcaatgaacttccatttgtattcaaatttgtgtcataccagaaagctctacatttgcagatgttcaaatattgtaaaactttggtgcattgttatttaatagctgtgatcagtgattttcaaacctcaaatatagtatattaacaaattacattttcactgtatatcatggtatcttaatgatgtatataattgccttcaatccccttctcaccccaccctctacagcttcccccacagcaataggggcttgattatttcagttgagtaaagcatggtgctaatggaccagggtcacagtttcaaaacttgaacaatccagttagcatcacagagaaagaaattcttctgcatttgctcattgcaccagtaactccagctagtaattttgctaggtagctgcagttagccctgcaaggaaagaagaggtcagttagcacaaaccctttaccatgactggaaaactcagtatcacgtatttaaacatttttttttcttttagccatgtagaaactctaaattaagccaatattctcatttgagaatgaggatgtctcagctgagaaacgttttaaattctctttattcataatgttctttgaagggtttaaaacaagatgttgataaatctaagctgatgagtttgctcaaaacaggaagttgaaattgttgagacaggaatggaaaatataattaattgatacctatgaggatttggaggcttggcattttaatttgcagataataccctggtaattctcatgaaaaatagacttggataacttttgataaaagactaattccaaaatggccactttgttcctgtctttaatatctaaatacttactgaggtcctccatcttctatattatgaattttcatttattaagcaaatgtcatattaccttgaaattcagaagagaagaaacatatactgtgtccagagtataatgaacctgcagagttgtgcttcttactgctaattctgggagctttcacagtactgtcatcatttgtaaatggaaattctgcttttctgtttctgctccttctggagcagtgctactctgtaattttcctgaggcttatcacctcagtcatttcttttttaaatgtctgtgactggcagtgattctttttcttaaaaatctattaaatttgatgtcaaattagggagaaagatagttactcatcttgggctcttgtgccaatagcccttgtatgtatgtacttagagttttccaagtatgttctaagcacagaagtttctaaatgggccgggcatggtggcccgtgcctgtagtcccagctacttgagaggctgaggcaggagaatcacttcaacccaggaggtggaggttacagtgagcagagatcgtgccactgcactccagcctgggtgacaagagagacttgtctccaaaaaaaaagttacacctaggtgtgaattttggcacaaaggagtgacaaacttatagttaaaagctgaataacttcagtgtggtataaaacgtggtttttaggctatgtttgtgattgctgaaaagaattctagtttacctcaaaatccttctctttccccaaattaagtgcctggccagctgtcataaattacatattccttttggtttttttaaaggttacatgttcaagagtgaaaataagatgttctgtctgaaggctaccatgccggatctgtaaatgaacctgttaaatgctgtatttgctccaacggcttactatagaatgttacttaatacaatatcatacttattacaatttttactataggagtgtaataggtaaaattaatctctattttagtgggcccatgtttagtctttcaccatcctttaaactgctgtgaatttttttgtcatgacttgaaagcaaggatagagaaacactttagagatatgtggggtttttttaccattccagagcttgtgagcataatcatatttgctttatatttatagtcatgaactcctaagttggcagctacaaccaagaaccaaaaaatggtgcgttctgcttcttgtaattcatctctgctaataaattataagaagcaaggaaaattagggaaaatattttatttggatggtttctataaacaagggactataattcttgtacattatttttcatctttgctgtttctttgagcagtctaatgtgccacacaattatctaaggtatttgttttctataagaattgttttaaaagtattcttgttaccagagtagttgtattatatttcaaaacgtaagatgatttttaaaagcctgagtactgacctaagatggaattgtatgaactctgctctggagggaggggaggatgtccgtggaagttgtaagacttttatttttttgtgccatcaaatataggtaaaaataattgtgcaattctgctgtttaaacaggaactattggcctccttggccctaaatggaagggccgatattttaagttgattattttattgtaaattaatccaacctagttctttttaatttggttgaatgttttttcttgttaaatgatgtttaaaaaataaaaactggaagttcttggcttagtcataa

SEQ ID NO: 391613 - DNA, 5478 bp, Homo sapiens
ctgcagcttctaggacccggtttcttttactgatttaaaaacaaaacaaaaaaaaataaaaaagttgtgcctgaaatgaatcttgttttttttttataagtagccgcctggttactgtgtcctgtaaaatacagacacttgacccttggtgtagcttctgttcaactttatatcacgggaatggatgggtctgatttcttggccctcttcttgaattggccatatacagggtccctggccagtggactgaaggctttgtctaagatgacaagggtcagctcaggggatgtgggggagggcggttttatcttcccccttgtcgtttgaggttttgatctctgggtaaagaggccgtttatctttgtaaacacgaaacatttttgctttctccagttttctgttaatggcgaaagaatggaagcgaataaagttttactgatttttgagacactagcacctagcgctttcattattgaaacgtcccgtgtgggaggggcgggtctgggtgcggctgccgcatgactcgtggttcggaggcccacgtggccggggcggggactcaggcgcctggcagccgactgattacgtagcgggcggggccggaagtgccgctccttggtgggggctgttcatggcggttccggggtctccaacatttttcccggctgtggtcctaaatctgtccaaagcagaggcagtggagcttgaggttcttgctggtgtgaaatgactgagtacaaactggtggtggttggagcaggtggtgttgggaaaagcgcactgacaatccagctaatccagaaccactttgtagatgaatatgatcccaccatagaggattcttacagaaaacaagtggttatagatggtgaaacctgtttgttggacatactggatacagctggacaagaagagtacagtgccatgagagaccaatacatgaggacaggcgaaggcttcctctgtgtatttgccatcaataatagcaagtcatttgcggatattaacctctacagggagcagattaagcgagtaaaagactcggatgatgtacctatggtgctagtgggaaacaagtgtgatttgccaacaaggacagttgatacaaaacaagcccacgaactggccaagagttacgggattccattcattgaaacctcagccaagaccagacagggtgttgaagatgctttttacacactggtaagagaaatacgccagtaccgaatgaaaaaactcaacagcagtgatgatgggactcagggttgtatgggattgccatgtgtggtgatgtaacaagatacttttaaagttttgtcagaaaagagccactttcaagctgcactgacaccctggtcctgacttccctggaggagaagtattcctgttgctgtcttcagtctcacagagaagctcctgctacttccccagctctcagtagtttagtacaataatctctatttgagaagttctcagaataactacctcctcacttggctgtctgaccagagaatgcacctcttgttactccctgttatttttctgccctgggttcttccacagcacaaacacacctctgccaccccaggtttttcatctgaaaagcagttcatgtctgaaacagagaaccaaaccgcaaacgtgaaattctattgaaaacagtgtcttgagctctaaagtagcaactgctggtgattttttttttctttttactgttgaacttagaactatgctaatttttggagaaatgtcataaattactgttttgccaagaatatagttattattgctgtttggtttgtttataatgttatcggctctattctctaaactggcatctgctctagattcataaatacaaaaatgaatactgaattttgagtctatcctagtcttcacaactttgacgtaattaaatccaactttcacagtgaagtgcctttttcctagaagtggtttgtagacttcctttataatatttcagtggaatagatgtctcaaaaatccttatgcatgaaatgaatgtctgagatacgtctgtgacttatctaccattgaaggaaagctatatctatttgagagcagatgccattttgtacatgtatgaaattggttttccagaggcctgttttggggctttcccaggagaaagatgaaactgaaagcacatgaataatttcacttaataatttttacctaatctccacttttttcataggttactacctatacaatgtatgtaatttgtttcccctagcttactgataaacctaatattcaatgaacttccatttgtattcaaatttgtgtcataccagaaagctctacatttgcagatgttcaaatattgtaaaactttggtgcattgttatttaatagctgtgatcagtgattttcaaacctcaaatatagtatattaacaaattacattttcactgtatatcatggtatcttaatgatgtatataattgccttcaatccccttctcaccccaccctctacagcttcccccacagcaataggggcttgattatttcagttgagtaaagcatggtgctaatggaccagggtcacagtttcaaaacttgaacaatccagttagcatcacagagaaagaaattcttctgcatttgctcattgcaccagtaactccagctagtaattttgctaggtagctgcagttagccctgcaaggaaagaagaggtcagttagcacaaaccctttaccatgactggaaaactcagtatcacgtatttaaacatttttttttcttttagccatgtagaaactctaaattaagccaatattctcatttgagaatgaggatgtctcagctgagaaacgttttaaattctctttattcataatgttctttgaagggtttaaaacaagatgttgataaatctaagctgatgagtttgctcaaaacaggaagttgaaattgttgagacaggaatggaaaatataattaattgatacctatgaggatttggaggcttggcattttaatttgcagataataccctggtaattctcatgaaaaatagacttggataacttttgataaaagactaattccaaaatggccactttgttcctgtctttaatatctaaatacttactgaggtcctccatcttctatattatgaattttcatttattaagcaaatgtcatattaccttgaaattcagaagagaagaaacatatactgtgtccagagtataatgaacctgcagagttgtgcttcttactgctaattctgggagctttcacagtactgtcatcatttgtaaatggaaattctgcttttctgtttctgctccttctggagcagtgctactctgtaattttcctgaggcttatcacctcagtcatttcttttttaaatgtctgtgactggcagtgattctttttcttaaaaatctattaaatttgatgtcaaattagggagaaagatagttactcatcttgggctcttgtgccaatagcccttgtatgtatgtacttagagttttccaagtatgttctaagcacagaagtttctaaatggggccaaaattcagacttgagtatgttctttgaataccttaagaagttacaattagccgggcatggtggcccgtgcctgtagtcccagctacttgagaggctgaggcaggagaatcacttcaacccaggaggtggaggttacagtgagcagagatcgtgccactgcactccagcctgggtgacaagagagacttgtctccaaaaaaaaagttacacctaggtgtgaattttggcacaaaggagtgacaaacttatagttaaaagctgaataacttcagtgtggtataaaacgtggtttttaggctatgtttgtgattgctgaaaagaattctagtttacctcaaaatccttctctttccccaaattaagtgcctggccagctgtcataaattacatattccttttggtttttttaaaggttacatgttcaagagtgaaaataagatgttctgtctgaaggctaccatgccggatctgtaaatgaacctgttaaatgctgtatttgctccaacggcttactatagaatgttacttaatacaatatcatacttattacaatttttactataggagtgtaataggtaaaattaatctctattttagtgggcccatgtttagtctttcaccatcctttaaactgctgtgaatttttttgtcatgacttgaaagcaaggatagagaaacactttagagatatgtggggtttttttaccattccagagcttgtgagcataatcatatttgctttatatttatagtcatgaactcctaagttggcagctacaaccaagaaccaaaaaatggtgcgttctgcttcttgtaattcatctctgctaataaattataagaagcaaggaaaattagggaaaatattttatttggatggtttctataaacaagggactataattcttgtacattatttttcatctttgctgtttctttgagcagtctaatgtgccacacaattatctaaggtatttgttttctataagaattgttttaaaagtattcttgttaccagagtagttgtattatatttcaaaacgtaagatgatttttaaaagcctgagtactgacctaagatggaattgtatgaactctgctctggagggaggggaggatgtccgtggaagttgtaagacttttatttttttgtgccatcaaatataggtaaaaataattgtgcaattctgctgtttaaacaggaactattggcctccttggccctaaatggaagggccgatattttaagttgattattttattgtaaattaatccaacctagttctttttaatttggttgaatgttttttcttgttaaatgatgtttaaaaaataaaaactggaagttcttggcttagtcataaaaaaaaaaaaaaaaaaaaaaaaaaaaaaaaaaaaaaaaaaaaaaaaaaaaaaaaaaaaaaaaaaaaaaaaaggaaaaaaaaaaaaaaaaaaaaaaaaaaaaaccttttggcccccttggcccaagccatttttaacttgggccaattttttccttgcgccccaatttggggctaattggcccaattccccttaaagggggccgtttaaaaataaatggcccggcttttaaaaacgtcggacttggaaaacccttggggttcccaaattaaatccctttgaaaaaaatccccttttcccaagttggctaaataccaaaaggccccgaccgaatggcctttccaaacagtggccaatcctaaatggcaaagggaaatttgagccttaaaaatttggtaaaaattcccgtaaaatttttggaaaaaccacttattttttaaccaaatgggccaaaatgggatcctttttaaattaaaggatttcccggaaataggtttaagggttttcccattttggaacaagggcccccttttaaagagaacgggccctcccttggggg

SEQ ID NO: 391614 - DNA, 573 bp, Homo sapiens
tcctgggtagctgggattacagacacccaccatcacgcccggctaatttttgtatttttagtagagacgaggtttcgccatgttggccaggctggtctcgaactcctgacctcaggtcacccatctgcctcagccgcccaaagtgctgggattacaggtgtgagccaccacacttggcccaggtatcttttaaagagatttaagtaatgagagaaaatacacagttaccatttctggtactcttcattcctttgtgtaaatctaaatttttatttgctgtcattttacttctgcctgaaggactttctgtaacatttcttctagttgatgatgaattattatatgtctgcaaatgtcttcattgtgtctttgcttttaaaggtgtttttgctggatttttctccacagtgctttaaatatgtttctctgttgtcttcctgcttacatttttttctaagagaaatctgatctcatactcatgtttgttcccctatatataacatgtctttttttcttccccccttattgttttaaactttttatcactagttttggacaatttgattgcaatat

SEQ ID NO: 391615 - DNA, 208 bp, Homo sapiens
cctaagcaggtaatttccctgagccctgccacctcatctgaaaaacagagatggtaacactgctttgccctaaacttaccatgttattattttgcttttcttttcttttcttttttttttatttgagatggagtcttgctctgtcacccaggctggagtgcagtggtgtgatctcagctcacttcaagctctgcctcccaggttcaca

SEQ ID NO: 391616 - DNA, 701 bp, Homo sapiens
agcatcaaaagtttgcgagtcatgaatgttaaaaaagtttaactaatacaaatattcctgaagctgtccttatgtgaatgcatttttaaatgcatttttaaaacattacatccatagctacatttgcatcagaatgtaagatagtatgtgtaaactttacaacatgcaaagtatgctgtttattttgcaaatagcacatctcatgcttgcaattttattctctgattttctttctcctcaagagaaacccctcaacttttgttcataaaatttacgatttttgtctcctcactccccttaccactgaatatttcctgtgtgtctttttttctaaactctagtagctttatattttcagtgtcatctttatggaaaggaaatttcagaaaacgtagacacttggcactaaactcaaatgtcacagttcatttcaaatgttacctcctccataaaacctttggatccttttcatttggaattaatctccctatcatttctgcctttcagatttgttatttctgttatggcaatttacttcaacacaggggtacatggacctgagtgtgcaaatatattctccacagggagaaagagggctaaaatttcaatgttaatataaaataaatcagtatgagcatattcttagatcatgtggtatgccatgcctaccttacaaccagttactaccatgtattttcagg

SEQ ID NO: 391617 - DNA, 361 bp, Homo sapiens
attgatcagatgactaagatgatgtgaccagaggcctgcaggaacctagccctcaattttccactaggagccatgcctcagaattcgccagttcaatgtttcccacaactttataaaacataactcctgtgaaatcaggagaatcaatgctattacattaaaggtagaatatgggactaggtgagaatctccaagtgggaggggcaggtccagatagtgaaagaggctcttatgtcctaccaaggaaggtggacttctaattgcttctaacatgtagttactgattcaaagactatgggcttgggaagggtctgtataccttcctcctctttatggaatccctggtatctgtaaacaagga

SEQ ID NO: 391618 - DNA, 1107 bp, Homo sapiens
cccaaagagaccattcatatcaagacccaagccatgagaaaatgctacaatgcccttgattaatactttataggcattttgacctcagatctaatcccatgaggcttagaccaagaccttgcttgatgcagacctctctgactgctgaaattggtcaggagctcagtgatgaaaatttggaaagtcaatgctgatacctgaagaaagtcccatcagagatctgtgacctgaatcttcataactttcacaggccctttctaaatgccaaggaggatgtgtgtggagaagaatatgccacctatggcatcccaatatgcctgtgcccgcctgctcttcaacaagggaatgaaacctgggtattctcataggttttttaaagcacttgtccacatattttattccgcaaataacacaatttaaaattcagctagaatttgccattttctgtcagggttgtgcatttcttccagtcaccatgacttcctgagatagccaaaacacaaaatttaaattgtgtttaaattaaataaacacaatttatgctgaagctgactttacccactctgttccaacattacttatcctcagcatctctgaattcaaatatcagccaggtgtggtggctcatacctgtaagcccagcactttggcaagccaagatgggaaggttgcttgaggagttggagaccagcctgggcaacatagcaagacccccatctctacaaaaaaattaaaaaattagccaggcatggtggtatgcacctttagtcctagctacttgggaggctgaggtgagaagatcacttgagcccaggagcttgaggtggcagtgagtcatgatcataccactgcactgtagcctgagcaacagagcaagaccccatcccttaaaaaaaatacctgccctctgtacttcatagcacctggggcattttgaacagttcttccttcacctgaggtcattatttgagaatccaattttagagactacaatgctctcattacttggattgtatcatttaatcttcccaacaatccaggaaggggagtctcttaatgattgtccttgatttccagttaaaaaatctagacccagaggtaaccttg

SEQ ID NO: 391619 - DNA, 578 bp, Homo sapiens
atagcaacaacaaaacatagattgagcatccctaatccaaaaacctgaagtccaaaatgctccaaaatttgaaactctttgagcatggacatgacaccacagataaccacataggcaactgagatagtgacacctttgctttctgctggttcagagtacacaaaccttacttgatgcacaaaattttttttatactgtataaaattatcttcaggctatgtgtataagttggatatgaaacaagtgaatttcgtgtttagacttgggtctcatccccaagatatctaattatgcgtatgcacatattccaaaatctgaaatgtttctggtcccaagcattttgcatgaggaatactcaaactataattaaattcctaaggatttacttccttaaaaacgttgttaaaaacctatgtgaagcaggctatataaaacattcccaaaagacacaaagcagacttgaacaaatggaaagacatccactgtccttgagacatatcaaaatgtcactttttccaaagttaattagaaatttaatgagatcataatataaaaagactgataactttttggtatag

SEQ ID NO: 391620 - DNA, 438 bp, Homo sapiens
tggcatgatctcagctcactgcaacatccatctcccagtttcaagcatttctcctgcctcagcctcccaagtagctgggattataggtgtgtgccaccacgcccagctaatttttgtatttttagtagagacgaggtttcacaatgttggccagggtggaataaatggagttcagtactgtttgaagttccaggcatccaatgggggtcttgggacatcttccccatggatacggggattccagtgtgttctgtctctggtgctgagcaccaaggctctgtgtcctccatttctgagggattacatgagcctgggatccatagagaggagaggaggggctgtgctctgcatggggtttggtcagggctgggtctggccctgaaggggagcttagaccaggccagctccccactgctgcagcgtgcgtgtgggcatctc

SEQ ID NO: 391621 - DNA, 229 bp, Homo sapiens
gcacgagatatagtcatctagtagaatatagtgaattaactcagatctacatgtattaacatgaataaattctaaaagtgtaacactcattagaaaaagtaagtggctaggctgggcacagttgctcacacctataatcccagcactttgggaggccgaggcagtgggatcacttgaacccaggagtttaagaccagcatgggcagcatagtgagacctcatctctttg

SEQ ID NO: 391622 - DNA, 164 bp, Homo sapiens
ctttgtactgacgcaggctcttccttccctcagacaccagccctacatgctgtattccctgggggcagactccctggctcacttctcaccatttccagaccctcctggcatcatgacatttcattccttcattcattcattcaggccagtacttgcttctaaat

SEQ ID NO: 391623 - DNA, 256 bp, Homo sapiens
gctcgagttgttaggaaactttcactttgtggcagccactagcaggcaccttgcagcactccagctgccgggagagcagctgcccatgggcccagctgcagccaggcctcccacgggctgctcccagccagaggttgtactgacccagattccatggcagatgcaggactcctctgatggcacaaaataaaggactcctagggctttgaggaagctttcttagactgctgggtacctctccagcccttgggctggg

SEQ ID NO: 391624 - DNA, 273 bp, Homo sapiens
tattacaatcccgctgactagtcctgaaatcatacccactcagcttgaccccaagagccaagtatcatacaatagggaaatgttggcagagaaccatacagaatgagactctactgctgacctgtggtgcctaaaacattcacaaacgacagtagcaacccctttgtacattaatcaccactggaaaaaagcagtatctagagagttaagtttaaactatggttaggctagacactatacatttttacctttaaggaaacacactcactcagg

SEQ ID NO: 391625 - DNA, 254 bp, Homo sapiens
agggaagttgtccagatgtgtttctgagagaatggaggtacttttcactggtattgcacagtgatagaactttctgtgatgttggaaataccgtctatctccactgtccagtttggtcaccactaaccacatgcgacttttgacatttgaaatgtggctagtgcaactgaggagctgatgttttaattttgtttttgttttaattaattacatttaattaatttagtttttatttttatttatttatttatttt

SEQ ID NO: 391626 - DNA, 587 bp, Homo sapiens
tcggtctacctgtattcccagcactttgggagaccaaggcagggaatcacctgaggtcaggagtttaaggccagcctggccaagatggtgaaaccccgtctctactaacaatacaaaaaatcataataataaaataaaatagccaggtgtggtggcgggcacctataatccccgctattcaggaggctgaggcagataattgcttgaacccaggaggcagagatttcagtgagctgagatcacgccactgcactccagcctgggtggcagagtgagactctgtctgaaaacaaacaaacaaacaaacaaaaaacacttctttacaagactttggtattcatacttcaaaattttgtcattaattttgcttgtctacagaaatttgatttttttttttttctgtaaaccagatgatatgggttaggttagggtctaactggaatatgaaggaaggagtagataacaaggccattttgaagaataaacaacaaaattaataactgataagactcaaagagaagagggaaataacctaatggtgtccaattcaggtgtctaaaactacctaacagaaagagtggagctga

SEQ ID NO: 391627 - DNA, 282 bp, Homo sapiens
agccacccacctatgtgctatttagcattctgaatattctgtctacaccagggacagcaaatacaggcactaacgccatcactactcctactcataacaataaacactgctcaatgatcacagtatcctttcccactaatccagaagctgcgtccaactaacttctcaatgcagtcttccaggcagtcttcactatcaatcaaagctagcccatgaaataaaacctacttgccatatctagtccccactatattaatctgtttgcctcgatatatttgccat

SEQ ID NO: 391628 - DNA, 310 bp, Homo sapiens
gccctgaggctgcactgtggcagtctaggtgagagacgatggtgacaatgtgtggaggacataggccagagaattttcttcaccaagtcttgacagaatttggtgaagaactagctggagaaggcaagagtgaaggtgacattgtcacttggattttagggttggacatttagagtaactccttagtttccttttaactctcagatactgtgatttgatcaaattccaaattatgacaggtatctttcggatgagaggataaaatttcctttggaaagaacccatggatgaaggctgccaggacacaggg

SEQ ID NO: 391629 - DNA, 384 bp, Homo sapiens
gagacaagggagatgcatctgggtctgcagagggaagtgctagaaagggagtccctaccacacaattgggctttttctgaatcaaaagcagaggttgcaaatgggtggcccacaggttgaatttggtggaaagacaggtgttatctgactttctaggcactttacagagttcaattagttcacaacatggaagatctgaattttggccttctcttaaaaactcaagagcgttatggagcccacctcgtcacatggcaggtctggaggagctgagtggcggtggcctcttctggggaggcacgtgcttccaactgctccccaacactgaggctgggtgtcagttgccatctcagagagccggaattccccagagagccggaattc

SEQ ID NO: 391630 - DNA, 371 bp, Homo sapiens
tctgcacttcctgaatccatttcctattcattcttcagtccgctacagtctgactttgactttcacaagtgcaccaagtttgttctccctcagggtctccagttgctgtggtctgaatttgttccccaaagttcatgtgatggcacagtgttgggcagtgagactttaggaggtaattagggcaagaggactctgccctcgtaaatggattgatgctattatctttaaagtgggttaattatcatgggagtgggctcctgataaaaggatgagtttggcccccttctgccctctgtcttgtgagctctcttgtacttctgccttccaccatgggacgatgcagcaggaaggtctcaccagatgctagcacc

SEQ ID NO: 391631 - DNA, 537 bp, Homo sapiens
gcttgggccggggaggcacaggctgcagtgagccaagattgtgccactacgctccagcctgggcagcagagccagacactgtctcaaaaaaaagtgacaatgggacatcgaaatggatgtgctttagcaggcaggtaaaaatgtgggactgagctcagttgtgaagtctaagcaacatgtttatatttgggcatcacttgaatgggagtgactgctgataccctgatagtgaatgaagtctaaggaaagcaagtttacagagagagtcaaaagactgagaccctgagtctactttgtcagccgcagagtatcccagcattgaagaagcacccgaggtgagctcagcatgggtagaggaagagaaaccagaatggacagatggtgaggaggggtggtagagagcattgtccacttttaaaagatttgttgaaatagagcagtagcttttgggccggagctggctatatccagcaaagattttgcaggaaaaaagtttccaggagagaagatcattttttattgcagagcagtcagaat

SEQ ID NO: 391632 - DNA, 329 bp, Homo sapiens
atccatcaatagctgagtggatacatagaatgtggtgtgtccatacgatgcggcactagtcagccttaaaaggaagggaattctgacatgctgtaagacattgaagacatcatgctgagtaaaataagccaggcagaaaaggtcaaacactatatgatttcattcataggaggtacgtaaaatagcctaattcatacagagagaaagtagaaaggtagttgccagggcctgggggaggaggaaaggaggagtcactgtttaatgaatacagtttcagttcttcaaaatggaaaaagtcctgtgggtggagggtggtgacggttgtaaca

SEQ ID NO: 391633 - DNA, 185 bp, Homo sapiens
agttgtggcacctgtattcttttaaatccctgatggaggcaatgtgacaaagcagaaagtcaggcagacgaggattctaaatgtagctctggactacgtatgtgacattttaattattaaaactccctgatgctcaatttcttcatctggtaatcagtatgatgctgcctttgcatgattattga

SEQ ID NO: 391634 - DNA, 238 bp, Homo sapiens
ataatcacaatctccttacaaattggtatagaaaaaagtagattaggttctaattttggctgagattaggtacctgatcttattagggcttgatttcctcatcggcaagcgtaaaggtgaatgatacaatcttttagtcactttcaactctcaaaatcttattccatcccatatccagtttaatacccaagcccatgtcatctctcctctaaaacaatcaggaaaatgagtacttcaa

SEQ ID NO: 391635 - DNA, 324 bp, Homo sapiens
tacattagatctctaggcgtgtttattctacccgtctgttactttgtatcctttgagctacatctctccgttcgtctcacctacattcatgttcgtactttttatgtcccttcccctcccaagcataatataaaccgccaagagccaggaactctttttttaatttcatttttattaaaaaaaaataatgcccctctatgcctagcatggaactaatgcagaatgtacccatgtagtgtattgtcactgaatgaataatttagtctgagtaagtctatatccccaggactgattttgtggatgccagccatctcttcttggatt

SEQ ID NO: 391636 - DNA, 554 bp, Homo sapiens
gcctctgccccagagctgggcatcttggggtgcacagaggaggtgctgcatgagtgagaaagacttagtgaggagagaagcagggagggaaggaagtgggtggcagtggaaacagcactttcccagttgttctttcagccgatgttcattcagggctcatggtagccaggccttttccaagctattccatggattagccatcgctatgaattctcaggatccctgcaggaaatgccactgttgtccatgtcacagatgagaaaattgagatgcagacttagagtatctcatccagtggcatgcaagtggtgtggtacggagcacccacgcctggcctgcaggtgcctgcccctctccacccctgtccagtgatgagcgagctcatggcaggcatgcaggcaccctgggctcctttgcacacactccctcgcttgggcctgcggtggctccaggaagcaggtgctcttgtcatccccaatttgtagatgaggaaaccacaggcctctccagttggccacgcctctgaagttggtctgggtcacatgcctccgtgg

SEQ ID NO: 391637 - DNA, 373 bp, Homo sapiens
tggtctctgggtgaaagcgaggctttctatgcccatgtactgcctaaccccctcccctgagttgagctgggctccattatgacctggggctcaggcagaaaagcatttgaccggaggaggcggtccgcactcagcgcctcctccagagcctccagagccgaggctgactgcagcctggggagagtggaggcagcacagctggaggtggaactgaggaaggactgggcggggcatggagcaggcccccttctccggcccctcctcccactgtcctctgcccctacttgtcctgctctctgtctgtggggtctccgtgtctctgcccctttttcttgagtttccgtctttgccactttctcttacctctcagtcc

SEQ ID NO: 391638 - DNA, 426 bp, Homo sapiens
tcctatttacatgtgagagcatgtgatgaattgttgctgcatccaagatatgagagattcttttttattaggtgagcattatttataaactttgttatgaaaatgtaaggacattaaaatgtaagatgcatgatgaaaatctaagtgaagagacctttgtggttaacttataatattgagtaatgtgtgagttaagtgttcagtcatattcttctgtattatgagaagaaaacatttttaatttcataagtaaattaaaatttagtatattgtactaattatacttttatataaaatgcagtatattttgaaaatttcagattatatgtgatgttaatatattcaacatctttaacattttaaatactgttgtgcattcagtgaagtgttatgtaacaaacattaattcccccttactcaaggttg

SEQ ID NO: 391639 - DNA, 769 bp, Homo sapiens
agccagttggtgctgcagtctatttcctctggatcagggggtctcctcagtagagtccctttgtggttcaccaggaagatgttagtggaaaggggtcccaatccagaccccaaaagagggttcttggatctcacacaagaaagaattcagggcgagtccacagagtaaagtgaaagtttattgagaaaataaagggataaagaatggctactccattggcacagcagccagaagcaagaagttctgaactgcctatcagatattaccattttataaatgagaaccagtccataattttggaacatgtttcctatataataaccctttcttagttggaaatgacccagacattcaacaagcatctacaatgattttaagaacttaaatcatacaaaaaagttttacttagaagcatttatctcatttatatgcatataattctcccatttttaaccgtttacttagattacttctgaaaactgagatcttaccacagaggtagtcattattgaaagttaattccctgttaaccattttaaagcttgtgaacatcatgtgttcatctaagtaagaaccttaaagttaaaacacataggcattttgttgataactcagaaggtttagctattttcctcaaacaatattaaatgtcttatcaaaaattacacaaagatcattctgtcttgggctgggtttatagttttgtaactcttatgccaaattttggcacctaatgatatctggcagagataaatatgaaaccgcttga

SEQ ID NO: 391640 - DNA, 280 bp, Homo sapiens
tgcctgtagtcccagccacttaggaggctgaggtgaaaaaattgtttgaggccaggaggtcgaggctgcagtgagctgtgatcataccactatactctagcctgggtgacatagtgaaacctgtctctttaaaaagaaataaagtttaaatgttttaagtaaaacattttaaaagattttattatttaaacatatcaataataaaaccattgcatattaacctaatataattctatgaaaaataactataaaaatttttgtgaaaagaatgacattgatt

SEQ ID NO: 391641 - DNA, 908 bp, Homo sapiens
gaaacttaaaaactcattattgagttctctttcccatcttgcaagatggtgagaagttggatactgaggagaagaaacccgaagccaagaaggctgatgctggtggcaaggtgaaaagggggaacctcaaagctaaaaagcccaagggggaagccccattgaagctgaaatcccatccttgtcagaggaattggcagatattcccaatctgctacatattccagaaaggccgtgtacaagaggaagtactcagctgctaaatccaaggttgaaaagaaaaaggaggagaaggttcttgcaactgttacaaacagttggtggtgacaagaatggtggtacccggctggttcaacttcacaaaatgcctagatattctcctactgaagacatgccttggaagctattgagccatggcaaaaaccccttcagccagcatgggagaaaattgtaagccagcatcacccctgggaccttctgatcatcctcactggacaccacagaggcaagagggcggttctcctgaagagctgggcagtggctgttacttgtgtctggacctctggtcctcagttgaggacacaccagaaatttgccattgccacctcaaccaaaattggtatcagcaatgtgaaaatcccaatacatcttactgatgcttaattcaagcagcagcagctgcagaaccccagacaccagaaaggtgagctcttcgacacacaaacagagaagtacaagattacagggcagcgcaaggttgatcatcaaaaagctgtggactcacaaattttactgagtatcaaagctattcctcagctccagggctacctgagatctgtgtttgccctgatgagtggagtttatccctcacaaactggtgttctaaatttcttaagaacctaataaaggat

SEQ ID NO: 391642 - DNA, 234 bp, Homo sapiens
ggggtacggtgtttagggcccagagagggttggaatcacgatgcccccagttgtccttacctctgtcccggacttggcactggacccgccagggggcctttggtgagggtttgctgaggaagctgaaggagggcccgcgtgcagcatagtgctggctcgtctgtggatggccacgctgagttggcgcacataaggggcagctgctgctgcggggccttcaaggtgctatccttg

SEQ ID NO: 391643 - DNA, 203 bp, Homo sapiens
cagagctgcagctggagtggtggcatcaggaggctaaagacttgcttctgagttagaaggtccacagcatgcaggccgtgcactgccaagagcagggcagaagggttctagctaaagaggttgtttcctctgccaaggttctaagcagcccaggaaaaaccctttggcttctctgagccttggttctctgggaaaaacagagg

SEQ ID NO: 391644 - DNA, 398 bp, Homo sapiens
ccctgccctgatgcagggatcaaggaaggtaacatcctgtgcctgggacgcctgcttcctccctcttgcatgcttcagtggttaagagtaggagcttgaatttagagtcacacagacacagccacttactggctgatgatctggcaatttacctgcccaaagcctcagtttctttatctgtaaaatgaagtttaatagccccaaaccttacaggattattttgaggattagagatgctgcttccaagctcttagggcaatgatgggcatgtgattggattatatgattttatccgccagtcccccacttcctgataatttttgagtacttctaggcgcagggtctgtatcttaccatcttgtctttcccagagcctaccctagcaaagcacctagcac

SEQ ID NO: 391645 - DNA, 311 bp, Homo sapiens
agggctgtaagactgggaaactaaaggagtgtgtatgtgatgacctcgccatgtgtgtgtatgcgtgcatgtggggggaccatgggagtgtctgatcctgaaagtgtatatgggagtgtgtgatttttgtgactatgggattgtgtgttttatatctgtgtcactatggcagtatggcctatgtatgtgagattttatggctgtaggtggtattttgggttgaattgtgctcctccccaaaaaagatatattgaagtcctaaccccagaacctccgaatatgattttatttggaaccagtatcattgcaga

SEQ ID NO: 391646 - DNA, 462 bp, Homo sapiens
atgaatccaacaaatgcactttcttcacagatcaaagcataaactctaattgaagactataaaaggcacatgcagtgttcatggcaccatagccatggatgaaaagactcatcattgtggagattggcagttctcaaattaatctggatttattaatacacttttgattatattcccaggagagatttttataaaatgcagaccagccaaggcaatattgaagaggcgcagacggcattaagaagctgcaattgcagggcagccaggccaagaggcaccagggccctcagcgcagcagtgagcccagaagggccgcaagtggcagggtacctctgcgcactagggaaggagccatgttgctaaatggtgttgggacagctgatgccatatagaaaaggatgcagtgatacccctacctcacaccatgcacaaaacacatcacagtgagagacctaacctgta

SEQ ID NO: 391647 - DNA, 310 bp, Homo sapiens
aggcgtgagccaccgcgcccggccttgtttttgtttttaaataaacattttcttttaggacagtttgagatgtataggaaagcgacgaggataccccagagttctcacacatccgcagtctgcttccccagctgctagtatcttagtctgtgggctgcgtttgtcacaacttgtgaaccaatattgatacatgattgccgaagtccacattttattaggtttctttaggttttccgtgatgtcctttttctgtcccgggatcccatccaggatccccacagtacctgtagtcacgtctcccaaaacttcc

SEQ ID NO: 391648 - DNA, 1034 bp, Homo sapiens
acagagggctttgaggtcgcaacgtcccggttgctgagcggagtcaggagtcaggttccaaagggacagcgctcagggttgtaatcaccacccggcccaccgcttccgcagctgcgagtctagggcggagctgttgggtggaccgagcaggcgaggcgcaggcaggcagcggctccgcctcggaatccgcctcgaccggggcccaggtgcccgccccacctgtccctcggtcaccccaaccctgtttcctcgacccccagcactcctccaggcctagttcgcttcagaggcgcgagacccggaaaacaaggaagaagcgagctcagcctcaatccccgtccccaccccactttcgggaccgctaagctggagaattgaagggggcggaccccggattaaagccgctcccttcccagcctcgccccgctttcctaatgtccgtgatgatttcgttattggcagggaagagccagactccctgcgctcccaagacggggcgattgggagggggttctggagctcatgcctggggtcggcccggcgggggtgaccccgcgccctcgccggtgcaaggagaacagctggttcccgccggggcagggaagcgtggacggtgtgggctcaggcgcctggcaggcacacggggcctctaaagcttggtcactgtcacagatcgtgtggttgtttcttccgtccccgccacgccttcctcctgggatggggattcattccctagcaggtgtcggagaactggcgcccttgcagggtaggcgccccggagcctgaggcgggaactttaaaatcagacgcttgagtcgcttgagtcgcggttgaatgcacatctgtgcaaaaatgtgatgtcaagcgctatgactcattgacagagtgtctcagtatttcctgcgttgtgacttgagatgagttattagctcacattagtatgttatcagactagcgtttagtgttgtctactcatcaccatctactatacacagctgattttagatttggtacactgggaacaacatgcataa

SEQ ID NO: 391649 - DNA, 664 bp, Homo sapiens
  misc_feature (27)..(27): n is a, c, g, or t
  misc_feature (40)..(40): n is a, c, g, or t
  misc_feature (42)..(43): n is a, c, g, or t
  misc_feature (45)..(45): n is a, c, g, or t
aacataggctaggtacgggctggtgtnaatcggccgaggntnngnggcttccgcgatgtcctaggtggctgctccgcccgccacggtcatttccattgactcacacgcgccgcctggaggaggaggctgcgctggacacgccggtggcgcctttgcctgggggagcgcagcctggagctctggcggcagcgctgggagcggggcctcggaggctgggcctggggacccaaggttgggcggggcgcagggaggtgggctcagggtttctccagagaatccccatgagctgacccgcagggcggccgggccagtaggcaccgggcccccgcggtgacctgcggacccgaagctggagcagccactgcaaatgctgcgctgaccccaaatgctgtgtcctttaaatgttttaattaagaataattaataggtccgggtgtggaggctcaagccttaatccccagcacctggcgaggccgaggagggaggatcccttgagcccagaggttcgagactagcctgggcaacacagtcagactccatccttccaaaacaaacaaacgaaaataaaacatagacttctttatatcttttgagctccctcccttttattatgtaatgaatatgtgttgcttttgtaataggaaaatataaagttaaaatttca

SEQ ID NO: 391650 - DNA, 736 bp, Homo sapiens
  misc_feature (27)..(27): n is a, c, g, or t
  misc_feature (40)..(40): n is a, c, g, or t
  misc_feature (42)..(43): n is a, c, g, or t
  misc_feature (45)..(45): n is a, c, g, or t
aacataggctaggtacgggctggtgtnaatcggccgaggntnngngggaggatcccttgagcccagaggttcgagactagcctgggcaacacagtcagactccatccttccaaaacaaacaaacgaaaataaaacaaacagaaaacgaaattagccgggtgtggtggtgcgggcctgtggtcccagctcctcgggaggctgaggcaggaagatggcttgcgactgcaccactgcattccagccttcgcgacagagcaagaccctgtctcgaaaaatgtgtatgtctgggtaagtgtatagattttacaactattttgaaggcgacctttttaactttaaacagaccactctggaggagacgcctgacccagagcgctttacctaaagttcggtgcctaaaatgcacccttcctctggctggtgtctcccttctgccaagctatgcctcctgcagaggtaggctccgtggtgtctcccactccgccccaactggagaacggtgtaaagaactgtcagccgggtgcagtggctcacgcctgtaatctcagcactttgtgaggccgagaggggcggatcacttgaggtcagaagttcaaaaccagcctggccaacatggtgaaaccccgtctctgctacaaaaattagccaggcgtgatggtggatgcctgtaatcccagctactcaggaggctgaggcaggagagttgcttgaacccgggaggcggaggttgcagtga

SEQ ID NO: 391651 - DNA, 2040 bp, Homo sapiens
acagagggctttgaggtcgcaacgtcccggttgctgagcggagtcaggagtcaggttccaaagggacagcgctcagggttgtaatcaccacccggcccaccgcttccgcagctgcgagtctagggcggagctgttgggtggaccgagcaggcgaggcgcaggcaggcagcggctccgcctcggaatccgcctcgaccggggcccaggtgcccgccccacctgtccctcggtcaccccaaccctgtttcctcgacccccagcactcctccaggcctagttcgcttcagaggcgcgagacccggaaaacaaggaagaagcgagctcagcctcaatccccgtccccaccccactttcgggaccgctaagctggagaattgaagggggcggaccccggattaaagccgctcccttcccagcctcgccccgctttcctaatgtccgtgatgatttcgttattggcagggaagagccagactccctgcgctcccaagacggggcgattgggagggggttctggagctcatgcctggggtcggcccggcgggggtgaccccgcgccctcgccggtgcaaggagaacagctggttcccgccggggcagggaagcgtggacggtgtgggctcaggcgcctggcaggcacacggggcctctaaagcttggtcactgtcacagatcgtgtggttgtttcttccgtccccgccacgccttcctcctgggatggggattcattccctagcaggtgtcggagaactggcgcccttgcagggtaggcgccccggagcctgaggcgggaactttaaaatcagacgcttgggggccgggctgggaaaaactggcggaaaatattataactgaactctcaatgccagctgttgtagaagctcctgggacaagccgtggaagtcccctcaggaggcttccgcgatgtcctaggtggctgctccgcccgccacggtcatttccattgactcacacgcgccgcctggaggaggaggctgcgctggacacgccggtggcgcctttgcctgggggagcgcagcctggagctctggcggcagcgctgggagcggggcctcggaggctgggcctggggacccaaggttgggcggggcgcagggaggtgggctcagggtttctccagagaatccccatgagctgacccgcagggcggccgggccagtaggcaccgggcccccgcggtgacctgcggacccgaagctggagcagccactgcaaatgctgcgctgaccccaaatgctgtgtcctttaaatgttttaattaagaataattaataggtccgggtgtggaggctcaagccttaatccccagcacctggcgaggccgaggagggaggatcccttgagcccagaggttcgagactagcctgggcaacacagtcagactccatccttccaaaacaaacaaacgaaaataaaacaaacagaaaacgaaattagccgggtgtggtggtgcgggcctgtggtcccagctcctcgggaggctgaggcaggaagatggcttgcgactgcaccactgcattccagccttcgcgacagagcaagaccctgtctcgaaaaatgtgtatgtctgggtaagtgtatagattttacaactattttgaaggcgacctttttaactttaaacagaccactctggaggagacgcctgacccagagcgctttacctaaagttcggtgcctaaaatgcacccttcctctggctggtgtctcccttctgccaagctatgcctcctgcagaggtaggctccgtggtgtctcccactccgccccaactggagaacggtgtaaagaactgtcagccgggtgcagtggctcacgcctgtaatctcagcactttgtgaggccgagaggggcggatcacttgaggtcagaagttcaaaaccagcctggccaacatggtgaaaccccgtctctgctacaaaaattagccaggcgtgatggtggatgcctgtaatcccagctactcaggaggctgaggcaggagagttgcttgaacccgggaggcggaggttgcagtga

SEQ ID NO: 391652 - DNA, 1842 bp, Homo sapiens
acagagggctttgaggtcgcaacgtcccggttgctgagcggagtcaggagtcaggttccaaagggacagcgctcagggttgtaatcaccacccggcccaccgcttccgcagctgcgagtctagggcggagctgttgggtggaccgagcaggcgaggcgcaggcaggcagcggctccgcctcggaatccgcctcgaccggggcccaggtgcccgccccacctgtccctcggtcaccccaaccctgtttcctcgacccccagcactcctccaggcctagttcgcttcagaggcgcgagacccggaaaacaaggaagaagcgagctcagcctcaatccccgtccccaccccactttcgggaccgctaagctggagaattgaagggggcggaccccggattaaagccgctcccttcccagcctcgccccgctttcctaatgtccgtgatgatttcgttattggcagggaagagccagactccctgcgctcccaagacggggcgattgggagggggttctggagctcatgcctggggtcggcccggcgggggtgaccccgcgccctcgccggtgcaaggagaacagctggttcccgccggggcagggaagcgtggacggtgtgggctcaggcgcctggcaggcacacggggcctctaaagcttggtcactgtcacagatcgtgtggttgtttcttccgtccccgccacgccttcctcctgggatggggattcattccctagcaggtgtcggagaactggcgcccttgcagggtaggcgccccggagcctgaggcgggaactttaaaatcagacgcttgggggccgggctgggaaaaactggcggaaaatattataactgaactctcaatgccagctgttgtagaagctcctgggacaagccgtggaagtcccctcaggaggcttccgcgatgtcctaggtggctgctccgcccgccacggtcatttccattgactcacacgcgccgcctggaggaggaggctgcgctggacacgccggtggcgcctttgcctgggggagcgcagcctggagctctggcggcagcgctgggagcggggcctcggaggctgggcctggggacccaaggttgggcggggcgcagggaggtgggctcagggtttctccagagaatccccatgagctgacccgcagggcggccgggccagtaggcaccgggcccccgcggtgacctgcggacccgaagctggagcagccactgcaaatgctgcgctgaccccaaatgctgtgtcctttaaatgttttaattaagaataattaataggtccgggtgtggaggctcaagccttaatccccagcacctggcgaggccgaggagggaggatcccttgagcccagaggttcgagactagcctgggcaacacagtcagactccatccttccaaaacaaacaaacgaaaataaaacaaacagaaaacgaaattagccgggtgtggtggtgcgggcctgtggtcccagctcctcgggaggctgaggcaggaagatggcttgcgactgcaccactgcattccagccttcgcgacagagcaagaccctgtctcgaaaaatgtgtatgtctgggtaagtgtatagattttacaactattttgaaggcgacctttttaactttaaacagaccactctggaggagacgcctgacccagagcgctttacctaaagttcggtgcctaaaatgcacccttcctctggctggtgtctcccttctgccaagctatgcctcctgcagaggtaggctccgtggtgtctcccactgcacccggctgacagttctttacaccgttctccagttggggcggagtgggaggtcgac

SEQ ID NO: 391653 - DNA, 776 bp, Homo sapiens
gagcagtggttatagggttggccatataatttggtcattccagttcctatgtttctggaccaagaggaacaatgcctggatttgataaatgtcttgatggaatagaactttgggttatttcccttaagaaggtgtggaataaagggagcaaaggaatgtttgccagccagaagaacagactgtggcagaggctggggctcaccactatgctgaagtctgctctccccacatttccgagtttccttacaaattaagcaagtctatggctagctttgtcaatgcactctaagcagaagtcatgtgtgtcacttccaagcaaagaagagccatccatgcacatcacttggctttctctttccgacaaagtgacccgcaactatctagatggtgggacctcgtcagctttggtctcacagtagcaatcctgacttgccctgaacccccaagggatgaaaggtcaggttattttaccaagtaagtaacctcagactagcagaagtactagccaagggtggaggtgaatctagaataagtagtagagcagagagatgagtaccaatcgtggcctcaagaccacctgcaaaaaacttaaatgcgtatccccactctagagtttcccaaagagcccaagccaagataaagggagattcttcataatagataacagaccccagtagatctcattagctccactttatcacattaagaaattttctacagatgtacttcatttttaccactttatgtactgatactaagggagtaagttagaatat

SEQ ID NO: 391654 - DNA, 827 bp, Homo sapiens
tacattcaaggtatacgtttttccttgaaaaaagtgtaagttttttgaaaagcaagtaggtaattcaactgtaaaattgcttcatgctgttccttttttcctgttgtttgtgtaaaagcatgtcatcaatttctgttgcatcagaaatctgagagattcctttcttattaggtaggcatcattcattaatttttccatggaagagtaaggatattaaaatgtaagatgataatgaaaatctgattggagaggctctttatggctgacttttaacattgttcatgtgatgcatgagttatgtgtttagagtaatattctgcattatagtgagaggaaaactttgagttttagtagtaaattgttttaccaattgtacttttatgtaataaaatgtagggaattttaaaattcttttataagactgtgataacttaacttttaaattaaacgaaatggttttaaactttttaagacgtgcatttagtaaagtgttatgtcaccaactttaacgtatcccactgtattaaagatgtagataaaagatggtaacatagtagaatgacctctctagcaatctcttttgcctgtggcattaaactgaaaagtttaacagtattgtttcaatgggtaaaatgtacatttgtttaactttttaaatttttgtaggaacataatattgtttacctatttatggcatatatagaatattttcatacaggcatacaatttgtaatcacatcagagtaaatgaggtattcattacctaatgcattttttttgtattacagacaatccatttaaacatttttagttatctaaaaatgtac

SEQ ID NO: 391655 - DNA, 267 bp, Homo sapiens
atacttttttaccttctggaatggcagggtacgtgagtctcatcttatgcttttcctgccctttccccggaatcagccatttcttccaggtgccctgggcccttttgaggagagctattagaaaccagggtctgcagccaggcgcggtggctcacgcctgtaatcccagcactttgggaggccgaggcaggcggatcatgaggtcgggagatcgagaccatcctggctaacacggtgaaaccccatctctactaaaaatacaaaaaa

SEQ ID NO: 391656 - DNA, 365 bp, Homo sapiens
tcagtgcaaagtcaacagttcctgggattttgagtagcactcaatggttctatagatgcagggtgagtaagcaggcatactgtcgcttggtggcaagcactttgtatgcatatatctcactattaacaagtatatgtattagcgccaggtggctcacatatccacaaatacacaggtgacacagcccagcatgcgagtgcaagacagttttgtgtttgcacaagactaagaggtccttgtatgtagattctgtcttcttggacacttagttgttgagaaattttttgttgaattttaaaaactgagatgattttctagtcattcatttattccatgatcaagcctggcaattaacttggttgaat

SEQ ID NO: 391657 - DNA, 98 bp, Homo sapiens
tctgtaatcccagcacttagggaaactgaggcaggaggcgcgcttaaatccaggagttcaagatgcctggacaacacagcgagaaccccatcactacc

SEQ ID NO: 391658 - DNA, 420 bp, Homo sapiens
tcttgggtctgtgagtcaaagaaaaggtccctgtcccagggagtgacaggcagtaattaggctgagttgggtggggaggtttgtctcggcctccactgttcccggaaaccgctgttctccttggaacagccactgggagttggagtgtttatttgatttctgacttgctaagcctgtaatttacctgctggaacagacagagtccagctgcccaaaccgtgtcattaaaagcagatcctgggcccgccccatccacaggcacagcctggcagagtggttccacctccccatgggcccaaggatgcgcctctctggagttcacgtgctgcacccccagggaggggcctggggagagctggtccagcagcaggggtggaggctggggccacactgcgggacagcagcccctccacctggacc

SEQ ID NO: 391659 - DNA, 386 bp, Homo sapiens
cttttatgtaccccctcaatccacaccctcaacatcaccaaaagggaaaaagccatttacttcagaattaaacttgaagtggtgtggtcccttctgaacacccagtgctgccatgccaaacggggttcttccccaacctgggatgctacagttaagtacagcttggggcaagtttctagagcccaaagacctactttcagggtagcccagactggaagcaaactcttctagtcactggccagcaagccctgtctacgcaccatgagtgctaaatccagatataaggtcctttgtgtttgccccaagaagacatttctgtttacttaaatggatgcttccttaactgagaaacaaagtgaaagctatcaggttaaacatgccttgct

SEQ ID NO: 391660 - DNA, 322 bp, Homo sapiens
aattcttgaactccaagtcaactcctcgctttagacccttaaacaccatctctctgcccacacactggatgtccctctcttctaaggaaacttctcacattaggtgctgggatgtacggaggaaaaaaaaaaaaaaacccgggtgccagccagaaagaaaatgtagagccagttataaaaaagggtccatgggctgggtgcagtggctcacacctgtaaccccagcactttgggaggccaaggtgggcggaccaaggtcaggagattgagaccattctggctaacatggtgaaaccccatctctactgaaaatacaaaaatt

SEQ ID NO: 391661 - DNA, 592 bp, Homo sapiens
gaaaaaaatctcttggatggattcaagttttcatatctgcagaaggcatttctacagctattgtcaaacttagctggtctgtaaagattctttgtttctggttgactgttgcagaaagcaagttcataaactaccacgaatacaggagagaatgatttctattgaaagagtcgagtaggatatggtgcatggagccagtcctgaaaagggttttgtttcttgtagcatggtggaaattcacattcacattgctgctctgtgctctttagcatgctacagtgaaacaatgggcatgccagccgttatagcagtgttgattaatgcattccttgaatgtgttgattaatgtgttcctgggatgcctccttaagccgccactgcacctgaggtgtgttggatatgccttctccccggctgctgcttcgctcacatgagcccttttacacatgggtcttttgtgtgtatatttcacaccattgcctttatgaataaaatacagatctagcagactttttacagacatattatcatctgacagaagtgtctacattataatctagttgggactctataaactatgatgttcatagga

SEQ ID NO: 391662 - DNA, 281 bp, Homo sapiens
tacaggcacccaccaccacacccagctaatttttgtatttttagtagagatggagtttcaccatgttggccaggctggtctcaaactctcaatctcaagtgatctgcccgcctcagcctcacaaagtgctgggtttacagatgtgagccaccaaggccagcctatttactcttaaaactgaactgcctcggtctttttttttttccttcccttctgatgcccttcacaccatcatttgcttaaagtctttgatgtgtccattttatagattacgatgctgt

SEQ ID NO: 391663 - DNA, 292 bp, Homo sapiens
agctataaggctacgctgatctcacagcgagaacagccttaatgccaagctgttctgggaggcagaagttttcagcaatcgaaatgacaaggttcattctgagttttggaaatgtcacttggccctgctgtggcaaaccgacaggagttggattgccgaagaaagatgagggaaccagtgagaggatatcacaattgtccatgtgagacgtgtgccacaatgtgagtgataatggagatggagaagtcagaggaaaggccatttggtgggacttgatggctaacagatgtga

SEQ ID NO: 391664 - DNA, 439 bp, Homo sapiens
taacttaaaaactcaatgttagagctgtatttgttggtacagttgagtatgacatggcaacatttagactagcagttttaatttgatcttgtcagaattgatctatagtgcaaacgtagttatgcacatagctgaaactttgcggagaggtaagcaggtacactgatcagaattgttaggtaaataaccatagattcactcaggaagaattgtacaactctggatgcatttcagtgaagagaaaaagaaagggttctgatgagctttctttttgaaggaatagtcctttcacttctgatttttggagtatgagagtctgaggttgaagatactcttatatgtatgtaaagtctatagtcatctttcagctgagctggtctttgaattccaagtttaaaaagccagcaatttgccgttagctttcaatccagatctctga

SEQ ID NO: 391665 - DNA, 282 bp, Homo sapiens
gtccctctctggacctgtttgtttccccatttctaaactagagataagggttggaatgagaattaaatgagatttgtgaaaagcatttagcctggtgccaggcacttggaaaggtcacagaggaatgcgccccattgcacccaccatggctccacccagcacctgcactggcccaacccagaggggcctgacagctttctcccagtcactcgctctgctgggcaagtggagacccaagctcaggacatctggaagggtctatggattccccctcccagacag

SEQ ID NO: 391666 - DNA, 734 bp, Homo sapiens
cacatagtttcttctgaattttaagaaagctttgtcagaatcagtaacttgcctatagtgtatttttcatgaccatatggctttcttcatcaaaaacagctaagtaaaaatttcagtgaataatagtatatatatatgggaatgtattcctcatcatttgtatgctcttgagagagtgactcatgtactgttttctattgagttcccgaaagtttataaagagatgacaaacaattggctatgggattgaaataatgcacatgtaaaatggaagggaaaacatggaaacagtttcttcctttgttcttcccttaccttgatgaaatttttaccacttaacgtttttcagtaaagtcaaggtcagtatcagagcctagtacggttctgcttgccgctgtctgaggattacctgtcttattacagaatgtacatgctcccagaggagaagatacagtttgatttcaggatgacaaacagctcttctgggacaatagtgtcaagtataaaaggattataaaggttttaggaccatgggatggtttgaaggggaaagggtgaaatgacagttaaggttggcatcaccgaggtcccagttgttggctgccccctacttctcctgttcccctctggcagtattttacagatgtatttcctttgacctttcctttagtaggaagttgtaggctttaagatccagcagaaaaaaattatgagccatttgtgaccctcttgag

SEQ ID NO: 391667 - DNA, 3122 bp, Homo sapiens
atctttactttgtgttgggagcattccagttcttctcttctaggtattttgaaatatacaataaattattactaacggtaaacaccctaccttaagttttcttctttaacatcttaatgtagtcaattatataaatatattctatttttaaacttgggtgagttaaaaacatatttgtctcaaaattctcttttgctgtctgaaatatccagattcatatctcgcgttgttgtctttgtgctaaccagcttctcagaaatattatttcacaacttcatggctttgcttagttggaggaattttggcacctggcttcttccttgctcagatccagagggcaggtagtgtttaagaaaacaggatttgcaattaggaagacctcagtttggattaggttcatccatttgatagttggtgaccgtggaccaagttacttctctgaatttcttttgcacagctataaatcaaggattataatccttcacaaaatcataagaatcaaagccaaataatgcatctaaaggtccagcccagggcttagcacactggtataacacaaactagctgttgttattataagtgtaaatcctgtggtatgcccctttatgacctgcagatgacattttccacttctactattgatcataggtaccttcatggttaagaacatgcattttttgtcattgcaattttattcccaaatctattcatgtattcagcagtgaaccgaatacccgttatatgccagataccttgctaggctgggctgtgggtgatacctgttccacaagacaaatgtgggctcaaagagacatgctctctgcccttgtaaagcttgcagggaagataggcaattgagtatttggtagataggaagtgttctgggaggcctctcatatagtatgtgagagctctcatataggggataaaggaagtcacacctcacaccaagacctgaagccacacacctggtgtagaaagggcggagagtcttctaggtggatggaatagcatgtggggaagagtttgtggtatttgaggagtagggaggagaccaggctgtccagagcagggcatagaagatgaattggaggctggacaggtataattatagggagactagcttgcaggtgtttatggagttaagatgagaaacaatggtggcctagaggagtagcagtagcaatgtagcaaagtggatagattctaaagatatttagcaggtagaattaatgcgtgatgtaaagaatgagagagagtcactcacaggctttattgagcaggtgggtagccacaagtttgaataagtgggtagatgagaagggaaacattggaggggaggagagggctggaggagtgttagatgctactgaggagataagcaaaataaagtctgaaaactgatcattaggcttagtaacctggaagtcactaatgaccccagaaagcaatttcctggcttccttcctaggagccagactgcaatggattgaagagggagcagaaggtgaggaaacagagtggtaactcagtcaagaggtttgggtgagaggggaggagacagagagggtgacaattggacaggggcaagagtccaaggaggcatttgggtgctctttttttttttttttgtctacttctgctttttattgtgagaagtttgggcttatggaaaggctaacaggatggcaccagtaaagaaagagacactgtgaacactggagagacacagtgatgtatagctaggtccttgggaagcaggtcacagagcacagctgaaaaattggaggacataatctccaatgtaattgaagaaaagaattgttggcttggggtgatttcttgctttgttttgtttggtggcaggaaattgaggctcttctctgaagttgcttctgtttttcccatgaggtgatagtaaaatcatcccccaagagtaaggaggcacatcggagagtcagacatttgaggatgggggagaatggagagctcattgataaataagacaatagaggtttgctgagcagggttgttgaactgctcataatcatgaacttggagtgatgctagtctctgtggttgtggtttactccagtattacctagcagaccaggggtagtcatgaagatggctgagccagggttggggtattgccaagttgatgtgatgaaaagacagtgtagcaaggagatgtagaatattggcaggagacttaatgaccagtttgagtgtctgttacgtcccttataaaaaaactatgggcatattgtagttggtgctggttagatttatttatttatttatttttaatttttttttaacccctggaagaaaagtgtcattacactggaggaatgcaatttggcaatgacctaagacagcgtttggtccctagaacagcagcattagcatcactagggaaattagaaagacagattctcagcttccaccctagatccactgaaccaaagactcgggctggggcccaacaatctgtgctttaacaagcacataaggtgattcagattagtgctaatatttctgaataattaatctaagagaaaagcctatgaatggtcaaaaagttggacattaacagtaatattaatgaaaataaatgtgagttctttaacattgggagcttgtctgtcttgtgtagcattcccaacactccgaacatctgggtcataagaggggcaaaacgtatgtggaatgaaggactgaatgagtttataaaatagtacaaagatgaaggagagctgggaggagcttccatataataatctacagtttacttgaaagctcattaaatctacctgtaccctaaaaaaaaaaaaaaaaaaaaagcaaaccatacctactacaaaagctagccaggtagatattttctggtctcattaatgtcttttgcaataagagcttttgttatgtctaaaagcttacacacactaaaaaaaaaaaaaagaaaacaaaagaaaagaaaaaaaaccaacctcaggccagacatggcatggtggctcacgcctgtaatcccaacaatttgggaggccaaggtgggaagatcagttgaggccaggagttgaagaccaacctgggcagcatagcaaggccctatctctgta

SEQ ID NO: 391668 - DNA, 246 bp, Homo sapiens
agtatttcttagtgttatacatcttttgctgggtatcagaggcttggtcctattttccctattccacattaaattttgttagagtaacagtagttcatttttggtgcagctttctcaagtgtcaagtacagttcttaagtactagctattctaaagctgacctgattgcttttcagtgttttgaccctgcagagacctaggtcaggtttagtagcttgtgaatcagataggagatggctcctgtta

SEQ ID NO: 391669 - DNA, 1080 bp, Homo sapiens
ggcgggcgggcgggcgggcgggcgaagctgggctcggggccaagcgaggtctagccggagcgactgtgccccgcctcctgggcggagcgggcggctccccatggtcagagcctcgtgccggctcggcagcgcccggacgccgagcccagcgcgtcggccccccggcgtgcgggcgtctcagagccgcggaggggccgccgggaccgtttcagcgtggcggcgctggtgctggcgttggccctggaggacggccccgagtgatggctggcgcctgcctcccgggtgtctcccgggtacagatggagtcgtcccgcggccgccggcggcaaggtcggcagctgcgaggccaagagagaccccaggacacacacagctgcctcccggtgcgagaagaagaccccggcttgagagtgagatggcgtttaatgattgcttcagtttgaactaccctggcaacccctgcccaggggacttgatcgaagtgttccgtcctggctatcagcactgggccctgtacttgggtgatggttacgttatcaacatagcacctgtagatggcattcctgcgtcctttacaagcgccaagtctgtattcagcagtaaggccctggtgaaaatgcagctcttgaaggatgttgtgggaaatgacacatacagaataaacaataaatacgatgaaacgtacccccctctccctgtggaagaaatcataaagcggtcagagtttgtaattggacaggaggtggcctataacttacttgtcaacaactgtgaacattttgtgacattgcttcgctatggagaaggagtttcagagcaggccaaccgagcgataagtaccgttgagtttgtgacagctgctgttggtgtcttctcattcctgggcttgtttccaaaaggacaaagagcaaaatactattaacaatttaccaaagagatattgatattgaaggaatttgggaggaggaaaagaaacctggggtgaatacttattttcagtgcatcattactgttccagattcctatgatggatggcagactctttaataaattgcttactgatattatcttaaaattgag

SEQ ID NO: 391670 - DNA, 239 bp, Homo sapiens
gtgatagaggttgaggccaagaagttaacgggaatcagattattagggccttatagccttaattattgtgaagtatttactcagagacaggaaactattagaaggttttgagcagaggaatgctgttacgtaatttagattcttttttttttttcttttttagggatgggatcttgctgtgttacccaggctggcatgcaatggagtgatcatagctcacggcagcctcaaacttccgg

SEQ ID NO: 391671 - DNA, 531 bp, Homo sapiens
ctactgtgctaattgcacctaaaatgcctgcacacatttctccaaatttaaaattctaattacgggttgacatctttaaacatcttggtgatataccctggagggggtggaaaatctgtgctgattttccctactgcatctgtaggtgaaaggatttgctggcatcccaaatccatggaacttaataaggacagaaaggtacttagtgctttcctggccctaacaccctacttatttaggagatgagaactcaagtggctattccaactctctctaggagccatccccaacttcctttcctatagcctagtctggatcagtggtttgtgttactcatctgtgcctggcacacagtaggacctcaaacaagtttgctgaatgatgagttatttgaggttacacacataggtagtgtcaaaactgtcctgactcctgatccaagactctaaacttctataaactgcccagactttggagtcaaaaagattctacttagagtcctagctctggcacttacaagatgtgttttta

SEQ ID NO: 391672 - DNA, 354 bp, Homo sapiens
acatggagaaaccccatctctactaaaaatacaaaattagccaggcatagtggcgcatggctgtagtcccagctactcgggaggctgaggcaggagaatcacttgaacccaggaggcggaggttacagtgagccaaggtcgtgccattgtactccagcctgggcaacaagagtgaaactccgtctcaaaaaaaaaaaaaaacagaggcatgatgacccaagagtacagcatggagatactcaagcaaaagtaaaaaggaaagcaaactgcagattaaggaagtatcttctgcttgtttgctaagagttttagtcacagatcaatgttgaattttatctaattttttaaaatttt

SEQ ID NO: 391673 - DNA, 716 bp, Homo sapiens
agcggaccagaagcagaggctggcaccatgttctgttatgcacgcctgcagaaccagaaatcatgggaaaaactgcccatttctgttttgtccactttgctttgggaagtgagagctatagtcattatcaccacatcccctggcatccaattccacattctacctcagaagattattctggaggaatccaaggcacgttagatattttaccaatgtctctggtgattcttatatcggtaggcccatgggtgttgacctatgaaactgctctgctagcagactattgagaaactagggagttcaggattactaattcaattccatgctttcctggaagccagaagtcaacaatatacattgggatttctataaatatttcttagttatgaccatcgaactccaagtacttcagattaggaacgtcggactgcttaccttgactcctcagacctgcatgatggcctattgtgggaccttgtgattatgtagtgagacgagcatgagtggagcaggagacggctgtcccccaccacaaggaatatcagatgatggttcagcgatcgtcacattgcctctactgaaagtgatagacatcggcagctggcaccagggagcaggcttatatcctgatggcccacaccgtgttgcactaagatgtgaatcgaatgccgattcccaggcagaaacaagttcctggtgcatgtgcggtaggagac

SEQ ID NO: 391674 - DNA, 262 bp, Homo sapiens
caaagacagaaagtagaaaagcatttactgaggctattcattgcaagaataaaggttattcgttccaagaaataagatgtttaacctgaatttaaactttgtacagcagggattccataagaaaacggaaaaatgaaaacccaaaagaattgcccagctaagcccagttaacccacagtcccatgagaaataataataacttgttgttggccgggcgcggtggctcacgcctgtaatcccagcactttgggaggccgaggcg

SEQ ID NO: 391675 - DNA, 422 bp, Homo sapiens
ctggctttgttttactccacttcactttgtttctaatgtgtaaattttcagatgcttttctgctagaaaattcctcttggtgaatatgatgtgcctatcctcacataattccacaagtggcatgcagaaaaacagggtgagtcccacaagaaccatccaaagctcttgccttcactctgtgtttgctgaacacccactctgtgccaagtaatgtgctggatggcaaggattcatggttgacattgaaagacaaggttcatatgtatatatgtgccatgctggtgtgctgcacccattaactcgtcatttagcattaggtatatctcctaatgttatccctcccctctccccccatatttaactaacctgcacattgtgcacatgtaccctaaaacttaaagtataataataattaaaaaaaa

SEQ ID NO: 391676 - DNA, 335 bp, Homo sapiens
aaaatatcctttaggaatgaaggcaaaattcagacattctcagatgaggaaacactaagagtgtccatcagcaacagacctgcccgaaaataatgtataaaggacgttgtctagacagaaagaatgtcaaagagaaggtttaaaagaaggaatcttgggacatcaggaagaaagaaagaatatggtaagcaaaaaatagaaataaataaaatacttttcttcaccacttcaggtttttaatgtttctttgatggtgaagcaaaaattataacattgtttcatcttggttctaaatggatctagaggaaatatttaagataactgtattttaaatg

SEQ ID NO: 391677 - DNA, 666 bp, Homo sapiens
ggtaccccagccggtggggagagggaatataggaggggatagttgaggccaagaggattggctccaaggaatccctggaatcagctactttgtcctctgggggtcttctacctgtaaacctcaggcgtcttggaaactagaggagagtaaagacttgagctgtggctccagctgagggacacattccacaggtgctgaagagcacgtgatcatcatctatgcctgcttagttagggctgctgttagcacctggattttacagatgaggaaactgagactcaagagggcttgtgaatttcagaaattcacacatgtcagtggcagatcagaaagaagcccatttccggcctccatgtttacctagatctaggcaaagaaccttgctttagtctctaacaaatttacctcagaagagagactcatttgttcagtttattcaaggtttggatagtagatatgaagagaaatattgaaggggaagggaattctcagcttagcatacaggggttaggaagctaaattcagcccagggtgatagaagtcacgcttgcaactgggtggtgcagcaaggctggggatgcagcaccgtggacagtggcaagtctcttagctcctccgagtccgctggctgtcccagctaggaagcaaggacaccaggtccccccc

SEQ ID NO: 391678 - DNA, 260 bp, Homo sapiens
gttagagaatttgagcaggagagtaatatgaactatttggatagaaagtgcttggttcacttttgggagaatggatttaaagtatgtgggaatcagcaggccaaggtaggagacagggtagttcaagagagagacgatgagagcttggagtacggtgaaggcaatgaatgtggagagtagacgatttgtgattcattttgactaaagtccaccatgtttgccaaaggtttggatatgggaaattaagaaaggggcttagg

SEQ ID NO: 391679 - DNA, 637 bp, Homo sapiens
atgtctaaaggatgcacgtgtctaaaccacttcccacctttggtgctggttttgacaggctttctgacatcccagagatccacgtaagaaatttagagagaaaaatgttcatcctcatagcatttattgaacttaacatggctttatgtactctggtaagtgaattgcaaatttagaatgctgggctcattctcatttcttcttaatcaccatgagtcattccttcactaacattgaaaggcctatcaggttagatatctatatacacacagagcgtgattgtcagagaaatacttgcactgcatttctaggccacataatctttagcctaacatttgcatattaatgcataattgtaaaacattatgtaaattatacatggtggtgaatatattatcaaatcaaatggcctttaggggtaattacaggatgctgctatgtcaactaggatgctgcaggttgaatgctgaacacttctcataggatgaaatataacccagccagggtttatctgtgtccaaagtcacgagttgcctttcagtgtgaccctccatttttgttaaatgaagcacatttggggtcacagaatattaggaatgaaaaggataaaatcctgaatgaaaaatattaaaatgtg

SEQ ID NO: 391680 - DNA, 215 bp, Homo sapiens
ctttgccacatatgccgcttgtctctccaagtataccgtaagacccttgaaggcagagatcccatcaattacctcttttagtcccaaaatgatggcacatgtaattagctctcaaatatttgttaaattatttcatttaaaagattgagggggtggccagacgtggtggctcacgcctataatcccagcactctgggaagccgatgggggtgggg

SEQ ID NO: 391681 - DNA, 438 bp, Homo sapiens
aaaaaaaagaaggatgctattctgtgatttgaagcttgagatgtttaaggaaaggaaatctaataagtggacacctttaaaaaatgaaatgtaggccaggtgcagtggctgatgcctgtaatccgagcattttggaaaactgagccaggcagattgcttgagcccaggagttcaagaccaacctggacaatatggggaaaccccattgtattagtctattctcacgctgctaataaagacatacccaagactgggtaatttataaagaagagaggtttaattgactcagagttccacgtagctagggaggcctcacaatcatggcagaaggtgaatgaggagcagagttacatcttacatggcagcaggcaagagagcttgtgcaggggaattcccatttataaaaccatcagatctcctgagacttattcactacca

SEQ ID NO: 391682 - DNA, 601 bp, Homo sapiens
tgtaggatttagttaggtggaggacgaaggtagcacatcgcaggggccaggactgagcatcctggttagataattaagtctttctgtggttcgttgaggcacagaggaaaccagcattcctgcagtcgggtgaatggtcagcaggggaaggggagagtggtaagtgtgcagggaatagagggtgagaccagactgcaggagaactcaaagacaaccatgattgctgggtgtcagctgccatcaatcaagttgttgctattctcatctacctataagtaaaccaccagaataaaaggtagttacccaaattcccttcttgaggagggctgcttgatctgtgggctgggtagaaattccgaaccagagatcaaagagctgcctgcagctgttgcagtcctagcacctttggattctttgatcctcaatgtgctgaaccacctgctctgaaataactgctcccaccagggaccctgtgcctccctcacctactaatcaaaccaggccaaatgtaagcacaatccacctatggctcactttccccctcaggttaccttaactgcagatcttggctcacactgcttgagtacttactccgtacaca

SEQ ID NO: 391683 - DNA, 588 bp, Homo sapiens
ttcttccttaatatgtaataatgtaatatgttaaagagaatggaaaggttaattttactgtgagttatgggccaactatgtaccaaacataatactatattagtgccttgacctgtggggcaaagcacaggatctatcacagtgtctggcacataacacagtacgtattcataggtcaatgaatgagcatcccactagattccaagcttcatgagaacaagaagtctgatctgtctacagtctactgcagtcacttaagagcctggcactgtgcccagcatgtagtaaccagtaaatatgttaaggatttatgctttgaaacctaaaattataatatattttgtttctcaagttgagcatatacattacaggatactcttggagcaaaacattgatgacatattttgccatgttagagtagttccaagccatccagcctttacctaaatactcaggaatacttaaataactggcaatgctgcagaaccattatagctgtattttagtatcaaagtataataagcaagtaaagtagacagtgtctattcttaaaatagaaatccataggtgcctttaactgaaaattaa

SEQ ID NO: 391684 - DNA, 846 bp, Homo sapiens
ctgagcctctactttccctccaaaataactgcctccgctgtgacctttgatcaccagggaaatgtgattgttgcagatacatctggtccagctatcctttgcttaggaaaacctgaggagtttccagtaccgaagcccatggtcactcatggtctttcgcatcctgtggctcttaccttcaccaaggagaattctcttcttgtgctggacacagcatctcattctataaaagtctataaagttgactgggggtgatgggctggggtgggtccctggaatcagaagcactagtgctgccattaatgaattgtttaaccctggataagtcacttaaactcatctatccaggcagggataattaaaaccatctggcagacttacaaagcttgggacagttattggagattaatctaccatttattgaatgcatactctgtgcaaggaaatttgcaaatattagcttatttaatctgtactatccagtgaggtaatttcttcccccccaagatagagtcaagctctgtcacccaggctggagtgcagaagcatgatcacagctcactacagtttcaacgtcccccgctcaggtggtccttccacctcagcctcccaagtagctgggaccacaagtgtgcattaccacactcagctaatttttgtattttggcagagatggggtttcaccatgttgcccaggctggtctcaaactcctgagttcaagcaatccaccttcctcggcctcccaaagtactaggagtacaggcatagccacttgctcagccataatttttattattaatctcattgtacaagtgagaaaactgagacccagagagcttaagtga

SEQ ID NO: 391685 - DNA, 378 bp, Homo sapiens
tcttccattttctagacagggtaccagaggccctgaaaaatcaaaggacgtgcccaacgtctcatgactagggttactgtggcagagtataaactggaactcaggtctcttgatatgagacctagtgcttattcctttacattcattctttttaacaacaaggtatttatagttccaaacactataaacaatgacagaggaaaaaagaaacagaaagaaaggaagaaagcgggaaaggaggaagggagaaaaaagaaattttagcaacattttaatataaaagaatgttgaaaaacgggggtagagggtgtgagcagaaaagaaaaagtattagaaaaaaagctcaaccttttgtttcggagattaatttttaaacaa

SEQ ID NO: 391686 - DNA, 371 bp, Homo sapiens
agaggaccccagctcagggcatctggtattcgtgatagacgaatattcaggagacacaagtgcttcttcagaccaaacatctcacaggcagctgaactacacaggctcactaagggtgattacttagcaaaacctgtacttaaaaaaagaaaaaaatcaaaacagttatcaatgaattctttccacatggtttcttagagctggggaaaagaaaatcttcacaaaacactgtccaccttataatgattttgagaacaataagaaaaattggacctaaaacaatacccctcctgctttgagggggcctcttgtcttctgcatggattgctatagttgatggaaactgacaggtgtattgtttctgagagcta

SEQ ID NO: 391687 - DNA, 884 bp, Homo sapiens
ggttttttctcccacctgctagtattatgaatatcattttatttaccaaacttctctttttcagaatttattctcctccatttagatttgggaagtagttagttcagcacagttttgatcacctgccaaggcctaagcattctactaaatggtacatgtggaggatgtcacagtttggcctgaagaactttaagcctatttgatgaggaacccattcccaggaggcagttagagaatagtataaaaggacatcatcacaaggcagcaggtcatgaggacagccagcactctataagtgttgggaggaagacagtggtatgcccttacataattagaaagggcttcttcaggaaggcagggcaggaatgattccattgccagttgggtgttagtgtttcagccgtgtctgtgctttctgaaacttttatgatcctattattattgtctttgatagtttgtctgtgtttaccagaatgctggtttcaataatgttagacttcagagttgtttccttaatattaacagcctcatattctaccccttgaagtggtcattagggctagtgatacctgccctattaaagtgaagtgaggctaagagacttgctttgactcataaaatgtgagtagctcacttccaggaggaagcattcaaagtaccagtgccagctttggtgcagatcttattttctctggccccctagactagcagggttcaagataatggccattttgtcaccctgtgtcccagaatgattatgatgagtgattaccctgatcatccctgccaatccaggatgaacacatagtatgagaaggatataaacctttgtggaagtcctagtaagagaaattaagcaagagaaagaaataaaaggcatccaa

SEQ ID NO: 391688 - DNA, 714 bp, Homo sapiens
tccaaaatggttcgagttcacagaaattccttctatccctaaactcctgtttgttaccaccacctaggcaaacgttttttctcccctaattgtttgcatgggtgtccaaccttttggcttccctgggccacattggaagaagaattgtcttgggccatacataaaatacactaacactaacgatagctgaagcgctgaaagaaaggtttgtgcataattttcctgatatctgccactacagataagcaaaaaaatccgtgcgttccacggtttggacacgggtggtttagggctatatttttggttccttaagaacagggaacaagcctgacactgtcattccactctttcatttttcccatgggccctcttacctaaagactgaagtgggaacactttagcagagcatatgggcattgtcttgatcacattcctgccttcccagccagcctgtctcctgccatcctcctcctgcttcccacgcttcagccagagcaactctgtctggttccccaggcatttcctgttcactcataccctttacttactgtttcttctcgtgggattcctgcttttagtctctttctctacctggccaactcacagtccttgagactcagtcctgctcatctccatctttagaggcttttccagatccctccaggctgtgcacaccttgaccagaactcataccttactccacgctgcatatta

SEQ ID NO: 391689 - DNA, 1539 bp, Homo sapiens
tctcctgcactcagtacaatgcttggctcaaaggtgtggtagttctccttgattgtcattgctgctttcagacctttttcctccatagaccactccaacttttaatctcatgacatcagagtatcccttgtttaatcacttttgtggttaaaagagacctttgggtcagtctgcctcattccttgaagagtttagccctggctcacttttcactctatttcttctcctgtctcaagaaagaagaaaaaaagagacaaattacccagaaacccctcccttccccacatggaggccttggcaaatgttaattttcctagaaaatccttcagacctgaagacgcaggaaaagaatctggctctcagggtggcttctgcgtccccgccgccaggccccagactatggtcacagggccgtcctgttcctccccgggactccagaatttctctcctcaaaggaaagaaaacagggcatgcgcttgttggcaaaacgcagggccggctcccaaaaaccccatgtgtgtacgattaaaagttggccgtccccaggcctcccagcgcaaacttaaagagacagggctttgctgaaaaccaaacatgggccagctgggctttttaacaacctagagactttccggagctgcctggaacagagcctgcgggaaacggggcttgccagagacactcacagtttccttcatggcctgttttggtcccctaagaatctccacatcattgtctttcttgtgccttttccttggtgagcaacagaaagggaagggttccaagcctctaaaaatgtgctttgtgatcaggagtgcgctccaaaccaaatacgcgcgctgccctttcgaggccagtgagctcagcctccaaggctttaaagccacatttcagcaagagaaagcgctgagagctcgcaggttcattaaagaaggcaaagcactggtttctctccttagaaaagtaggtttcttggcttgatgtagactggcttgctttgatttttagtgaagggaatgtacgtaaaacaaaatagggcttggctggtcaaaggagacaagcaggatggatggatggatggatggatggatgtatggatgaatagatagatggtgtttgcatgtaaattgcagagaaaacaaaaccaaagctgattggaaacaattaattgtgggtgtctgagggggaaggtcgcagctttgggcagctttgagaagcggtacaagagttctgtgcctgtgtgtccagccctggagccagccagtgcatttattttaagctcttagaagcaactccttggcccaggaatgcgtgacccctgagatgggtccacgcatctctctacacttccttctctccgtgggatactggactcgtgcctctgcgcccattctcttctcacgcatatccatgagctttaatttcactttctgatcacggtacgtccataaagccagtattacacttaaatgaagtattcttttttgtaatcgttttttttagaaggtaaacaaatttaataaagctaccaataatgag

SEQ ID NO: 391690 - DNA, 251 bp, Homo sapiens
acagctctccctgaaagaggcagtataggtctccttggtgcagacaaaggtactgatggcacagaagtgaagaaacttccagtgaaacacaagccccaatctatgtgactgggctccttgctcttccctgggccttcctccacctcccagctcctggcagggacgctggaccacacatcatttggtagaatgtccccgtgactgggcatgagccagcagtttactaagcctaaatccatatatcttcattt

SEQ ID NO: 391691 - DNA, 571 bp, Homo sapiens
taattaattataaaacaaagatgaaaaacagtatattactcaaagcaggattagaacttcctcagaggaagtccaaaactgaaggagccctcagaagtatttaacctggggctgggtcaagaagggcttcctggagaagggaatagctaactgaagatttgcaggttcactcagatattatcaggtgaaaggagccaggctgaggacgcggcatattagaaggcatggaaataagagagaatagggctattatgttagaggaaaaatgagtttggtgtagctaaaatataaaatgcaagtaagtccaataggcctgataggtagcagtcactctggctgagggtagaggaagaattgaaggaaagaagaccagaagggagactagagggaggtcacccaaaatattctttcagtaactgcaccagaccaaaagcagagagaccaccagatgaaggaggtaattttgaagcacaatccgaacagccatggattcagaaagtggtctcaaaggaaaattccaggattcagggaggtgggaggagagcttaactggaaaattgaggtggcattc

SEQ ID NO: 391692 - DNA, 695 bp, Homo sapiens
cagcatactttgtggtatgttatcagctgaaaccagaagtctttttgaaaaatgtcattgttgcatggggctttaatactgaaatcctaggaggtggcctttcttaggtcataattttttaaattgctgtaatgcatgtttaaagaacgacagtacacacgagaagacaaaaagtggcctgaagctttgggtggaagtcaggtagatttgattcagcaagtaatagaagtcaacatttaatgaacacttgctttgtgccaagcacactgttgtaagcactttaaatatattaagttatttaggtctcacaactttgtatgatagtttattatttccatttcacagataaatgagcttgggcacagagaggtaaactgatgtcctcaaggtcaacagctactaggtggaggagttgaaatttgaatccgggccatacaccattgttaatcgagcatttgtgttaactaccaagtacttactgggccctggggatggctctggagcagtggataagtcagatagctccgatccttgcttgccaagccataccatcattctcagcttcagtttccccaaccgtaaaaccagcacccaaaccctgccctgcgcacctgctaagatttgtttgttaggatcagttgcattaatgcaggaaaatgtgatgttcgtgcatggcagaaggctgggttgatcaa

SEQ ID NO: 391693 - DNA, 490 bp, Homo sapiens
tccctgttgcccccacccccaccaaggtcttagattggcagcagagggcacttgtctcccactgatggtagatacacctgcatctttgttccagttggccaggcagtgggatagtgtggctgaagcctagtattctcactttcctaggcactcagtttctgagaagacatacttcctgaaagtccacacagcttacttacccccaggcagctgttagtagcagtttgttttcagcccaatttcggcctcagtcccttatcttaggtgggccacttttattcctgtttctataggatctgaaacctaggccttcactggttccttctgaaaccagagcctagcagccctataccttctgcccactctctgttacatatttctgtttcatggtgatgctggtcttttttagttaggtaggtctttaaaatgtcttctccaggattttgcctgttgttgctttgtatttgaaacagggtgggttttcaaagca

SEQ ID NO: 391694 - DNA, 535 bp, Homo sapiens
tgacagccacagggtctgcctgagaagcgaccaagagcagagacagacagggaaagtgaagcctattcctggctgcgctttccaagttccagtaaagaggttatgtgactttattcatggacttggtattttaaaatattaacgaagttccacaaacacatgtacctcccagccctcaatgatgttaaaccccagagttccccctagtttaacagctagtaaatcaagttttaaatttaaggaaaatgaagtagcagaaatttaatactgttgatcttataattatgttttattttctatctttaaaaggcattattttgaactttcaccttctgatttaaattgtttcaaaggatacaacgaaactgtagctgtttatcagatagaagaaatggtttaaggtgagaggggaagtaaaatttatcagggatttaagtaaatcaagggaatggataatgagtgtttttccccttatatcgttaaccgggagttactcccagaataataagcaatgttgaatgtacactctaaccta

SEQ ID NO: 391695 - DNA, 293 bp, Homo sapiens
gtgtgcacgtgtgtgtatctgtgggtgtatgcacattcgattgtgtgggtgtgtgctatctgtgggggtagttgtgcacattcgattgggtgtacacgtgtcaacgtgcatgtgtcagtgtgcacatgtacacgtgtgtatgcacttctgcatcgtgcatgtgtgtgagcgtgcatgtgtgcacatgggtttaaagcagtggtcaagtaccggcatgcgcgaagcacccctggggctactcaatggccatcaatggggtcctcaggcttcagagtgctttaggagcgtagact

SEQ ID NO: 391696 - DNA, 829 bp, Homo sapiens
caagctttaataaatacctcattttatgtaaaatatttattttacttaataacttgctgtttcatttttttattaaaaaagctttagaataatgttgtattgaatatctgaagagattattatttcagaaaagctgctaaaatgacatggagagttcctatatgtaggcatgcctcatctgatggcactgtgctttactgtgcttcacagatactgtgtttcttacacattgaaggtttgagttgagcatatctacccgtgccattttaacagcagcttgtatttacttcatgtctctgtcctattttggtaattctcataatatctcaaattttttcattattattatattattatggcggtgtgcaatcagtaatccttggtgatactattgtaattgttttggagcaccatgagccacacccacataggataacaaacttatttggtaaatattgtattccctgagacaaaacaatattgaaattaggctagttagtaaccctacagtgacctctaagtgttcaagtaaaaggaagagtcacatctctcactttaaatcaaaagctagaaatgatttaaggttagtaagaaaagatgttgaaagccaagacaggctaaaagctaggcctcttgtaccaaacagttagccaagttgtaaatgcaaaagaaaagttcttgaaggaagctaagagtgctactccagtgaacgcacaaatgataagaaagtgaaatagctttattgctgatctgaagacagcttgaatggtctgaataagatcaaaccaaccacacaacattcccttaagccaaagcctaatccagagta

SEQ ID NO: 391697 - DNA, 764 bp, Homo sapiens
ccatgttttttactttagctttaaaaactttttttattttatttttcagtagctacaaggttgtctttaaatattctttatagtaactaacaccctgtaggcatgaccagtaatagaaataatttcctcttttccttggctccactgatgcccactgcctcttctttgtgatcagttaaatgtacactttagatgattctaagctttgtaactgtactctccttaagttttaaatcccattactgaaaagcgtatacagtttggctatcaacaacatgtgtttgtcctgtggaaatttttttcaataaatatattggtaaattttttggagattttctgcagtttgaaaaaacttgaactatgtaccctagaaatatttaaaaacattaaaaaggtatgtcatgaatgcttaaaatatttgtagatgctagcctgttttatcatttaccaacatgaaatgtacacaaaatgtgtgtgtacagactgtacacggcactatttgcagtcaagagaagtgcaaacataaaggtgcagtgttaaatcataactgcatggaattaactgtagtatatgccatactgctgtaataactttgtagctacctcctgttgcttttgcagtgagctcaagtgttggaagtatccctgtgatgccctgtaactggccaggtgtggtcactcatgccagtaatcccagctctttgggaggctgaggtgggtggattgcttgagccaaggagttggagaccagcctgggcaacacgg

SEQ ID NO: 391698 - DNA, 211 bp, Homo sapiens
gaccccatgtctgctggtcctcgcaggtgctcagtaaatgaggaccctggagagcgcggccttcatgttcccacgtgggatttgaacacagtttctgaggcgagcgtagtggtgggtggtactgggcatagacttggggcctgatggtctgtgtgtgaactgtttctgtactcctccagcctttcccttctccccttccccacggagagac

SEQ ID NO: 391699 - DNA, 794 bp, Homo sapiens
caggaatatttttgggaaatgccatgactcctttcttgttctcattaatggtgaattgggaaacatgagttttgggggaagagaaggaatccctttatgaagtaatgcaaatttaagataagttttagggagtactaaggtacttttcacctctctctaggatctcatacatttagtgatacatatacatgcaagaatccaaatgagtttctcaaatgtcactgaaaatgcccagtgtgtttgcattgtgtagctgagactgagcagttgtgaccttccccaggaaggtccatggaagtgatgaatgtgaagggtgcattgcgcggggctgcacagccagctgttttgctgttactgtcttcacagtctctcttgtagtgcagctagttccagttttcttctatgtagttgttttaatgattcttttacataagccaaacagtcctttttacaggtccacatagttcccttactttcctgtcttcgtgcctttcttagtccctcagctttgagttcttctccttttgtgtatgtcaatattaatctattttgaggctgggcacggtggcttattcctgtaatccttgcactttgggaggccgaggcaggtggattgtttgagctcaggagctcgagactagccttggcaatatggtgaaaccccgtccctactaaaaatacgaacattagctcggtgcagtggtgcgcgcctgtagtcccagctactcaggaggctgaggcaggaggatcacttgagcttgagaggcagaggttgccgtgagcttagattatgc

SEQ ID NO: 391700 - DNA, 911 bp, Homo sapiens
catttaatactttccatggccctatgaactaggtactgttattttcttctttttacaaactgaggtaaatttagtgttgtcatgtgcagtttgcacccttaactcccaacactcacttctgctgggtacatgacatattgaatgaatactatgtttgtaagagagagagaatatgcatgaatgaatgagagagagcatacccaaacagggaagcaaactgatggatttggctgtagtcaaattgttgttgccaaggctgtactttcgtggcaactacaacactgaatcacgagaatttgcctcaaatctcccttctcttacagaacacttagaataaaaaacaacagctgcttatactgactttcttctttaacgacactcgcacatacctctgacttacttcactcccgcataagacacatactagagctatactctcgacaacttcccggacagctactctcccctttcctcatttgccaaaaccactccacagctccattcctctagttcacctttatttcacctttaacattggtataccagtcacctttccacctggcgcccattcattacatgctgaagaatactccctaacaacatccaactgcaacctcccgtaaccaatcttcctggtccataaatcaccaacaacccccattttcattacaaaaaaccctggctacttttccacttatttcctccactcggctctacattaggtccaagggctaaccattgctcctggccacttactccactggtaaacctacaaacagccctaacactctcccctcactacccctaccctcgcccctggggcccacaccagggctaagcctcctctcacacggccccgcccagatcaatcctcccagcgcataataccactcggcactcctcgcacaagc

SEQ ID NO: 391701 - DNA, 380 bp, Homo sapiens
ctaagacttagggctgtctaatcttttggcttccctgggccacattcaaagaagaattgttttgggccacacataaaatacattaaccctaacaatagctgatgaacttttaaaaaattgcaaaaaaaaatatcatgttttaagactgtttatgaatttgttttgggctgtattcaaaaccgtcctgggccacatgcagcccatgggccacgggttggaaaagcttggtctacgtactccttgtaatttagtaaattataaaagcagcatttcagacaggcgcggtggctcacgcctgtaatcccagcactctgggaggctaaggtgggcagataacgaggtcaagagatcaagaccatcctggccaacaaggtgaaacc

SEQ ID NO: 391702 - DNA, 549 bp, Homo sapiens
aagggacacattccccttggaaaataagatcgtgtttctagtcttttgggctgaagaattattccaagcatacgcttttttcatctttctgaaatgccaggtgttctgagaagtaggtatttacatctcgtggaaagacaagaatttgtctctccagctggattagcggaactgaccagccagttattttggcaaatcagcatccacatcaaggtgactcttctctgagagaaactgatgaagtgttcaaatcagctagaaaggtctgatgttccatgatcactataatatatagatcccatagcagaaaaagaagctatatagttgagtgaaatattcgaatactttgcagagacagatgagttatgcttttttaggctttaaaaacctgttttcttaggaagctgccttggaaagacacagctagatgttaccttcctatcagccgagtgaatgtccaaaactcactggagggaagaggcagggctgggtagaacagagtttgacagaaaataacggatgggtcactggaatatgtgcatttaaaac

SEQ ID NO: 391703 - DNA, 308 bp, Homo sapiens
agaaaacatgagacccctggatcagagacaaagactttattactcatggcacagcaagcagcgtaggcatcagtgttcatcagttcctatttctctcagctcccatggggacagcatgtgggtctacatggatgctattcatgcagtgcatgggcatagccactgaggaacactgagcctggataatccattgcttttatagtcagcagtaagcaaccctactgttcgtgctcttatctcaactctcaaggttatcagctgcataaataaccctgggaaatgagtagttagaatcttgcattctaggc

SEQ ID NO: 391704 - DNA, 137 bp, Homo sapiens
tgtgggactcaagagatggcccgaagggataagggggaagataatttaacctgagaaatgggatgagtaccgtgcagggttcttgagctcagtctaggagtaggaagcagtctccatgtaggtgggacacagcacat

SEQ ID NO: 391705 - DNA, 285 bp, Homo sapiens
gagacaggaggagagctgagagagagtggtgtactggaagccaagtgattcacatagccaggagagaggaaatgctgtcagtcaaggacgattaggactgagacttgatctgtgaatttggcactggcaaaacgcatccatggagtggtgagggtgcggcctgattagggtaggttcaagagaaaatgagaggggatagcaagtataaacaactcgttgggggagttttcttacaaaggggaacagagaagtggagtgtcagcctgagagagagatgagaaaaag

SEQ ID NO: 391706 - DNA, 389 bp, Homo sapiens
gggagaaaaaatactaatggaaaatctgagaaaatatcagcatcactaagataaaccaaaacctattttaacagaaaaaaatggtgcaatgtttcaagaagaactggaattatatattctgaatgatcctaagctgataagccactactgacttaggggataaacattttattacagcagtcaatttggaagttataaaattcctcctttgggagttatttggggggttagaatagggatgcagctagaaaaatcagtgaaatctccagaatgaacagcctggcactttagtatctcactgggcactcaggaaagctatactatagaaagcaggttaccatttatgatagttgtattttctgtgttatctagagaaaaacaggttcatc

SEQ ID NO: 391707 - DNA, 595 bp, Homo sapiens
attgaagactgtttgtggagacatggtttttgcatacttgaactcctgacctcaaatgatttgcctgcctcggtctcccaaagtggtgggattacaggcgtgagccaccacgcctagcctaattctttataattccaaaagatatttaactgaaacctttataattaaagacatcttaattgtacttaattaaatatgccaccaccttatcaccccaaaaaaaaaaaaaaaaaaaaaaaaaaaactgtgtgtgtgggggcgcccggggcccccggagagaaggcttttcagagaccccttgcggggggggcgcgcgggggccccggggaggtctaaggtggaacaggggccctaagagcggtgttccctcaagggaaacaccgcgggcccggagaacaaggggcgcggggtttccccccacctattaaaaaagcgccccgggggggcacacgcggggcgctttttgtggaacaatttccccgagtgggggtttcgcggagggtcccttacgcggggtattcttatccacgcggggggttcccaaaggggaatctccgcgtatttccaatttaacccccctcccgcgctgggtgga

SEQ ID NO: 391708 - DNA, 531 bp, Homo sapiens
tgagtaatgtagtgagcaccaacacctctgacaacatcatattatagtaggcaaaataatgcttctcatctctcttataatgtctttcactaggtagacataaaatacaatattgacagtataatctggaaaaagtcattctagaagagaccaaattaattcagtcttagtactgtattcacccatttgatggtttatctttaattgaataatatttggacttcctaaataaatgttgtgtgtttttcaggaaattctgtatgcatatttttattcaaaactggatttgggaaagattaggcagtggagactttgttgtgttcatttaaagtcaaataagatcaaagtgtatatacatatatatgcacacatggatcatcaactgagcctagagtaacattaaatcatcttggccatgcccagtggctcatgcctgtaatcccagcagtttgggaggcccagacaagtggaacacctgaggtcaggagttagagaccggcatgaccaacatggtgaaacctcatctctaat

SEQ ID NO: 391709 - DNA, 251 bp, Homo sapiens
tccgatacatacttggtgtgggagtggtttggcctgcctaggctagcacagggctctttggaactgatttcagactctgggcctggttcccagtaggagagaagggctgctgcctggaggaacctcatctaggtcccaaggtgaccccaggagagagacctgtgggtgggctcaggttcatttccactttactaatcaccacgaatctctgcccaaatccaacttccacttcttttccaataggacactta

SEQ ID NO: 391710 - DNA, 207 bp, Homo sapiens
ccccagacttgcgatcagaagaacctgatgtcaaatcagatgcatcttatagcaagtcgagccacctctctgaaacttgaatttaaatgatctaaggtcatttcctttggattttatagaaagaatagtgtcaggagaaaaagaaaaacaaggaaccatgacttgctaaacatactcagaaccaaaggttttctttctttcctttta

SEQ ID NO: 391711 - DNA, 804 bp, Homo sapiens
cactgcactccagcctgggaaacagagagacattttgtctcaataatattaataataacaataatattttgactaggtcttaaaaataatcatttcagaaattgacaactatttttaatgccaaatgtaaaaggtacatggaaataatgtcaaaattctttcccggtcttatttacaaaagcatgtaaggaatattttaggggggaagtttccaaagtgggagtgtgcacacattcacattgaaaggtttgtattaccaggcacataagaatgtggtgtagaaatagtgggcgagaataagacagaatgcttttggtattcacaactcaatcttggagggtgacactgtccctgcagtagctccaattaatccttcccttttcccacagcccctttctacatctgaccttattcctaattgctgtgactttccaattagaatggaactagttgagactcttgatttaaaagggaccattagatcatagtttctattcaaggaagtctagctagacaccacctttcattagaggaaaccctagtacaagtatcctaagaaacaacaaaaatctggaaaaaacaggaaagccagtcaagacacatatttccctttagagaatttgcattggttaatgcctttgcactgtggagatatgccctatgcagcctatagtctgtttctgtgtggactctgcagttgtgggacaattaaaataatagtcacaactgaggaatacaagagaagagttgcttgtctttttacagtcatggcattctgtaaagtgagaagtttggactagaata

SEQ ID NO: 391712 - DNA, 269 bp, Homo sapiens
cagatgcgtgccaccatgcccagctaatttttgtatttttagtagaaacggggtttcaccatgttggccagaatggtctcaatctcttgaccttgtgatctgcccacctcagccttccaaagtgctgggattacaggcgtgagctactgcgcccagctgattttccagtctttgtacaggacctggttttgtttttttgttttttccctctttgggagcttttgtgattagttcatccctggtattctgaaatttgatgatgatgtcat

SEQ ID NO: 391713 - DNA, 280 bp, Homo sapiens
tttttttgcttgttttatggggctagttaggtagcgcttagctgtaataatattctatgtgaatattggctgattaatgtgggccctaaatattactagatagaggggtgtccctagagcctaccaggaaagcatcttggtcttttagtgcatcaaatgaggaaaataaatgcaattgattaactctgcaatgaagagtagaaagataggaagactagtcaaaacaaaaaacaaataagaaaacaaaataaaactccaaactaacaaaacaaaaccccac

SEQ ID NO: 391714 - DNA, 773 bp, Homo sapiens
tctcggctcactgcaagctccgcctcccgggttcacgccattctcctgcctcagcctcccattaatttttaaaatgtactaattttattatactttatagtactttgttatgctttattagattgtataggacttggatttagttactaaatagaactgaaaagaatatttatataagaaaaaagttatattaccagcgatagcctgctttatattctgaaagttgcagcagtgtctttattgtatatccttttaaggcagcttcatcactgagaacttttttgggagtctggaagcgtactttatttggtttaggatttaaacatctaataaaaccaataaaagatctcccagatagctaataaaatatatttttcttttggttcattttcctcagccacagctctcttccattgtcaaaaaagaatgtataccctgtatttttaaacagaagtgactttagtagatttatggtattcaaaagatctgtcactttagtctaagtgtagaatatctggaccttagtttctccataatgtgaatcaaggacagtattgatcatgcagagattagagatttaaaagttttaaatatttcattttaaagtccaaattgatagtgtaattctcaatttctgccaaatataagtagaaaaaaagctttcaacagaaacctgtttttcagtcgtaaagctgaattctcctagtggcacatcagctaaatgtggtctgagtgatatctagtctgattcttaaaaaaaagtccagaaagaa

SEQ ID NO: 391715 - DNA, 746 bp, Homo sapiens
tggacacagtgtttgaagagactgataaagaaagtacaggaggagttttatttttggaagaagaaatggtccttgggcacagaccccatatgagttttcctttcagcgttctctgctcagctgttctctgctgtggtgaggcgcctatgctttgtatatgtctgaaattaattgaaaagctagtgacagattctgatgtcatttgccatgagctttattattgtgcaggtaattttggatcaaatcaccctaacgtttttcaacaaagactttagaagaaataaagctgcattactttttcttggcgcattcttcctttaggacctatagtgaggtaagtgacacaaatatctctcattctctgtttccaaacagtaaatagaatatacacatagttcacgaacaagattaaggaagtgataactcatcgttcctctaactgaaatgcaccctctgtttagatttatttacttttcacaattttgaaaattttcccatgcaatttttatcagtcataaggtaatgatagttttttaacaatgcaaatgggattaagtcagtcgttttttctgttccttttaatattattctaattcagcctcatgggcattccaaatagttatgagggatagaaatataacattaaattaagggatgagagtagagtgagaagagagtatggctcaaaattaatctcataaattttatttgtcaactgacgtgatttaacacgttagtggtagatt

SEQ ID NO: 391716 - DNA, 234 bp, Homo sapiens
ggatagttcatcgagacttactttatggtccagaatctggtctctgtctttgtgagtgttccatgcacacttgatagaacgtgtgttctgattttattgagtgttctgtaagtagtcagatcatgagagtatgtcctctgaccacatggaactaaattagaaaccaataacagaaagtaagccaggtgcagtggcacatgcagggagccccagctcctcaggaggctgagctgg

SEQ ID NO: 391717 - DNA, 437 bp, Homo sapiens
aaaagaagttattttctgtgatgtagcatgatttctccccgataatgcaggctctgggctggcagtgcctggcttgcttctcctctacaccaattgatattctgctcacagcgttgcacacaggagagtcaaggccaaacccagaggatgcacaatagtaacaggccaagagcaggctgttttctgggagacagatcctgttaccctcttgttgtttggggatagcaagaagtagaaagaggagcaggccttcagcagtgtctgaaagacaaacacccgtgctaaatcactacaggatctacctgcaggaacttcaaggaatcaaaacataactctgagctgcatggtttccggtaaacaaaacactccctgttctttacccaactgtattcctctgttcagcagccatacaattgccatttcgtaagccgggagcc

SEQ ID NO: 391718 - DNA, 289 bp, Homo sapiens
ccatgtcaagtacacacccacatccctcttatcccaaataccaaacacacaaaaatccaatctgtctccttctacctaagcaattttagatagtcactttctcataattaccttaagctccctgacttgctgctcgtcctttctctggcaaaatctcatccttggatgagcccgactttgtgtttgctcaatgacaccactcacctgaaccagaaaaaatatcaaaaagtggtcagagatatcatcataaattcaaattacttacacaaaaaaattggccctaaatgtt

SEQ ID NO: 391719 - DNA, 528 bp, Homo sapiens
ggcatgacttctgaacagggacctgaggaagtaagagagcattcacagaacagctagggaaaagagtattctaaaaagaaagaatagcaagtgtaaatgaagtacccaaggaatgatcttctatgagaaggatctgggttggaaccagcccttcttcaggtcaaaagtctataatgagtccctatgctctatggcaacaaatctaaattattcaacccaactttccatgttttcccaaaataatcagcctcactatcctatctccctagcacagttcctctgaagtaactagatcaggctcactaatattccctgtgctaagctcattccatctccagatggctattaggttcaacccaatgcctatcatgaagcatgacacgttaacatagagttgggctctgatataagggacagagactgggtcatcaaaaaacaatgccataggaggaatctgtctcaataattgacatgggatccagttcctctctcactgagtctgtctatccccctaccctgtggaaaata

SEQ ID NO: 391720 - DNA, 295 bp, Homo sapiens
aattgtcgagagagggaatggggatactgctttaattcatgtatgggagcatatagacttcgctcttatcaaatgttttcctatttctattaatttgggctgtattcctctggatattgtgatgccgcttcctctgtcactgcctcctttccttttcgttgcactttaaacattggcttccacctgcaatctacccttttcttgaccttctcctcactcctcagttttgcatgggcaacttcctttcaggttctttgcagctagccacttgtatgcccataaatcccagcttaaa

SEQ ID NO: 391721 - DNA, 132 bp, Homo sapiens
gatgcttcagactcagaagaggcacagcccacagtcccttagctgaaactgttggaaccagatgtgtttcagaattcagagattttccagatgtgagaacagtaaacatcccacatgctgagtaacagctgt

SEQ ID NO: 391722 - DNA, 245 bp, Homo sapiens
cacttccctgggaatagattctagttcctttactcatctgacctccacctgacacccctttcctgtctgttcatgtgttcattcattcattcattcattcattcattccacaaaccagtattgagcacatttgagggccctacgccgtaccctttgccaaaactttctcttggaaaattccattctttgacgccaggcctggcctttccaggtgtctgacatccccagggatccagtagcttcca

SEQ ID NO: 391723 - DNA, 381 bp, Homo sapiens
ctccggggctcttaactaccacatggcattgcctccatcaataggagaagtaggaatactttgttagaagaaagagctggctacataggcaattcacagaggaagaaacacaaacgcctaatatgtgaaactttggtcctcactagtagttagaagtgcaaaataaaccgagatgggatggctggaaaagcctcctgcatggatgactgttccttctgcttggtgggtggattcgtttcttgttggactgtgcctgcacatttcgtgactttctaatgaagtggatcgcctcaccttggcattgagtctcttgagggataaagggcagcgattgactgggagaaatccagagtctggataatcagactccattatccatta

SEQ ID NO: 391724 - DNA, 652 bp, Homo sapiens
taatctaataagaaatggaatgaaatgatcatcctgttttattgtctttaacattaatgttttctttgttagtattggatgggaagtcagtcagatggaatagaagaaagaactgttaaaaaaataaaatgagcttatttcacttgatcaatcaatttcagatataaaataattaagctttacaaatagttaaggactctttgaacaaccagcttaaaatctctgtgcctcactcctgtaaaataggcataaggagagttcttacttccatgcactattatgagaagttaaaaaggtgatacttattacatactcagaacaacgcttggcgcataataagaattcaacaaattttagttattatttcctttctcagtctctccctagagacaggcactattaaaaatctagtgtgcgtatcttccattatttatagttttacatgcatgtatatgttgttagaagcattattattctttcgtatatgtttttaaaagattgtgtaaatagtttcacactatattttgtaattttttttcctttttttttaactttatgtttggactctaaccaagtaaatagataggtagaaaaaagaaaaagagagatgataggttttaatatatatacatactaattatatatatataac

SEQ ID NO: 391725 - DNA, 412 bp, Homo sapiens
attggctcctggactgctttgctcaggacctctggatgccaggggtcgtatcaggggctctaaggtaattccacatgcccagcagattcagcttagagaaacggtgctcacagtgctggggtaggagcagagaaggctaaatgaaggactccggagagctgcaggtggatctggaccaaatccagaacccaacgccttactccctcctggggagagagctgggcagagacttggggcgggcagtgaggtggggataggtgagcagcactcgtggtgagtggccccagtgtgatttaggaggggtgcagtgtgggatcccagggacatgaccagtcagccccgccctggctttgacatgggggtgcctggcagtggtggctagagaagtccagtttgccaagagaatggcaca

SEQ ID NO: 391726 - DNA, 228 bp, Homo sapiens
ggagttcgacatcagcctggacaacatagtgagaccccacctccacaaaaaacttaaaaagttagccaagcatactggcatgtgcctgcagtcctggcttcttccttcctttccttccttcccttccttccttccttctctctttctctctttctttctcgctctctctctttcttttctctccctctctctctaacgctggtgcatgctcaagattcagctatggcc

SEQ ID NO: 391727 - DNA, 198 bp, Homo sapiens
tggcacgtgcaaaggccctaggcagatggagcctggcacctggaagcaacgggctggaggggcagagagcagtgctgacagtgtgggagtgtggaggtggtgctggcaggggctgcagcggtggtggcagctagcgtaggacagtcacgagatttaggagataaaatagaaggtggcggcagagagggtgcggagcag

SEQ ID NO: 391728 - DNA, 536 bp, Homo sapiens
cggagtctcgctctgtcacccaggctggagtacaatggcaggatctcggctcgctgcaatctccgcctcccaggttcaagtgattctcctgcctcagcctcctgagtagctgggattacaggcacccgccactacgtccagctaatttttgtatttttagtagagacggggtttcaccatgttagtcaggctggtctcgaactcctcacctaaggtgatccgccctcctcggcctcccaaagtgctgggattgcaggcgtgagccaccgtgcccagtcccaggcctctagaacttcggaccaatgggcctcaagctggggttcccaagacccctttttcaggtttggttaatctggtggagccagttatagagctcaagaaaacacatttgtcagtttaatatcaaggatattgcaagggatacagatgaagagattggtagggtgaggcatgtgtaaaggggcacagagttcccatgccctccctgtccacatcaccctccaggaggctccacatgttcagctgtccagaaactc

SEQ ID NO: 391729 - DNA, 348 bp, Homo sapiens
aaatcgagctcggttccccttttggggtctttgctacttgggaggctgaggtgggaggatcacctgagcctgggaggccaaggctgcaatgagctgtgatcgcgccactacattccagcctatgtgatagagtgagaccctgtcaaaaaataaataaataaaatttaaaaataaataaagaaaaacgaaagctctatacttatttgttggagaacctaaaacacatacatcaacaaggacatcttcctccagtggatcatcatcatctggaaaatactgacttcggatatcttactacagggagagtgtgagagagaaatgcaaagagataatgctagacccagataa

SEQ ID NO: 391730 - DNA, 141 bp, Homo sapiens
gcaaaggtgtgcgccttggcatctggggctgcgagagcctgtgtgcctgggtatgcagtgggggaacgtgagggacacgagtgtgcccagtttcctgtgagaaggctgtgtgcatacaatcccgcatgacttggctgtgtg

SEQ ID NO: 391731 - DNA, 286 bp, Homo sapiens
ccttctgccctgtgacttcccacttcttttaaggataccactcatgatactcaccataatccactataacatcattgtgacttaactaattatttagaaataggttctttgcagatgtaaagtcacattctggggttccagtaaacattaaattgggagacactcttcaacacagtacggttgctgacttcaatgctggctgaccatttttctgtttccctagtcaaccattccattctctgcagtagcaatttcaagcctcctctgcccatcctcaacatcttgt

SEQ ID NO: 391732 - DNA, 778 bp, Homo sapiens
agggtccgcgtctacacgcggctgtgaggaaggaaggcgcgtgccgcgtgggacgggctccacctgcctgcggacagatggagggtcactttgttccgagaagacccagacacccgagggaggatgtgaaacggaacgacccgtttcggtgcggttggctttgtttatttgcctactccccagacgcctccagcctctgattccggcacaccctgtgaggaagcaaacggctgcctcccccactgccaccagacgaggtcgcctgccccgagccggacaggctggacaggctgcgcacctgcggcggccgactatttcgtgggccttgtacgccaccttgcagaagggaagctgtgaggttttggcgatagaagcgcatttacttgtgttttaaagcccacaaacgccgtagtgactaacttattcattcagcaaatgtctgtcagagcgtctattacgtaccaggcatgtagcctgaacttcacgcctgtcctcatggagcttgcagagcacctctgaaatacacaccacatacggaatggccatattttctgggttgtaaaatactttgaattgtaactccatatattgaatagattttcagtagtgagggaagaaacaatacatttagttcatataatccatatgtacgaaaaagaagtgctggtaattccagacatggaagtcagtaaaactaggagctaagaggtaataatcatagacattatgattctaagcctttgttaaacggttctaaaccagactgggtaagcgcacc

SEQ ID NO: 391733 - DNA, 356 bp, Homo sapiens
caacaaagtgagtggtagggagtggtgcttgggccaaggccagtgtggcacggaggttaagtgctccagagttgtgatctagtaggctagatttgaaacctgactcctctgcttacgggctatgtgatctgaagcaatttacctacctctctgaacctcagcttcttaaaataggaaaggaagatcataatatcttccctacgtaaaatcctcagcaaggttattccaaaactatcattattaggccaagggaatgcttcaaaaggaaaacaaaacaaaactaaactaacattaaatctaagcatttgttatctacagtgtttgccatgctagctaaaatctggaaacaacccatc

SEQ ID NO: 391734 - DNA, 304 bp, Homo sapiens
tgacaaataataattgcatatgtttatggagtaagatgtgattttttccatacacatatatgaagtgattaaatcagctaattaacatattaatcccctcaaatacataccacttctttgtggagagaatatttaaaatccttttttttttttttggctatggagtcttgctgtgttgtccaggctggagtgcagtggtgtgatctaggttcactgcaacctctgcctcctgggttcaagcgattctcccacctcagcctctggagtagctgggactacaggcgtgtgccaccttgcctagcta

SEQ ID NO: 391735 - DNA, 681 bp, Homo sapiens
atctttttgtcatccttaaatggatgtatttctgaagatctgggtatttgggtatcccaagatttgggaagatttataaaacaaaatcacacaaatacagaccatttggaaagggatggggagagatgttatgaatgataacaaaattagaattatataaaatataatctttaaatattttcaatcatcataattattagcacaaactaatagctaacaacatgcttctagggagatctcccttcctggaactagtgttaataaacagattttaaattatttataatttattatgttaacttgtttatttcttatgcctgtagttgttgacaataacagaaatagccatgttcaacagtgggctaggttccagctttagtgatcttttgtatgcaccaaattcttactgactttagcatagtcattttgtgctctgttgtcttatggtttatgttatcattctccagttactttgtgaatgagcactttatttcccctgagagttgtagagtttgtaacatgtttagggccatgcctctttcttcatttatatttcacatatgaatgatgtatatcctaactgaagattgggttcacaatagtgctgttgcacaaatactgagtaagtttaactgtctcttatttatacaattattacatttactattttatattcctcaa

SEQ ID NO: 391736 - DNA, 677 bp, Homo sapiens
gatctgtcaatgtgacaagctattccttgtatattcgcttagttcatgctgtaaattttaacaccagtggacaaattttctagttggactttaatgtaaaccatttgaataggaagtgacaataggaatgaagccacttaagatggcatcatttttctcttgagtagtctgtgctttcaaagattaggcaaattgtatttggagaagtgcagataccatatccttttccttatcatggaaggccacttaaggagtaagctgagattgcaagctatagtaatctttatagctatagtaatagctactttcattttgaaaagtaaaaaattagaccaattgtcgtaagaggctttctgtttatagtgtacattttggtatttaccacttagtttaacttctgaggtgtcagctaagaatgcaagatttaacaaaagtactacttacaaatggcagtggtatgcctttgttttttctctctcacctctccttctcaaaggtggtaacccctaagtgttcagatcataaacgagtgttctctttatgaaatagttactaggttagattcgtaaactggtctagaaatccagccacagttcaagttttctgggttgtttaaagtttcaactttaaagtttattaaacaacttacttccaaattaaagctgctgtataatggt

SEQ ID NO: 391737 - DNA, 450 bp, Homo sapiens
agtaaaaataaatgtgtctatggacccgcctggtagtaagttccctgccacccaaggacacatttgggatagataaacttagccattcacatcggtccccttaccctgtctcgacccagccagtattcaatcagaacacacactgtttgccacatggaattgtagatgctagtgccaccttcaaagatgtaaaagattcagaggggtggtgattcctatccaatgggtagctccccattgagttcacctgtttggctcctaaaaaaactgatggattggctaggcacagtggctcacacctgtaatcccagcattttgggagggcaaggcaggcacatcacgaggtcaagagatggagaccatcctggccaacatagtaaaaccccatttctactgaaaatacaaaaattagctgggcgtggtggaacgcactgtagtctcagctacttg

SEQ ID NO: 391738 - DNA, 669 bp, Homo sapiens
gaatatacaaagtgggagtctagggagaaatcgtctggtagaggagggcaaagagaaatctaggaagatgtttttaaaaatatggaatccttgaacaggacctggttttaaaggtttacttcagaattgaacatatttttttagtctagacctttaggggaaaaacttaaagctttcaggactcaaagacaagttactgttcccatggctaaattgcattccatatttatttgacaaatacttattgcaggtcgggtactgttttagccactggagatgcagtaagaaacttaattaattttttttttttttgagacagagtcttgctctgtcacccaggttggaatgcagtgacatgataacagcttgctgcagcttgacctccgtggctcaggccatactcccatctcagcttcccaagtagctaagactacaggtctgccccaccaccaccagctaatttttaaattttttgtggagactggagtctcactaagttgcccaggttggcctcaaactcctggcctcaagccatcctcccacttcggcctctcaaattgctgggattataggcatgagacaccacgcctggcccaacaaagttttaaaaatcactgtatttatgaagtttacattctagttgtggaaaccgacactaaacaaatagac

SEQ ID NO: 391739 - DNA, 715 bp, Homo sapiens
tattcccattttgtaattccttagcatcatgtcattgttcccataaaaatatactgtattttctgaaatgatacaatctatgaagcatttcccattacgtagacaccatgtctttaaattatagcaatttcttaagattttaaggcaaaatgagctcttagaagtgtgattaatagcagggaatgaggctaatgctgggtcatcagtggcactccattacaaaaaggttggtttaataaaagcattcatctttttgaccaataaagcatttgaatgatatgcttatagttcttatagtagttacttgctactaaataaactctgaacttgtattgtggaaaggcggcatgacttaagtggctgatgcacaagttttttgatggtgtgagaaaaggcaggcctggatgggaggctcattgttggagctactggtttttagggtgtcttctacaagcgtaatacccatgaactaggagcctcatttggtttgggggcaagtgtaaacaatctggcttcttggttgattatgtctttagcagtgtaagtgtccatgtagcccctcagtacgtgctttgtgaattgcactgttaggaatccagtgcttaagggtcaagattatagcgtggaggttcatgagggtctcttaagtctcctgtagctcagttgcccaatatatgagccttgtaccactcacagataggttgggagaggattt

SEQ ID NO: 391740 - DNA, 305 bp, Homo sapiens
gattaaatatcaacattataggtaaaaactactttataaattatagtatgtaagcaatacttccccttatctccatagtcatcttcaattctctggtttcttagtcattcatttatttgtccaaccatttatttatattatctcacttgctctgctattcctctaactggcatcttcaaaagcattttactacttccttctctcacattcatatttgcttttgtgttttcactcttccttatgtattttctttatgaatgaactctttgtcctctttatcactcagcctctcctatcgtctgttc

SEQ ID NO: 391741 - DNA, 461 bp, Homo sapiens
tgactttgatgctacatggaaacctaaaactttgtcactgaggcacaaaagatattcattttctggtggcaaaaaatttatcaccacaaaaaaatttgtctcagtgaggagatagttaagaaaaaaaatactcttctcctcccctggccatgtcaatcttattagtgacaaattaccctctcccacacactgtccttttgttttctaattatgactcctgctgtcagaatggagaatcagccacactggctcctgcctcagtggatgctcagacacatgcagattcctctatgcccttgtaaaatattctgcacaaaagaaataattctaaatcctaccatttttttttttgttgggagacagagtctcgctcggtggcccagggcgggagtgagggggggaatctcggatcatggccacctcggccccccaggtacaggtgattctccggcctcagcctc

SEQ ID NO: 391742 - DNA, 353 bp, Homo sapiens
gagaagaggatgtgccagcctgctctcaggaagcaggcggcgagggttctgatctggctactgttagtggtcaagaagacttttttatttttttcacttccttggcaatgtatatctcaccactgattatatctcccttccggcattgagaagttgaggaaattcaaagacagatttgaacccaggactagataacccagagaataaggccaaagaaaggcaggggtggctctaggaggctgtattctaaggcctacaattctctgggctgccttgacatctctgagcctcacagaggcccaagggcttaactgtgagttcctctgtgagttcccctgccctcaccaggcatg

SEQ ID NO: 391743 - DNA, 629 bp, Homo sapiens
cgaattccatccagcatatgcacagacaggaatggcaggcttctaaatgcaaagatgacgaaacggacagacacagctaacacaattttttaagttctacgcttaggttcaagtacatcaaatgcaaaaatatataggcagagataagcctaggagaaagggaataattaccagaacactaatcccaccatactgcatacaagccaagaacataaaatgaacctctcagtcttacccttcctgcaactgaggacccgcttgccggcactcagtaggacacgtgattaaaagtgtggcttgtgaggccaaactgcatggttctgaaacctggttctaccatttacaagctgtatgacattaggcaaattacttaccttctttaagccacagtttcctccttgagacaggtggacattaacagtactagctcatgaatttagtgggccgttgcaatgagttaatacacatcagctgttactaacatccaccatatattcccagaggggtacccaattctttggggtctcaatgacccttgtccttcaccctctagaaggcatgtcatcagagaataacaaacattatcttcaacttacttgatccagtgctgcatataatttaagtagtca

SEQ ID NO: 391744 - DNA, 140 bp, Homo sapiens
atccggcagagtgaaactaagggtttagttctggaggcattatgttggtggccgtgggaggaagtcagtcaatcatttagttctgctgagataagcttggacccagtcgaaagaaaggtaagtcagcggttgtgtgtgcg

SEQ ID NO: 391745 - DNA, 711 bp, Homo sapiens
agcggactggagacctgcaaagcagtgttgatagatcccattggtggggtagaaatatcactcttagctaagaaccacaaaccattttcagaattcataaatggaaaagttctttcaagaacaatatgaagaatattcctaatccagtggctccacatgcaaactttgcctcctgaccacccaaggcatcattttagtcaactacatctccttctggagcctaactttagaaaatgcttcccacattgtctcttttagaagacaattttgatacatgatgttagaggaaacaactacctcaacaagtttgaaactccttctagaaattgctcagcagcaacacatactgcttttccagtaaaagctcctatttgacaaaggcgaaactccttggccccacctggtggttgctgaatccagcaaattcaccttttgcatttaagaccctatcagaagctgtactttgtcctttgacatctatggagttatagacattgaatctccttcgatgatgaagtgaggtctcattccaagtgcttaagataatgaaacctgtatgaggacagatgatgcaacatcagcaatttttgcagtgctatgaatttcaggtggcgtcttaattcgaagtaggttacaagataaaatacgtgaaaaagatactccaaatttaaaacaggactttcatgcaataagcataaatgcttcctctct

SEQ ID NO: 391746 - DNA, 403 bp, Homo sapiens
gcactgctggggatacaagggtgacaaggcatagtccttgctcctaaggaaccagcacttagggaaaatatgactgctatacaagtaactataagaacatattttatttcattattttattttgagatggagtcttgctctggcacccaggcaggagggcagtggcgcgatctcggctcaccgcaacctctgcctcccaggttcaagcgattctcgtacctcagcctcccgggtagctgggattacaggcgtgcaccatcatgcccagctaatttttgtatttttagtagagacagggtttcgccacgttggccaggctggtctcgaactcctgacctcaggtgatctgcccaccttggcctcccaaagtgctgggattacaggcataagccaccgcgcccag

SEQ ID NO: 391747 - DNA, 346 bp, Homo sapiens
catgcacctgtaatcccagctactcgggaggctgagacagaagaatcccttgagcccgggaggcagaggttccattgagccgagattgcgtcattgcactccagcctgagcaacagagtgagattctgtctcaaaaaaataaaaataaaagaggccccagtaagctgccttgccccttccgccatgtaaggacacagctagaaggtgccatctacgaaccaggaaacaggctttcaccaaataccaaatctgccagcaccttgatcttaaacttcccagccaccagggcagtgagaaataaattgttgtttgcaagctgcccagtctggggtattttgttatagca

SEQ ID NO: 391748 - DNA, 356 bp, Homo sapiens
cgggaggtggaggttgcagtgagccgagatcgccccactgcactccagcctgggcaacagagtgaaactctgtctcaaaaaataaaggattggtccagttgatatgctggaataagatgagttcctaaagggcctcgtgacttacagattcccttccacctggactgattaaaaagccaacaagaaaagttatttgtcaaatatagaactgcgctactcgaagtgtggcccacagacctgcagcattagaagcctgttagaaacgtagaatctcagctccctgaattcagaccccctgaatcagagctacattctaaaaagcccccaggtgattatgtgctcgaaagttcaagaac

SEQ ID NO: 391749 - DNA, 492 bp, Homo sapiens
acaggtgtgcaccacttcacccagctagaggcaagttatttaacctctctgttgccttcgttttcctctgcaaccaagcaatgaggataataacagaaacctgttacttggagttgttggaagaattaaatgagttaattcatgtagtacttgtctgagtgcctggcacaaaggagtgtttcatatgcattggctgtgataatgattatttataggacagagagcacatgcagtccagggtcacctaaacgcctaactggtccagaatgcaagtgcgttggctgagggctgtgagggcacagcagatgaagcattgcattcttcaaggaagtcctcagggggaggcatttgagattggcacagccctggagaggctagctcaagtagaacaaacactgttggtgcaggcaagaggctgtcagagcacctgccacatttgcagaggaaggagccctctgacacttgagagggagcatgtggggcgcagggggc

SEQ ID NO: 391750 - DNA, 341 bp, Homo sapiens
tggggaatgtcacaaggtggcgcaaagactttgtttaactgctggattcctagctagcacctggaatacttgaagcccctttcaccttctccctctttgcaaactatggctcagctgcatctgtgccctcagttctggtccccagcttcccctgaatccccttcgtgctgttatttgggctttgtattggtacctaaccacattctacctgtagtgaaagctgaaggtcttggttcccactctaggtggtaagtttcttgagtggagcaccagctgcatatactttaaagcatattcttttctgtatttccagcaatgccaggcacaggacctctgagttg

SEQ ID NO: 391751 - DNA, 525 bp, Homo sapiens
tttcagggaggggggatccaaacagaatctagccattttcctgggctgagatcagcgatctggaagagttggcagtgagaaattgtgggaaaaaatagaagagagaaggtagatgcaccaagagaaagaatcagaatgccctgggacactgagtgctgatatgcactgcatgggagggaaatatctaagacgaaaaaaaaaaaaaaaatagaaaggaaaaaaaagaaaaagaaaaaaagaaaataagtagaaataagtagacaggaaattttctggggatcaaccagaactagtaatattttacattcccacctgtcaaaatggaaagacctcataatatatggggaatcaagtagagtccttcaaagcacaccacctggggaaaaataagtcccaggctaaaggttgccccaggcccattctaaacacttaaaaccaaaacaaaaatccaacactatttatagaaatacaacaaaatctaggaaccaacaaagtaaaattcagtgtttggtatccagaagaaga

SEQ ID NO: 391752 - DNA, 663 bp, Homo sapiens
tggacctcgggattcagttccctgggatccttctatggccttccacattttctcatcttttttcactgtggcaaatagagcagaggggcttttgcatctgcggtcctgtaatgtagagtgggtttctttcatagctgtttttgtttgttttatgcatttaaaagcactagtctcaagacaggtctagttttcaccagactgacagaggatccgtagcacagaaaaagggttaaaaacccaaaggagtcataatttgggggtgttggtaaataccagttattggagggtagagagctggcctttaaaacctgattgtggcatttagatgtggtcttgttttgaacgtttttacagctgagactgtttactaccccttaatttcatgattcaggttgctacaagttctgtctggaggagctagagttttccggccctaaatccataggaaaagctgctatagttcttggcctccggatatatagaatttgatggcaaggacaaaactttgttttattgcttttatttaagagtcagagcttgggtgtttgctcaacgaattactcaaggtcataggaattgaatgactggtgagaatgaaattcatgtatttaatatatatttattgtgaggctgctgtgtgctaggtgctggtgaattgtgagg

SEQ ID NO: 391753 - DNA, 584 bp, Homo sapiens
ttttatacaatgaagatacttttattttatcgtgattactcttttgccttttttgttggttagaggaaaaaagaatccttaaagatgagtgtgaaaatttgatttattttttaattcacaaaagctgaaagttgaacatgtagatgatttttcttttaagatagataattaaatatgtatagattatctcaatttctgtcatcttgtgcctgagagattgaaggaaaatctggaaataagaggcaaccacttcaaactttgcaacttcatgcatttggcaactgagccacttccaaatctgtagtttggtcatgaccttagttcttaaaagtcagagtggaatcctcatcttctggtctccttggattttcagttcagtaccacaaacttttgaaaaactactggtgggtttttgaaatgccagattgtgtgccatgatctttgctcttaggcagtttaaatttcgggagggatacatggcaatttattgtattcattcactcattcattcagcgcttattgctgggggctgtagaaacagaggtgatgaaaattagaaggcctgtttgaccgttgtggtggag

SEQ ID NO: 391754 - DNA, 340 bp, Homo sapiens
agtgaagagctcagctactggtagagtttgctgtcatttcctttttccatactaagacaccagctgttgcccacattccttttgccatatcagtacaaatgtgaacatggtggaaaaaggcagttaactttatagtattattatgaaaagaattatgactttagggacattctgaaggatgagcccagggttctgtggatcacagtttagaaaactgctgtcttacagaatccatttctcccctgttctgagagtgggcagtgcgagaatcttatgcctgtattaaatcatgactttttaatgtcctttcatattataagatgtaggtaaaatcaggcta

SEQ ID NO: 391755 - DNA, 394 bp, Homo sapiens
tatgtaatttgaggaaagctctactctcctttaggcagctgattagcaccttcctttaatctttttccaagcaacgtagtattaccacacatttgctgtttatgtgttaagagatgttccacctcactagtaattaaataaatgcaaattaaccaggttttttagtttttttattttttcaggtaggatctcactctggttgcccaggctggagtgcaatcgtgtgatcacggctcgctgcagccttgacctcccaggctcaggtgatcctcccacctcagcctcccaggtagctgggactataggcatacaccaccatgcccagctactttttaattttttttgtagagatggggtttcaccatgttgcccaggctggtctcaaacccctgga

SEQ ID NO: 391756 - DNA, 496 bp, Homo sapiens
tgatgacaaaaattttaattttacatagaagaaatagacacaaatggagatgtacctattttggtaaacacaattctgagtaacaaagcttacctaagagatggattcttttaataccaatgtcttctggaattttctttcttatgaaagggactctttcagaatgcttccctcatatagttataggcattacataaaggaaaccatttttttttagtagtggcacaaaaatattttaaaatagctacttctaattacctacactagtcataacagattacggcaatataaatgaaaccgtagtggaaagatctaacatccatggaaatttaaaacaatgagaaatggaactattacaaaaaattacctcctatacattctttctcaagaacttcctggaggacttgctccaaaaaatgagacggcaaattaaggaaaaaaacaaaagattaagaaacatgagtttcaacataggagaaaggaaatcgtcatgtaa

SEQ ID NO: 391757 - DNA, 452 bp, Homo sapiens
caaatattcaaattaagtgagataaacaaagactgtaaatagactcgtgtttattcaggtcagggtttgctatcacatgagtttaggtgctaaacttaggaaagcatttttagttttcagagttttgtacataagggatagtcaacctttctagagagcaatttgacaatatatattaagaatcttataatgtatataccctttcacccaaaatcttctagaaattagttataaggagataattatgattgcatgcaaaaatctagaaataagaatgttcaccacagcatcgtttttttgtttgaaaacaaaaccaaaaaccaaaaaaaaaaaataatctaaatgtctaccagtaggggattctttaaataaatatagtgcatccatacaataaaattggaaggagtcggccgggcgcggtggctcacgcctgtaatcccagcactttggga

SEQ ID NO: 391758 - DNA, 303 bp, Homo sapiens
gtcactcaataaatacagaatgaacaaatatttggtgaatgctacaaaagagctaagtatgaaacacacatcaggagaacctaacccagttcggggggaccaagccttctggggaagtatcatctcaagctaagatttgaaggacaaggaggagtcagtcaagtggggaggacaagggataggtggaggagagaatggttcctgcacaggagaattgcttgaacctgggaggtggaggtttcggtgagccgagatcgtgtcactacactccagcttgggggcgacagagcaagactccacctc

SEQ ID NO: 391759 - DNA, 746 bp, Homo sapiens
cgcagtggctcacgcctgtaatcccagcactttgggaggccgaggtgggtggatcacgaggtcaggagatcgagaccgtcctggctaacacggtgaaaccccatctctactaaaaacacaaaaaattagctgggcgtagtgtcgggcgcctgtaatcccagctactcgggaggctgaggcaggaaaatggcgtgaacccgggaggcggagcctgcagtgagccgagatcacgccactgcactccagcctgggcgactaagcgagaagataaacaattttaatcttagatgcaactaataatgtcctagaaatacataaggcgaaaattgacaggacaaggaaaattcacaaatctgcatagaggaatagtgtaatacacctttgtcagtaattaaggtatcaatctgacaactgaaatcagcaaaaatatagaagatttgacaatataactaataaacttgcactaatgcacaaatacagaacactgcaggtatctacaaaagaaaacttattcttttagccaaagaacaattactaaagttcactacaaaaagaaagacatttcaaaggatgagtaacataaaaccagtatctctatatatttaactgcactacaatcaaagtagaaaccaatactaaaaaataagaaaatcactacattagaaacaacttctaattatgaactcataaagaaaatattcagaactgaaaaacagtaaatactatatactaaaatttgagagatg

SEQ ID NO: 391760 - DNA, 359 bp, Homo sapiens
aaatatttttttttgtttgcttcttgcaaaatgcccagcaccttgggatataaaggggggtgtagttataaccagggtcatctttgatctcatttggaaaacttcatttcaagatggagttgcaggtggtccttggggactgattctgcaagccccttttgtctgtcagtcattccaggcttcatccctcatttctggacctcacactacttaaccataccaaatgttcatagaggagaaggtagaggctcattaaggcttgtttgctcagagtgtggccttcttatcatttagcaatttattgtatcttattctatttattttatttattttttatagacagacggggactcactctg

SEQ ID NO: 391761 - DNA, 602 bp, Homo sapiens
tgtaaatcttatttactaaagtaggagttatgagagattcatttcttggcttaaggcttttaaaatcttaatgacatgtgtcattgtagtctaagatctggaagaaatattaattctcaaatgaatatatcctatgggaggcaactagtggtttagtttggaatgtcactcccatctctcttcatcctcagggctattgatctcacaccagtcacatccaatctctctctcctaattgcttattggtttcttccgcctttctgtcatcagcatagctgagttccttggtttgaatcagacactaaaacttttttatttcattctgctatcaaatcttattaacacctcttcttctttttgctaattatcagatttttctatctgtcacttaacttcctcagccatgtaatcccatatccagtgttatcaaacaagatttaatttggctttcccttcctcaccttaaactctctgagttcaaaagttaacttatctcccttttgttagtttattttaattaagacaagtcacattctgagagaagacaatcatttaacaaaggaccagtatctcgaatatctgaaaaacctttacaaaaaaaa

SEQ ID NO: 391762 - DNA, 500 bp, Homo sapiens
cggctggtggggccaattcctcacaggacacccacagatactcatccgcagccgggggatgggggacccctggttctttatcatattaggagcacggctttctaactctaggtttactaagcagttttaaagtacatacgatacattgaagtggatactaaagttttatcagaactttaatacgtgcatctctgtgagacgctcaataagatttgtctggatgttctcaatatttaaccaactgtggcattccatagaataaactttacttcccaatttatggctcagtttttcttttttttttctgagatggagtcttgctctgtcacccaggctggagtgtggtagcacgatctcagctcactgcaacctctacctcccaggttcaagcaattctcctgcctcagcctcccaagtagctgggattacaggtgtgtgccaccatgcctggctaatttttgtatttttagtagagacggggtttcaccatgttggctagg

SEQ ID NO: 391763 - DNA, 404 bp, Homo sapiens
gccctttcattgtgatcatggtgtctgagggagagaaaggtcagccagaggccgtcccaatggactcagggaagctgcagggagaacccaggcaaagtaattaacactggagggaggaaagctttcagctaacggtgcagagctggggagatgggacatgaggacatccactaggaaccagctctcatcacactacacttaatttttcttcatctttctgaagatggttccgagaattactgctgataatatgttcaaaagtccaaagtctgtaaaatctagtaaccaaatataattatgcaaagagacaatacactactttttaaaacagtcccttgaaaagcggggcaggaacagttctgacatgtcctaaaggcaagagggacattgtgtgccaatacaca

SEQ ID NO: 391764 - DNA, 441 bp, Homo sapiens
agtcccccgcatcaagctccatggccttaattactcagtccttggtctaaggagacacatagatacctgtgttctcctccatttaacagccagggaccagccactgtgtgatttttagaactcagtgttttacactgactttgagatatctcagagacaaaccttcggtccaccaacagcaagtgtttacgtcctcgaggaaggcattttaaactaaccttattcatctcgtttttcttacccatgtttttctttctccaaaattattttttgggcactttagatataagctgccttatatcctctttaagacaatagataaacaaagcaagcaaactccttgataccttcaattaaatctcatgtaaaccaaaccaacacctctggggtcattatatactcatggccacaacactccacagttgtgctgatggggcaggt

SEQ ID NO: 391765 - DNA, 248 bp, Homo sapiens
aaaacccctgttctaaatgatgccggcagggaggtacttgggaaatctcagatccaatcctgaaggcagacaaaggttgcagaagaaaggagggatttaggatcagatttacgaacagaaactgtggttccataatgtaccagctgtttacccttgaacaagtcatttgacctttctgggcttccgtttccaaagtgactggtgtagggagggctcatttccagcatcaaagggagatttggctcttc

SEQ ID NO: 391766 - DNA, 827 bp, Homo sapiens
tgtttaaagtacagctgtatgacttctaaatcatgccctgttttttccctgcatgttacttaccacttaaatttccctgaataatgttagcactttgaaaagggcccaggcatctagcctcatgtcgttgtttcatagctgaggaaactcaggcctagaaagtttcaagtgacttgctcaaggttgcataatagtctgtggctcccaatttctaacatctaaaccttgcttctatactacatactttgtcaaacaatttttaaaaaattcttgtgattgttctaagtgctgattcttttgctctgaattatcataataactttttccttaagttctacttaaagcatattattttacttaaatttttgtatgtgtaaacttaattgagttgtcatgggtaagaacagtacatctcttttgattctattgttgaacctacaatcaaaccatctatagctatccctgtggattattttcctttgtcctcagagttactaacctgagactctgatttgttcaaccctccacccaacctacagaatcacttatactgtagaaggtagaatctaatgcattgttcttcctttcaagaaggttttgttgagtttttcttttatttgtttgtatttaaaaatatcagttttttttaatatgaagttagaacataatattaaatattcttttccatatacacatgcgccctctttatcccctttccacatcccagttttggtaaaatacctatcccctttttctttattgagaaactatctcatagattgtctgtatcctatgtcctattttcctcccagaaacacaccagacaa

SEQ ID NO: 391767 - DNA, 358 bp, Homo sapiens
atctcttctacctgctttcctaactcttctgtagttcctttgccttgagggctttcaagtcagggaagcagtaatccctggtttctttcctgtcttctagactctaattcctgctctgggctctaatctctttttttccatactctagtttctctaaatgcctttttcttctctaagaagaagaaggtgtcctaaagccactgtgatttatttaccctattctctcctcacgtcacagtcgggctgtgagactgttgcagacatagtcaaaggagaaaataaagttatgagtatatgtgttaacttacttccttttcctctgctatagagctgtactttggagctggttcacctggca

SEQ ID NO: 391768 - DNA, 463 bp, Homo sapiens
tctcatctccatgtcataattacaaccaaaatcctaaagggactgatttaccacactgtgggtgccataaggcccaatttttaccctcagcagcagctgtaacatcccaagttacagttctaccctccaaagatgtgcctgaggcttgtgcctgccatactaacatgttaatatgtccaaagcttcctgcagagctgtgtcccagtcccaaagtgcccctttctaataagtctatatattggtctcaaacattggactcagtgtcagataaatgctctccaataatccaaagactaacaaatgtctggatttcttttctccttttttttttctttaagaaacatagtatggctctgtttcccaggctagagtgcagtggtgggatcatagctcactgcagaaactcctaggcccaagggattctcctgcctcagcctcccaagtagctgggaataaaggcaca

SEQ ID NO: 391769 - DNA, 1570 bp, Homo sapiens
acatttgacaagtgaaccgcggccccaattggcaataaaactggtgacattgattcccaacccaccctggtaaaatcttgcgcccaaggtgaatacataattccctttgaaagatagaatagtggggcccaactttttcaacccccccccagggactgttacgctgttgcccaaatgttttgtgttaaaccccgaatatattcccccgttcatcgcaggtatattcttcaacaaacattaaaatatttatcaaactgtgcccccaagtataccaccggaagcgcaccatttactttctttaagtgtgaccccttaattcttagaaaccatggcccagctttgttgaacccctttaacctaccctatggaaaaagcaccctggtttataaaaaaggtgtgccccaacagtaatggtaaatctggggcacaaaaaggtcacaagtgggcccggagttattttaccggaccaggatgttctactaagttgttggaaggtccgcccaatcttttgtagtcgttgtataccccccggtttttgcacgggtcctaaacacccaccccggggtgaatttaaatgggcaccacggattatggtcccgtgggcggtccaagcgcttgtaccagaaaaacgtatgtttcgcgtcaaatccccccccccttttttgttaaaaaaaaacccgattaaacccccttaggctaaagaatttttaacccccggttcttccaaatttaaaaaaaaaaaaaaaaaaaaaaagacaggcccagggactgactacaaattgacttgttaaaaggtgcacagtctttatagccttgttttgtgttgatggtggggtttttctccccctttcattatacctgagaagtatgagaaaggaagccacaaatttgaagggccttataaatacctttcacaaaatggcaccatgggcatgtgggaactttctggggtgctgaaaacagtgtatgtctctatcttagaggcacggatgtgggcaaatagctatgtgaaaattacccatctgcacggctaagatttgtgcacttaactatacatgagttccatctaaattttaaaataaattagccagtgacctaggggcaactagaggagaaggactcttccagcttggaaagagtaaacaaaggtaggttgttgtctcaaagcctgctttatatcttgttctacattaggaaattgcagtgtggctgcagtttttaatggatttccttggcagaagaaaatgactgcaattctggaatcagagggttaaggtggaggagaaggaagcaactcatggcccagcagtcttctttagggtttcattttcatctggtaccactccctttccaatcctacagcacaccagagtgaactgtctttgtatactggggctgtttccattgaacacactcaaccactacatcccaaggggctagtaccatgactggcattccataagaacttgatatatgttgaataaaacaatcctttaaaaaaaatcttaaagcaagacaagtcactagaacaaagaaagagaggaaataaagatttaaaaacacctccaac

SEQ ID NO: 391770 - DNA, 1629 bp, Homo sapiens
acacaataaactttaaaatacatttccatttttaatttaaaaaataaataacagcaaatctgaacaaaattttcctacttcaatgcacatcttcctaactgtccatgtttgaaatccagatagcaacaaaatcatggcaaaggcatttttgacaaagtttagacaaacgactcacaaaatatggctaatagtagatgagtttggacatctgatactgcagaccagccttggctagatcctaggcgtcagagtgaaatcatgaatttccttttgtagattagaattgatggtccaactctcaacccaccaaagagaaacttaccttttccaatttaattgtaaaagccagatatatcactgaatgaaggtatctaaggaagtgatatttatcaacttcccaaatgatacagagaaggaaagcataattattaaaatgaacctaaagtctagatacagtgggccaggctggtgaagccttagactactatggaaatgacattgtttataagatgttgcacaaattatggtaatctgtgtcaatatttcaatgtgtgctggattattactgacatattcataattttaatgtccacaaatctttttatcttaatagccagggtatggcagggtcaaagcaccacctgggatgataaatgggacaagtatagtccatggacctcaaagcctttgtacagaaaactagtttccttcagatcctccccctctttttgtttaaataaaaagcagaataaaagcagctagggctgaaggaattctaaacctcaggtagcttcaaaattaaaaaaaaaaaaagacaggcccagggactgactacaaattgacttgttaaaaggtgcacagtctttatagccttgttttgtgttgatggtggggtttttctccccctttcattatacctgagaagtatgagaaaggaagccacaaatttgaagggccttataaatacctttcacaaaatggcaccatgggcatgtgggaactttctggggtgctgaaaacagtgtatgtctctatcttagaggcacggatgtgggcaaatagctatgtgaaaattacccatctgcacggctaagatttgtgcacttaactatacatgagttccatctaaattttaaaataaattagccagtgacctaggggcaactagaggagaaggactcttccagcttggaaagagtaaacaaaggtaggttgttgtctcaaagcctgctttatatcttgttctacattaggaaattgcagtgtggctgcagtttttaatggatttccttggcagaagaaaatgactgcaattctggaatcagagggttaaggtggaggagaaggaagcaactcatggcccagcagtcttctttagggtttcattttcatctggtaccactccctttccaatcctacagcacaccagagtgaactgtctttgtatactggggctgtttccattgaacacactcaaccactacatcccaaggggctagtaccatgactggcattccataagaacttgatatatgttgaataaaacaatcctttaaaaaaaatcttaaagcaagacaagtcactagaacaaagaaagagaggaaataaagatttaaaaacacctccaac

SEQ ID NO: 391771 - DNA, 369 bp, Homo sapiens
aagggtgcgctgcgtggagatgacagttgaggagatgaaggagactgagaatgggacacagttggcgcctcttcccatggagggagtggacattcgcccaaacaggaggaaggcatgctgaaggtcatcgagagagggcacaggtacagagatgcccatgattggggactgaatctttgtccactacactggctggctgttagatggcacaaactttgaccccagtctggatcacaaggacaaattctcctttgacctgggaaaaggggaggtcaacaaggcttgggacattgccatagcagccatgaaggcaggggaggtgtgccatatcacctgcaaaccagaatatgccttcggtgcagcaggcag

SEQ ID NO: 391772 - DNA, 370 bp, Homo sapiens
aggccgaggcgggcggatcatctgaagtcaggagttggagatcaaccagaccaatatggtgaaaccccatctatactaaaaatacaaaaattagccaggtgtggggtgggagaacacagcagggaagcacaggcccctggtggaagcacagagctattttaaaggacaggcagggcccttctgagccccacagggaaattaagcagcctgattctcaggctcaagagccaaggtggaggccagaatgcaaggctgcaggtgggctctggctcactgggtgctggggctctggcccgtgcaggaggggaaaacaatccaggtctatggggaaacagcttcaaagccgagatggttaccagtggaaaagcaa

SEQ ID NO: 391773 - DNA, 260 bp, Homo sapiens
tgtctccacgtgctcagctctctgaacactgtcctcttgggttttctctcccttccttcctgccttccttccttccttcctctttccttcttctttccttttcccttcctttcgtttccttttcttttttcttttcctttctctttctttctttttcttttctttccttctttccttccttcctcctttcttttcctgtcctttccttccttttattttcctttccttttctttctctttctctttctctctttctttct

SEQ ID NO: 391774 - DNA, 576 bp, Homo sapiens
ttcccaaggaccatgaaactcctgctgctggctcttcctatgcttgtgctcctaccccaagtgatcccagcctatagtggtgaaaaaaaatgctggaacagatcagggcactgcaggaaacaatgcaaagatggagaagcagtgaaagatacatgcaaaaatcttcgagcttgctgcattccatccaatgaagaccacaggcgagttcctgcgacatctcccacacccttgagtgactcaacaccaggaattattgatgatattttaacagtaaggttcacgacagactactttgaagtaagcagcaagaaagatatggttgaagagtctgaggcgggaaggggaactgagacctctcttccaaatgttcaccatagctcatgacttcctctcggctatcactcacccctgtcctcagagtgataaactaagtcacatacagataaagcactgaaaacaccacagtgaccctcccaccccccaccaatatgtaattctattaatagaaacagctgtgtaaagaagtctaaaattttcactatttccaatgataaactcttcagtgctcttcttgaa

SEQ ID NO: 391775 - DNA, 373 bp, Homo sapiens
tagtagaaacggggtttcactatgatggccaggctgtgaattgcctattcttatcttctgcacatttgtctattgtcggtctttttctcgtcgatttacaagcattccttttttcattctgaatattaatccattgctttctgatgctgtaactaagtcctcctagtggtttgtcttcttggttaagccagatgttaacttggatttttcctgcataaaactgaagactcaagatgcatcaagcactgtatacagaaaagtgctgcgtatcctacagaaagctacagacagttgggggtcagaatcattcggattgtttcaagtttggggctattataaataaagctgctataaacgtttgcacacaggtttc

SEQ ID NO: 391776 - DNA, 405 bp, Homo sapiens
ttgatctcctgacctcgtgatccacctgcctcggcctcccaaagtgctgggattgcaggcgtgaaccgccatgcccggccctatagtttctatccaacttactgtcattagtgatgccttttattacagaaatactaatatatttgattaacgtgcttctgattaaataaaaattcccactggaattttatttaatatatagtatatataccataatacctttctaaaatctgaaatattttgaattccaaaacataactggccccaacactgttagataagggtatatggacctgtattattaccttcattgtacagatgaggaaactgaggcaggagaatcgcttgaacccaggagacggaggttgccatgagccaagatcgcgccactgcactccagcctgg

SEQ ID NO: 391777 - DNA, 523 bp, Homo sapiens
ttgtagcacttttgtactttgtagcataacaagatgataaggcccatctcatgcctaccctgctttgggcttggttgtgtgttgatttttttggtagacaatttcaccatgaaccagacgccgtgtcaaagagtggatgccaaggaagcatgtttcattcgcagttgttggcagcagcatccttttatggataaagaacaggcagccaacagacctctctttgctgagttccaggtgtccctgatcggcttaaacactgggtcatataatgttctttggtaaaatgaggagggtcatgtagacctaaggatcgttcttatccgtgatacgaagatgattttgtgtttgagatagttttttcatctcccacttctaaaatggatcatttaaatattgccatttgttgtggtgattggtatacttggctgacaggtttttgtttttccaaagtaaagactgtggacattagcacacatttcaagtatttgatacttagcaaagggaagcttcctttaaaaaaaaa

SEQ ID NO: 391778 - DNA, 379 bp, Homo sapiens
aagagtgatgtgggggagccttgggcaacagtgctgccgagctggtgccatggactggtacatccttctggggtctaactgcatcccctgggccccagtagagccgtcactgactgtgcagtggcaggagctgctgtctgtcgggcacttacccaacatcaggcactgattttatctctgatctttagcattggtcgatatcattcaacaggcttatacatcatggaacctaggcccagtgaggttcagggcatccaggaagtaagtggcagaactggaattcagcttggatctgtgttttcattttgttttgttttgttttgagacaaggtctggctctatcacccaggctggagtgcagtggtatgatcttggctca

SEQ ID NO: 391779 - DNA, 539 bp, Homo sapiens
caagtgagctccctctctgtcaaaaactctgcaagcaattttttcctctccttctaatattaaattgtttctgagtttgtcaaatactcacaagggaagttttctacgacattgatgtgggtcaacagcaagtccatgtccctgggttctgtttgcagaggaggattcctttcccatctgtcagggcaatgctgtggaattccaaagcccactgtctacggaacagccagcccattactggacatcaaaatgcctggacttctgagctccaaagggcatcaggagatgggggagccgcagagaccacaaagccccagctctcagctcccacgtcctcaccgcaccccaaagacagggaatgtcatgcgccgggttgggtcagaataaggaaaggttagaaactcttattttcaaaatagtctagccacagttttcttaatgaatgcctttatcagatttcatttgaagaaaaggtcttctgctttaaaaaggctgctcttgttcagtccattcgcttttcaaacaacaaaactgaggcc

SEQ ID NO: 391780 - DNA, 263 bp, Homo sapiens
tcctctagggtgccattagcacttatttatggctctttcagcacatatactacagtgaaatccaactcttctgctaatttgtgagagcattctttctatatctgtgcacatcctagattctcaattaaacatttattcaattcactgtactttcacttatttatgcttttttgatgaccccaacataactgttcttttctagtcatgataaatgattaaatgatactcaatgtttcaagaaatgacactcaacgactaaatga

SEQ ID NO: 391781 - DNA, 386 bp, Homo sapiens
gagaaggggaatgctgtcgtggactagagggccagggaggccctggcccagggggctgaagctggctcatgacagaaggaatatcacccaaccctcggggcccaacccccatcctgtcctggacactgtggctgttttcaaagtattattgttgaaacatttattgatgtgaggccagagttcccatccaatttatttcaggtatcaggatgggttatttcaggtcttcagatgccctctgatgagagggtagggcaggggaagaacagtgtgagagagagcctaggtctagcctggcaagcattcaaattccagactcgcctacccctgaccccacactgagccctgacacttgtcacagactcagccctgatcctggccattct

SEQ ID NO: 391782 - DNA, 317 bp, Homo sapiens
cttttatccagtgcattgtcacccattattacctgctagatttttaactctgatagtaatagtgctttaaatatttaaaatattaagtaaatttaactaatgagaactccagttgagaaataattcatatgatctgcttgtaaaaatcagaaactaattcaaataattttaagtaaaacaaaattgatgggagggtaggtattgagtaggagtatcctgtataattcaaaggtgctcagagtttggaactaggagaaaggaagttaagaactaaggttactttccccatttatcaaagggctacacagtgctttatt

SEQ ID NO: 391783 - DNA, 401 bp, Homo sapiens
ctgttattcagagaatggtgtaatcagttaataggatctatatttattttatagtctatattttaattatttattataaagtggcaacagtaaatatctgcctcacttatcttgtataaatatgaggacaatttgtgtattttctggagggacattttgagttcatcagaaggaagacactgaaaaattccacatggtactatatactcccattaggcattttagaatttaaggctataatttaaaactattattgattattctaattctataggactgaaaaggcatttgcagaaatactctcattttcctgtttctatttctgtttatacggaacaaataacttatttatttaggctttcctatgttctctgggccattgataagggtcacaaaatatt

SEQ ID NO: 391784 - DNA, 207 bp, Homo sapiens
cagttaagacagggtttcaccatgttggccaagttggtctcaaactcctgacctcaggtgatccacctgccttggcctcctaaaatgctaggattacaggcatgagccactgcacctgtcctcaagtccctactttcaatgtgctttcccacccaacagccagcacctatggctctttttgggagggctgcacttgcttcacccttt

SEQ ID NO: 391785 - DNA, 396 bp, Homo sapiens
ttttgtttgtaggttacatgtccgaataccagcactcttgatagaagtgctacaaatgagaggtactaaagtagtttctggaagaaaatccaatttctactatgcgataatacggtttgatcatcaggaaggaaaaaaaaagttgtaaaccactgattccaaggatttttctcttcatcaagttctttctccttgttctacaatagccaatttaaagcatctgccttatgaattatcagccaatatttactggataaaaatgatacttattttcaggtacaaaggaaagagtcacagttaagcaaatgtagttctgggctgggcgcggtggctcacgcctgtaatcccagcactttgggaggccaaggtgggcagatcacgaggtcgagagaccat

SEQ ID NO: 391786 - DNA, 182 bp, Homo sapiens
tggtctcagaaggcagcctgccttcaaggagacaccacaggaaccatggtcaccaaaccctggatgggcccaggaaggaccaagctctgtcctgtagcagattggagcccagcaaggtctttttgagagagacttttttgggcaagggggatggtctgtgaccaaggaggtggacaaggcag

SEQ ID NO: 391787 - DNA, 178 bp, Homo sapiens
ttgttacaaatctaagaatgttaagaggtagcacaatatgaccctcaaaacagaaaatagatatcatcctaagggaaaacgtagtaccagaagaaataatccaaagtctattggttgaacacttacacgtgattatggagagcttctattattaaaattattatcaaaattgtctttg

SEQ ID NO: 391788 - DNA, 354 bp, Homo sapiens
ggtcttactgtgttgcccagactggacttgaacccctgggctcaagtgatcctcccacctcagcctccatagctgggacattcaggtgcatgccaccgcaccagcttaccagttttaatgaggttctagataggttaatagataggttaaacagcccataacagtaattcttaaacattttcaatagggtaattgcaattttgtttatggtttggaaagagcaatcataaaattgtattaagttcttgagataattataaaatctatgattgctccattcaatccttcaaacacaatgatggttttcttagaataagcaattctggtcattatgaaataaagatccagatccaa

SEQ ID NO: 391789 - DNA, 445 bp, Homo sapiens
acctcagaatctgtaggtttttaaattaatatacactcttctacccagattcaggaactgccaaaatagggatgacccttctctctggcctgtgctttcttgtgattctcttaattacagtaggaggaagttcgagaacactgagacaggaactggtcagaggaattttactgtcccattattccctatccaagaagatgctaaatcaaacttgtacactatctgtcctgcttccagcccttcttcaaaggtgggatttccataatcctcagccaactttatgagcatgatctggtgattgcttagagatttgggagaaaaagtagcagagaagaagagttctgactgctcttatcacttcctgttgcacagaaactgtgggtcagaggtgataccaatctttttatcatctgagacatgtaaagtgctcatatccaactgatct

SEQ ID NO: 391790 - DNA, 843 bp, Homo sapiens
cgtaattcggcttccggcatctggctgagttccgccatggcctccttggaagtcagtcgtagtcctcgcaggtctcggcgggagctggaagtgcgcagtccacgacagaacaaatattcggtgcttttacctacctacaacgagcgcgagaacctgccgctcatcgtgtggctgctggtgaaaagcttctccgagagtggaatcaactatgaaattataatcatagatgatggaagcccagatggaacaagggatgttgctgaacagttggagaagatctatgggtcagacagaattcttctaagaccacgagagaaaaagttgggactaggaactgcatatattcatggaatgaaacatgccacaggaaactacatcattattatggatgctgatctctcacaccatccaaaatttattcctgaatttattaggaagcaaaaggagggtaattttgatattgtctctggaactcgctacaaaggaaatggaggtgtatatggctgggatttgaaaagaaaaataatcagccgtggggccaattttttaactcagatcttgctgagaccaggagcatctgatttaacaggaagtttcagattataccgaaaagaagttctagagaaattaatagaaaaatgtgtttctaaaggctacgtcttccagatggagatgattgttcgggcaagacagttgaattatactattggcgaggccaatatcattggggatcgggttatggggatccagtggggggaatgaatagttcttctggaaggatatggcccttgcccactaaagaagaccctttagtgcgcacttcggtaactaagaaccggtttg

SEQ ID NO: 391791 - DNA, 1105 bp, Homo sapiens
cgtaattcggcttccggcatctggctgagttccgccatggcctccttggaagtcagtcgtagtcctcgcaggtctcggcgggagctggaagtgcgcagtccacgacagaacaaatattcggtgcttttacctacctacaacgagcgcgagaacctgccgctcatcgtgtggctgctggtgaaaagcttctccgagagtggaatcaactatgaaattataatcatagatgatggaagcccagatggaacaagggatgttgctgaacagttggagaagatctatgggtcagacagaattcttctaagaccacgagagaaaaagttgggactaggaactgcatatattcatggaatgaaacatgccacaggaaactacatcattattatggatgctgatctctcacaccatccaaaatttattcctgaatttattaggaagcaaaaggagggtaattttgatattgtctctggaactcgctacaaaggaaatggaggtgtatatggctgggatttgaaaagaaaaataatcagatctgattgttttatttggcagcccgtggggccaattttttaactcagatcttgctgagaccaggagcatctgatttaacaggaagtttcagattataccgaaaagaagttctagagaaattaatagaaaaatgtgtttctaaaggctacgtcttccagatggagatgattgttcgggcaagacagttgaattatactattggcgagggttccaatatcatttgtggatcgtgtttatggtgaatccaagttgggaggaaatgaaatagtatctttcttgaaaggattattgactctttttgctactacataaaagaaagatactcatttatagttacgttcatttcaggttaaacatgaaagaagcctggttactgatttgtataaaatgtactcttaaagtataaaatataaggtaaggtaaatttcatgcatctttttatgaagaccacctattttatatttcaaattaaataattttaaagttgctggcctaatgagcaatgttctcaattttcgttttcattttgctgtattgagacctataaataaatgtatatttttttttgcataaa

SEQ ID NO: 391792 - DNA, 865 bp, Homo sapiens
  misc_feature (8)..(8): n is a, c, g, or t
aatttccntccactcgctccctaataacctacatcattattatggatgctgatctctcacaccatccaaaatttattcctgaatttattgaagcaaaaggagggtaattttgatattgtctctggaactcgctacaaaggaaatggaggtgtatatggctgggatttgaaaagaaaaataatcagtgatggagttttgccatgttgcccaggctggtcactcctgggctcaagtgatccagccatcttggcctcctgggattacaggtgtgagccaccgcgcctagccagatctgattgttttatttggcagcccgtggggccaattttttaactcagatcttgctgagaccaggagcatctgatttaacaggaagtttcagattataccgaaaagaagttctagagaaattaatagaaaaatgtgtttctaaaggctacgtcttccagatggagatgattgttcgggcaagacagttgaattatactattggcgagggttccaatatcatttgtggatcgtgtttatggtgaatccaagttgggaggaaatgaaatagtatctttcttgaaaggattattgactctttttgctactacataaaagaaagatactcatttatagttacgttcatttcaggttaaacatgaaagaagcctggttactgatttgtataaaatgtactcttaaagtataaaatataaggtaaggtaaatttcatgcatctttttatgaagaccacctattttatatttcaaattaaataattttaaagttgctggcctaatgagcaatgttctcaattttcgttttcattttgctgtattgagacctataaataaatgtatatttttttttgcataaa

SEQ ID NO: 391793 - DNA, 847 bp, Homo sapiens
  misc_feature (740)..(740): n is a, c, g, or t
  misc_feature (756)..(758): n is a, c, g, or t
  misc_feature (762)..(762): n is a, c, g, or t
  misc_feature (769)..(769): n is a, c, g, or t
  misc_feature (777)..(777): n is a, c, g, or t
  misc_feature (783)..(783): n is a, c, g, or t
  misc_feature (787)..(788): n is a, c, g, or t
  misc_feature (800)..(800): n is a, c, g, or t
  misc_feature (804)..(804): n is a, c, g, or t
  misc_feature (806)..(806): n is a, c, g, or t
cgtaattcggcttccggcatctggctgagttccgccatggcctccttggaagtcagtcgtagtcctcgcaggtctcggcgggagctggaagtgcgcagtccacgacagaacaaatattcggtgcttttacctacctacaacgagcgcgagaacctgccgctcatcgtgtggctgctggtgaaaagcttctccgagagtggaatcaactatgaaattataatcatagatgatggaagcccagatggaacaagggatgttgctgaacagttggagaagatctatgggtcagacagaattcttctaagaccacgagagaaaaagttgggactaggaactgcatatattcatggaatgaaacatgccacaggaaactacatcattattatggatgctgatctctcacaccatccaaaatttattcctgaatttattaggaagcaaaaggagggtaattttgatattgtctctggaactcgctacaaaggaaatggaggtgtatatggctgggatttgaaaagaaaaataatcagattataccgaaaagaagttctagagaaattaatagaaaaatgtgtttctaaaggctacgtcttccagatggagatgattgttcgggcaagacagttgaattatactattggcgagggttccaatatcatttgtggatcgtgtttatggtgaatccaagttgggaggaaatgaaatagtatctttcttgaaaggattattgactctttgcnccactaaagaagaacnnnttangtcgccntcgttacntgaaancggnngttggtaaggcncagnanaaaagggggcccgcttttgacccttttttaaaataggggga

SEQ ID NO: 391794 - DNA, 1347 bp, Homo sapiens
cgtaattcggcttccggcatctggctgagttccgccatggcctccttggaagtcagtcgtagtcctcgcaggtctcggcgggagctggaagtgcgcagtccacgacagaacaaatattcggtgcttttacctacctacaacgagcgcgagaacctgccgctcatcgtgtggctgctggtgaaaagcttctccgagagtggaatcaactatgaaattataatcatagatgatggaagcccagatggaacaagggatgttgctgaacagttggagaagatctatgggtcagacagaattcttctaagaccacgagagaaaaagttgggactaggaactgcatatattcatggaatgaaacatgccacaggaaactacatcattattatggatgctgatctctcacaccatccaaaatttattcctgaatttattaggaagcaaaaggagggtaattttgatattgtctctggaactcgctacaaaggaaatggaggtgtatatggctgggatttgaaaagaaaaataatcagccgtggggccaattttttaactcagatcttgctgagaccaggagcatctgatttaacaggaagtttcagattataccgaaaagaagttctagagaaattaatagaaaaatgtgtttctaaaggctacgtcttccagatggagatgattgttcgggcaagacagttgaattatactattggcgagggttccaatatcatttgtggatcgtgtttatggtgaatccaagttgggaggaaatgaaatagtatctttcttgaaaggattattgactctttttgctactacataaaagaaagatactcatttatagttacgttcatttcaggttaaacatgaaagaagcctggttactgatttgtataaaatgtactcttaaagtataaaatataaggtaaggtaaatttcatgcatctttttatgaagaccacctattttatatttcaaattaaataattttaaagttgctggcctaatgagcaatgttctcaattttcgttttcattttgctgtattgagacctataaataaatgtatatttttttttgcataaaaaacacaacgggccccattggtctcaacgttgcacctctgcctacggtctcctttatgaggcgtgttcgccgacattccctcactgcccacccgccctccccccttcgccggcccctcttctccatcctgtcttccggcgcctatacccccatctcctcatccctgcctccctactgccagccccctcaccccacaccccatccgctctagttaccatacgttggcctggccactccccgcccccctcgcacaccctgcccccac

SEQ ID NO: 391795 - DNA, 1113 bp, Homo sapiens
cgtaattcggcttccggcatctggctgagttccgccatggcctccttggaagtcagtcgtagtcctcgcaggtctcggcgggagctggaagtgcgcagtccacgacagaacaaatattcggtgcttttacctacctacaacgagcgcgagaacctgccgctcatcgtgtggctgctggtgaaaagcttctccgagagtggaatcaactatgaaattataatcatagatgatggaagcccagatggaacaagggatgttgctgaacagttggagaagatctatgggtcagacagaattcttctaagaccacgagagaaaaagttgggactaggaactgcatatattcatggaatgaaacatgccacaggaaactacatcattattatggatgctgatctctcacaccatccaaaatttattcctgaatttattaggaagcaaaaggagggtaattttgatattgtctctggaactcgctacaaaggaaatggaggtgtatatggctgggatttgaaaagaaaaataatcagccgtggggccaattttttaactcagatcttgctgagaccaggagcatctgatttaacaggaagtttcagattataccgaaaagaagttctagagaaattaatagaaaaatgtgtttctaaaggctacgtcttccagatggagatgattgttcgggcaagacagttgaattatactattggcgagggttccaatatcatttgtggatcgtgtttatggtgaatccaagttgggaggaaatgaaatagtatctttcttgaaaggattattgactctttttgctactacataaaagaaagatactcatttatagttacgttcatttcaggttaaacatgaaagaagcctggttactgatttgtataaaatgtactcttaaagtataaaatataaggtaaggtaaatttcatgcatctttttatgaagaccacctattttatatttcaaattaaataattttaaagttgctggcctaatgagcaatgttctcaattttcgttttcattttgctgtattgagacctataaataaatgtatatttttttttgcataaaaactaaattactcacactggcggccgcgatc

SEQ ID NO: 391796 - DNA, 1370 bp, Homo sapiens
cgtaattcggcttccggcatctggctgagttccgccatggcctccttggaagtcagtcgtagtcctcgcaggtctcggcgggagctggaagtgcgcagtccacgacagaacaaatattcggtgcttttacctacctacaacgagcgcgagaacctgccgctcatcgtgtggctgctggtgaaaagcttctccgagagtggaatcaactatgaaattataatcatagatgatggaagcccagatggaacaagggatgttgctgaacagttggagaagatctatgggtcagacagaattcttctaagaccacgagagaaaaagttgggactaggaactgcatatattcatggaatgaaacatgccacaggaaactacatcattattatggatgctgatctctcacaccatccaaaatttattcctgaatttattaggaagcaaaaggagggtaattttgatattgtctctggaactcgctacaaaggaaatggaggtgtatatggctgggatttgaaaagaaaaataatcagccgtggggccaattttttaactcagatcttgctgagaccaggagcatctgatttaacaggaagtttcagattataccgaaaagaagttctagagaaattaatagaaaaatgtgtttctaaaggctacgtcttccagatggagatgattgttcgggcaagacagttgaattatactattggcgagggttccaatatcatttgtggatcgtgtttatggtgaatccaagttgggaggaaatgaaatagtatctttcttgaaaggattattgactctttttgctactacataaaagaaagatactcatttatagttacgttcatttcaggttaaacatgaaagaagcctggttactgatttgtataaaatgtactcttaaagtataaaatataaggtaaggtaaatttcatgcatctttttatgaagaccacctattttatatttcaaattaaataattttaaagttgctggcctaatgagcaatgttctcaattttcgttttcattttgctgtattgagacctataaataaatgtatatttttttttgcataaaaaaaaaacaaaaaacaaaaaaacaaaacaaaccccaacaccaaaaaaaaaaccaaaacaaaaaaacaaaacactcgccctctttgccctaagggggggacctttgggccctttcccttttggggggggtaaattcaggacccccgtcccttaattccctgccctcgggctttccctcgcgggcaccggtctccctatcccaaggggggaataccgtttttccccaaatccggggaacaccgcaccaaacacaccgtccccaagggcccccaaaaggcccgaacacctt

SEQ ID NO: 391797 - DNA, 1163 bp, Homo sapiens
cgtaattcggcttccggcatctggctgagttccgccatggcctccttggaagtcagtcgtagtcctcgcaggtctcggcgggagctggaagtgcgcagtccacgacagaacaaatattcggtgcttttacctacctacaacgagcgcgagaacctgccgctcatcgtgtggctgctggtgaaaagcttctccgagagtggaatcaactatgaaattataatcatagatgatggaagcccagatggaacaagggatgttgctgaacagttggagaagatctatgggtcagacagaattcttctaagaccacgagagaaaaagttgggactaggaactgcatatattcatggaatgaaacatgccacaggaaactacatcattattatggatgctgatctctcacaccatccaaaatttattcctgaatttattaggaagcaaaaggagggtaattttgatattgtctctggaactcgctacaaaggaaatggaggtgtatatggctgggatttgaaaagaaaaataatcagtgatggagttttgccatgttgcccaggctggtcactcctgggctcaagtgatccagccatcttggcctcctgggattacagccgtggggccaattttttaactcagatcttgctgagaccaggagcatctgatttaacaggaagtttcagattataccgaaaagaagttctagagaaattaatagaaaaatgtgtttctaaaggctacgtcttccagatggagatgattgttcgggcaagacagttgaattatactattggcgagggttccaatatcatttgtggatcgtgtttatggtgaatccaagttgggaggaaatgaaatagtatctttcttgaaaggattattgactctttttgctactacataaaagaaagatactcatttatagttacgttcatttcaggttaaacatgaaagaagcctggttactgatttgtataaaatgtactcttaaagtataaaatataaggtaaggtaaatttcatgcatctttttatgaagaccacctattttatatttcaaattaaataattttaaagttgctggcctaatgagcaatgttctcaattttcgttttcattttgctgtattgagacctataaataaatgtatatttttttttgcataaa

SEQ ID NO: 391798 - DNA, 1056 bp, Homo sapiens
cgtaattcggcttccggcatctggctgagttccgccatggcctccttggaagtcagtcgtagtcctcgcaggtctcggcgggagctggaagtgcgcagtccacgacagaacaaatattcggtgcttttacctacctacaacgagcgcgagaacctgccgctcatcgtgtggctgctggtgaaaagcttctccgagagtggaatcaactatgaaattataatcatagatgatggaagcccagatggaacaagggatgttgctgaacagttggagaagatctatgggtcagacagaattcttctaagaccacgagagaaaaagttgggactaggaactgcatatattcatggaatgaaacatgccacaggaaactacatcattattatggatgctgatctctcacaccatgaagcaaaaggagggtaattttgatattgtctctggaactcgctacaaaggaaatggaggtgtatatggctgggatttgaaaagaaaaataatcagccgtggggccaattttttaactcagatcttgctgagaccaggagcatctgatttaacaggaagtttcagattataccgaaaagaagttctagagaaattaatagaaaaatgtgtttctaaaggctacgtcttccagatggagatgattgttcgggcaagacagttgaattatactattggcgagggttccaatatcatttgtggatcgtgtttatggtgaatccaagttgggaggaaatgaaatagtatctttcttgaaaggattattgactctttttgctactacataaaagaaagatactcatttatagttacgttcatttcaggttaaacatgaaagaagcctggttactgatttgtataaaatgtactcttaaagtataaaatataaggtaaggtaaatttcatgcatctttttatgaagaccacctattttatatttcaaattaaataattttaaagttgctggcctaatgagcaatgttctcaattttcgttttcattttgctgtattgagacctataaataaatgtatatttttttttgcataaa

SEQ ID NO: 391799 - DNA, 1187 bp, Homo sapiens
cgtaattcggcttccggcatctggctgagttccgccatggcctccttggaagtcagtcgtagtcctcgcaggtctcggcgggagctggaagtgcgcagtccacgacagaacaaatattcggtgcttttacctacctacaacgagcgcgagaacctgccgctcatcgtgtggctgctggtgaaaagcttctccgagagtggaatcaactatgaaattataatcatagatgatggaagcccagatggaacaagggatgttgctgaacagttggagaagatctatgggtcagacagaattcttctaagaccacgagagaaaaagttgggactaggaactgcatatattcatggaatgaaacatgccacaggaaactacatcattattatggatgctgatctctcacaccatccaaaatttattcctgaatttattaggaagcaaaaggagggtaattttgatattgtctctggaactcgctacaaaggaaatggaggtgtatatggctgggatttgaaaagaaaaataatcagtgatggagttttgccatgttgcccaggctggtcactcctgggctcaagtgatccagccatcttggcctcctgggattacaggtgtgagccaccgcgcctagccagccgtggggccaattttttaactcagatcttgctgagaccaggagcatctgatttaacaggaagtttcagattataccgaaaagaagttctagagaaattaatagaaaaatgtgtttctaaaggctacgtcttccagatggagatgattgttcgggcaagacagttgaattatactattggcgagggttccaatatcatttgtggatcgtgtttatggtgaatccaagttgggaggaaatgaaatagtatctttcttgaaaggattattgactctttttgctactacataaaagaaagatactcatttatagttacgttcatttcaggttaaacatgaaagaagcctggttactgatttgtataaaatgtactcttaaagtataaaatataaggtaaggtaaatttcatgcatctttttatgaagaccacctattttatatttcaaattaaataattttaaagttgctggcctaatgagcaatgttctcaattttcgttttcattttgctgtattgagacctataaataaatgtatatttttttttgcataaa

SEQ ID NO: 391800 - DNA, 1013 bp, Homo sapiens
cgtaattcggcttccggcatctggctgagttccgccatggcctccttggaagtcagtcgtagtcctcgcaggtctcggcgggagctggaagtgcgcagtccacgacagaacaaatattcggtgcttttacctacctacaacgagcgcgagaacctgccgctcatcgtgtggctgctggtgaaaagcttctccgagagtggaatcaactatgaaattataatcatagatgatggaagcccagatggaacaagggatgttgctgaacagttggagaagatctatgggtcagacagaattcttctaagaccacgagagaaaaagttgggactaggaactgcatatattcatggaatgaaacatgccacaggaaactacatcattattatggatgctgatctctcacaccatccaaaatttattcctgaatttattaggaagcaaaaggagggtaattttgatattgtctctggaactcgctacaaaggaaatggaggtgtatatggctgggatttgaaaagaaaaataatcagattataccgaaaagaagttctagagaaattaatagaaaaatgtgtttctaaaggctacgtcttccagatggagatgattgttcgggcaagacagttgaattatactattggcgagggttccaatatcatttgtggatcgtgtttatggtgaatccaagttgggaggaaatgaaatagtatctttcttgaaaggattattgactctttttgctactacataaaagaaagatactcatttatagttacgttcatttcaggttaaacatgaaagaagcctggttactgatttgtataaaatgtactcttaaagtataaaatataaggtaaggtaaatttcatgcatctttttatgaagaccacctattttatatttcaaattaaataattttaaagttgctggcctaatgagcaatgttctcaattttcgttttcattttgctgtattgagacctataaataaatgtatatttttttttgcataaa

SEQ ID NO: 391801 - DNA, 1024 bp, Homo sapiens
cgtaattcggcttccggcatctggctgagttccgccatggcctccttggaagtcagtcgtagtcctcgcaggtctcggcgggagctggaagtgcgcagtccacgacagaacaaatattcggtgcttttacctacctacaacgagcgcgagaacctgccgctcatcgtgtggctgctggtgaaaagcttctccgagagtggaatcaactatgaaattataatcatagatgatggaagcccagatggaacaagggatgttgctgaacagttggagaagatctatgggtcagacagaattcttctaagaccacgagagaaaaagttgggactaggaactgcatatattcatggaatgaaacatgccacaggaaactacatcattattatggatgctgatctctcacaccatccaaaatttattcctgaatttattaggaagcaaaaggagggtaattttgatattgtctctggaactcgctacaaaggaaatggaggtgtatatggctgggatttgaaaagaaaaataatcagccgtggggccaattttttaactcagatcttgctgagaccaggagcatctgatttaacaggaagtttcagattataccgaaaagaagttctagagaaattaatagaaaaatgtgtttctaaaggctacgttccaatatcatttgtggatcgtgtttatggtgaatccaagttgggaggaaatgaaatagtatctttcttgaaaggattattgactctttttgctactacataaaagaaagatactcatttatagttacgttcatttcaggttaaacatgaaagaagcctggttactgatttgtataaaatgtactcttaaagtataaaatataaggtaaggtaaatttcatgcatctttttatgaagaccacctattttatatttcaaattaaataattttaaagttgctggcctaatgagcaatgttctcaattttcgttttcattttgctgtattgagacctataaataaatgtatatttttttttgcataaa

SEQ ID NO: 391802 - DNA, 1244 bp, Homo sapiens
  misc_feature (1230)..(1230): n is a, c, g, or t
  misc_feature (1232)..(1232): n is a, c, g, or t
cgtaattcggcttccggcatctggctgagttccgccatggcctccttggaagtcagtcgtagtcctcgcaggtctcggcgggagctggaagtgcgcagtccacgacagaacaaatattcggtgcttttacctacctacaacgagcgcgagaacctgccgctcatcgtgtggctgctggtgaaaagcttctccgagagtggaatcaactatgaaattataatcatagatgatggaagcccagatggaacaagggatgttgctgaacagttggagaagatctatgggtcagacagaattcttctaagaccacgagagaaaaagttgggactaggaactgcatatattcatggaatgaaacatgccacaggaaactacatcattattatggatgctgatctctcacaccatccaaaatttattcctgaatttattaggaagcaaaaggagggtaattttgatattgtctctggaactcgctacaaaggaaatggaggtgtatatggctgggatttgaaaagaaaaataatcagattataccgaaaagaagttctagagaaattaatagaaaaatgtgtttctaaaggctacgtcttccagatggagatgattgttcgggcaagacagttgaattatactattggcgagggttccaatatcatttgtggatcgtgtttatggtgaatccaagttgggaggaaatgaaatagtatctttcttgaaaggattattgactctttttgctactacataaaagaaagatactcatttatagttacgttcatttcaggttaaacatgaaagaagcctggttactgatttgtataaaatgtactcttaaagtataaaatataaggtaaggtaaatttcatgcatctttttatgaagaccacctattttatatttcaaattaaataattttaaagttgctggcctaatgagcaatgttctcaattttcgttttcattttgctgtattgagacctataaataaatgtatatttttttttgcataaaaaagtattgctgccttcattagagtatgtgaatgtagaattttttacatggggaataatttgaaatagtctttttaaaaactggaatcatagatctttatacctaattgatctcagaagtaagataatgttaactgatgaaatgtttatggctgtgtctgtatgaattgaaaaagaaatacacacctctgccctttccttaaaaaaaaaaaatcggncntcgtggcctcaa

SEQ ID NO: 391803 - DNA, 400 bp, Homo sapiens
cgtaattcggcttccggcatctggctgagttccgccatggcctccttggaagtcagtcgtagtcctcgcaggtctcggcgggagctggaagtgcgcagtccacgacagaacaaatattcggtgcttttacctacctacaacgagcgcgagaacctgccgctcatcgtgtggctgctggtgaaaagcttctccgagagtggaatcaactatgaaattataatcatagatgatggaagcccagatggaacaagggatgttgctgaacagttggagaagatctatgggtcagacagaattttctaattactcacgagagtaatatttgtaccttgggaccccttatcatttatggtatgattcatgcctcacggaactaacgtcttatttttggattgctagc

SEQ ID NO: 391804 - DNA, 446 bp, Homo sapiens
aaagtattgctgccttcattagagtatgtgaatgtagaattttttacatggggaataatttgaaatagtctttttaaaaactggaatcatagatctttatacctaattgatctcagaagtaagataatgttaactgatgaaatgtttatggctgtgtctgtatgaattgaaaaagaaatacacacctctgccctttccttaaaaatgtatctcaaatttcttaaactagaaaatacatttagagcaggcatttacagttcggttcttttcagctgttgaattgatgaaacatttcatctatcaaagcaggtctatttaaaatgcatattgtgaattgggaaacaatttgacagcagttgattacatagccgtttttttctcttttgagcaataacctctatcagtaaggaaaaatattaatgacactgaggcagaaacttagctgc

SEQ ID NO: 391805 - DNA, 497 bp, Homo sapiens
tcccctaattttatacttactttaaggacctctgttgtaggactaatcctatttctgttgtgttggtaatgtggtataccggctaagctgcctaattgtttttaaagactaacgttacttttttttttttaaactaggttccaatatcatttgtggatcgtgtttatggtgaatccaagttgggaggaaatgaaatagtatctttcttgaaaggattattgactctttttgctactacataaaagaaagatactcatttatagttacgttcatttcaggttaaacatgaaagaagcctggttactgatttgtataaaatgtactcttaaagtataaaatataaggtaaggtaaatttcatgcatctttttatgaagaccacctattttatatttcaaattaaataattttaaagttgctggcctaatgagcaatgttctcaattttcgttttcattttgctgtattgagacctataaataaatgtatattttttttt

SEQ ID NO: 391806 - DNA, 1082 bp, Homo sapiens
cgtaattcggcttccggcatctggctgagttccgccatggcctccttggaagtcagtcgtagtcctcgcaggtctcggcgggagctggaagtgcgcagtccacgacagaacaaatattcggtgcttttacctacctacaacgagcgcgagaacctgccgctcatcgtgtggctgctggtgaaaagcttctccgagagtggaatcaactatgaaattataatcatagatgatggaagcccagatggaacaagggatgttgctgaacagttggagaagatctatgggtcagacagaattcttctaagaccacgagagaaaaagttgggactaggaactgcatatattcatggaatgaaacatgccacaggaaactacatcattattatggatgctgatctctcacaccatccaaaatttattcctgaatttattaggaagcaaaaggagggtaattttgatattgtctctggaactcgctacaaaggaaatggaggtgtatatggctgggatttgaaaagaaaaataatcagccgtggggccaattttttaactcagatcttgctgagaccaggagcatctgatttaacaggaagtttcagattataccgaaaagaagttctagagaaattaatagaaaaatgtgtttctaaaggctacgtcttccagatggagatgattgttcgggcaagacagttgaattatactattggcgagggttccaatatcatttgtggatcgtgtttatggtgaatccaagttgggaggaaatgaaatagtatctttcttgaaaggattattgactctttttgctactacataaaagaaagatactcatttatagttacgttcatttcaggttaaacatgaaagaagcctggttactgatttgtataaaatgtactcttaaagtataaaatataaggtaaggtaaatttcatgcatctttttatgaagaccacctattttatatttcaaattaaataattttaaagttgctggcctaatgagcaatgttctcaattttcgttttcattttgctgtattgagacctataaataaatgtatatttttttttgcataaa

SEQ ID NO: 391807 - DNA, 737 bp, Homo sapiens
  misc_feature (8)..(8): n is a, c, g, or t
aatttccntccactcgctccctaataacctacatcattattatggatgctgatctctcacaccatccaaaatttattcctgaatttattgaagcaaaaggagggtaattttgatattgtctctggaactcgctacaaaggaaatggaggtgtatatggctgggatttgaaaagaaaaataatcagccgtggggccaattttttaactcagatcttgctgagaccaggagcatctgatttaacaggaagtttcagattataccgaaaagaagttctagagaaattaatagaaaaatgtgtttctaaaggctacgtcttccagatggagatgattgttcgggcaagacagttgaattatactattggcgagggttccaatatcatttgtggatcgtgtttatggtgaatccaagttgggaggaaatgaaatagtatctttcttgaaaggattattgactctttttgctactacataaaagaaagatactcatttatagttacgttcatttcaggttaaacatgaaagaagcctggttactgatttgtataaaatgtactcttaaagtataaaatataaggtaaggtaaatttcatgcatctttttatgaagaccacctattttatatttcaaattaaataattttaaagttgctggcctaatgagcaatgttctcaattttcgttttcattttgctgtattgagacctataaataaatgtatatttttttttgcataaa

SEQ ID NO: 391808 - DNA, 892 bp, Homo sapiens
gatcgtgtttatggtgaatccaagttgggaggaaatgatattggaacctcgcccgtggggccaattttttaactcagatcttgctgagaccaggagcatctgatttaacaggaagtttcagattataccgaaaagaagttctagagaaattaatagaaaaatgtgtttctaaaggctacgtcttccagatggagatgattgttcgggcaagacagttgaattatactattggcgagggttccaatatcatttgtggatcgtgtttatggtgaatccaagttgggaggaaatgaaatagtatctttcttgaaaggattattgactctttttgctactacataaaagaaagatactcatttatagttacgttcatttcaggttaaacatgaaagaagcctggttactgatttgtataaaatgtactcttaaagtataaaatataaggtaaggtaaatttcatgcatctttttatgaagaccacctattttatatttcaaattaaataattttaaagttgctggcctaatgagcaatgttctcaattttcgttttcattttgctgtattgagacctataaataaatgtatatttttttttgcataaaaaaaaaacaaaaaacaaaaaaacaaaacaaaccccaacaccaaaaaaaaaaccaaaacaaaaaaacaaaacactcgccctctttgccctaagggggggacctttgggccctttcccttttggggggggtaaattcaggacccccgtcccttaattccctgccctcgggctttccctcgcgggcaccggtctccctatcccaaggggggaataccgtttttccccaaatccggggaacaccgcaccaaacacaccgtccccaagggcccccaaaaggcccgaacacctt

SEQ ID NO: 391809 - DNA, 1147 bp, Homo sapiens
cgtaattcggcttccggcatctggctgagttccgccatggcctccttggaagtcagtcgtagtcctcgcaggtctcggcgggagctggaagtgcgcagtccacgacagaacaaatattcggtgcttttacctacctacaacgagcgcgagaacctgccgctcatcgtgtggctgctggtgaaaagcttctccgagagtggaatcaactatgaaattataatcatagatgatggaagcccagatggaacaagggatgttgctgaacagttggagaagatctatgggtcagacagaattcttctaagaccacgagagaaaaagttgggactaggaactgcatatattcatggaatgaaacatgccacaggaaactacatcattattatggatgctgatctctcacaccatccaaaatttattcctgaatttattaggaagcaaaaggagggtaattttgatattgtctctggaactcgctacaaaggaaatggaggtgtatatggctgggatttgaaaagaaaaataatcagccgtggggccaattttttaactcagatcttgctgagaccaggagcatctgatttaacaggaagtttcagattataccgaaaagaagttctagagaaattaatagaaaaatgtgtttctaaaggctacgtcttccagatggagatgattgttcgggcaagacagttgaattatactattggcgagggttccaatatcatttgtggatcgtgtttatggtgaatccaagttgggaggaaatgaaatagtatctttcttgaaaggattattgactctttttgctactacataaaagaaagatactcatttatagttacgttcatttcaggttaaacatgaaagaagcctggttactgatttgtataaaatgtactcttaaagtataaaatataaggtaaggtaaatttcatgcatctttttatgaagaccacctattttatatttcaaattaaataattttaaagttgctggcctaatgagcaatgttctcaattttcgttttcattttgctgtattgagacctataaataaatgtatatttttttttgcataaaccccaccacaaccacacctacacacgaaccactccccacatcaccccccgcctcgtttggcctca

SEQ ID NO: 391810 - DNA, 1108 bp, Homo sapiens
  misc_feature (1094)..(1094): n is a, c, g, or t
  misc_feature (1096)..(1096): n is a, c, g, or t
cgtaattcggcttccggcatctggctgagttccgccatggcctccttggaagtcagtcgtagtcctcgcaggtctcggcgggagctggaagtgcgcagtccacgacagaacaaatattcggtgcttttacctacctacaacgagcgcgagaacctgccgctcatcgtgtggctgctggtgaaaagcttctccgagagtggaatcaactatgaaattataatcatagatgatggaagcccagatggaacaagggatgttgctgaacagttggagaagatctatgggtcagacagaattcttctaagaccacgagagaaaaagttgggactaggaactgcatatattcatggaatgaaacatgccacaggaaactacatcattattatggatgctgatctctcacaccatccaaaatttattcctgaatttattaggaagcaaaaggagggtaattttgatattgtctctggaactcgctacaaaggaaatggaggtgtatatggctgggatttgaaaagaaaaataatcagccgtggggccaattttttaactcagatcttgctgagaccaggagcatctgatttaacaggaagtttcagattataccgaaaagaagttctagagaaattaatagaaaaatgtgtttctaaaggctacgtcttccagatggagatgattgttcgggcaagacagttgaattatactattggcgagggttccaatatcatttgtggatcgtgtttatggtgaatccaagttgggaggaaatgaaatagtatctttcttgaaaggattattgactctttttgctactacataaaagaaagatactcatttatagttacgttcatttcaggttaaacatgaaagaagcctggttactgatttgtataaaatgtactcttaaagtataaaatataaggtaaggtaaatttcatgcatctttttatgaagaccacctattttatatttcaaattaaataattttaaagttgctggcctaatgagcaatgttctcaattttcgttttcattttgctgtattgagacctataaataaatgtatatttttttttgcataaaaaaaaaatcggncntcgtggcctcaa

SEQ ID NO: 391811 - DNA, 1067 bp, Homo sapiens
cgtaattcggcttccggcatctggctgagttccgccatggcctccttggaagtcagtcgtagtcctcgcaggtctcggcgggagctggaagtgcgcagtccacgacagaacaaatattcggtgcttttacctacctacaacgagcgcgagaacctgccgctcatcgtgtggctgctggtgaaaagcttctccgagagtggaatcaactatgaaattataatcatagatgatggaagcccagatggaacaagggatgttgctgaacagttggagaagatctatgggtcagacagaattcttctaagaccacgagagaaaaagttgggactaggaactgcatatattcatggaatgaaacatgccacaggaaactacatcattattatggatgctgatctctcacaccatccaaaatttattcctgaatttattagtgatggagttttgccatgttgcccaggctggtcactcctgggctcaagtgatccagccatcttggcctcctgggattacagccgtggggccaattttttaactcagatcttgctgagaccaggagcatctgatttaacaggaagtttcagattataccgaaaagaagttctagagaaattaatagaaaaatgtgtttctaaaggctacgtcttccagatggagatgattgttcgggcaagacagttgaattatactattggcgagggttccaatatcatttgtggatcgtgtttatggtgaatccaagttgggaggaaatgaaatagtatctttcttgaaaggattattgactctttttgctactacataaaagaaagatactcatttatagttacgttcatttcaggttaaacatgaaagaagcctggttactgatttgtataaaatgtactcttaaagtataaaatataaggtaaggtaaatttcatgcatctttttatgaagaccacctattttatatttcaaattaaataattttaaagttgctggcctaatgagcaatgttctcaattttcgttttcattttgctgtattgagacctataaataaatgtatatttttttttgcataaa

SEQ ID NO: 391812 - DNA, 427 bp, Homo sapiens
cgtaattcggcttccggcatctggctgagttccgccatggcctccttggaagtcagtcgtagtcctcgcaggtctcggcgggagctggaagtgcgcagtccacgacagaacaaatattcggtgcttttacctacctacaacgagcgcgagaacctgccgctcatcgtgtggctgctggtgaaaagcttctccgagagtggaatcaactatgaaattataatcatagatgatggaagcccagatggaacaagggatgttgctgaacagttggagaagatctatgggtcagacagaattcttctaagaccacgagagaaaaagttgggactaggaactgcatatattcatggaatgaaacatgccacaggaaactacatcattattatggatgctgatctctcacaccatgtaagtggtatgtttcttt

SEQ ID NO: 391813 - DNA, 425 bp, Homo sapiens
catggataagttctttagtggtgatttctgagattttggtgtacccatcacctgaggagtatacactgtacccaatgtgtaatctctcatctatcactcctctgctactctttctccctagtccccagagttcatgatatcattcatatgccttcgcaacctcataaataatttttaatttttttcagacaaaatatagctacgttacatatgtgtaatcttgatatatttaaaaatgcaatgcattttgaggttaaaagatgacataatgataaacatcttcaaccacacactctctatataagggaattacggcccagagagattaaacactgcattagctcacataatcatcagaggacctgaaatgagagcaaaggttcttcatgtcatgcctaatgataatatattccccactgtgcttc

SEQ ID NO: 391814 - DNA, 679 bp, Homo sapiens
tatgaaatcttttaaaaatatctaggatctgctatacttatgttgaatatataagttgggcttcctagcttcagataacagtgaaatttgcttatatttatttcacatccagttgaataatgacttaatgacattgaaatgaaataaaacttctagatattttaatgtatgtgtatatgtctgacgctaaatgtaagccaatatatcccacattttagtgtacataagaattaccccgaaatgcaaattgaaatccaggttcctgagcatcacctctaacctcctctatctgtgtcttggagaggttaaaggaatctgcccttttcttcccgagtacttttttgagagaaaatacaaacagaaaaatacatacatcttagctgtataactcagtgactttgcatatgaaaactccggcatcatcaccacttaaatcaagatgtaagaacatttccatcatctctggagaattcttttgtgcttctttctggtcggtactgccatgcctagtccccactccccccccactcctttctcaagtgactactattctgatttctgtcaccatactgatattcttatggcagtgatctgtcagtcatatgataaatagtgccctatgtacttttcagctcttattttagatggtggaataccctgaaatattatgtgcaagatg

SEQ ID NO: 391815 - DNA, 424 bp, Homo sapiens
gactcaacatcccctgggagggtcacagcatctcctaaattctattcaattcgctctgcacgtactgagcacctgctttatgccattaccttgcttctaactatggcttaggaaagaacaagactcgcccctgagtttgaggaactatctattagagccatgagacagatacatcagatacaaacaaatcagcaggaacaatagaaacctgtaaattagtactgaccaaaatgatagttacagataaaaaacatatctcagatgctggaaggggaggttactgtgaactcaagcgatttgggaaggctttctgaggcagcacagggttgcagctcaaggctgaaggcaatctaacaggatacagtggggggccaagtgcggtggctcatgcctgtaatcccagcactttcaaactccaaggcag

SEQ ID NO: 391816 - DNA, 445 bp, Homo sapiens
tcgaagctcttattatttgcactgtggcagattcacttgagttcagaagcctagggaaaaggtgggacttttgaaactagggcagtaggtaaatgtggacacaccttcgtttgtatttgattagggatctgacagcgtgcatatgtgtacaggtttgcacgtgtgcatacacacatatacaaatcatagaaaaccataggtgttctgtgagagagaaaattttgctacttaaatacagcgtgaattctcatcctgatagttgcagaaaatatttcttttaaaatggagattaatgtctaattccatataaagaagattataggaaaggtgatttaaactgtaagtagctttgttcaccaaaacgctagatttatttgaaacagtgttttatttcttttggaaggcagacaactagtttaatagtgtacatatgaaacgctaattt

SEQ ID NO: 391817 - DNA, 576 bp, Homo sapiens
tgtttatctgacttcaaagcccatacttaaataattgcttctgtgtaatgttttttctctcctcttaaaccaaagttttagaaatagtcagcattagaatttcaagtactttatattccagcttgttaactgaaaatgagatatttaatttatatgcacagtaatgcatataacaccagtgctttataaaaaatgtggaagactgttacaagtatggacaaaattacacatttaactttaaaaaggtagcatttattcttttcttactgaaagcaaatattaaaaggcagaagttcatctctcatcgatcatattgtttttattaagaattaataacaagtgatatttgaatcttttaaaacaaacctatttaatttagctcagatgaagaaatttattggtgtcctaaaagccacctggaagataacctttttgtggtgttggatggtattcatcatatttatctcttgaaactcttagcttttgtgatggtattgcaccaccttgcttctcctttgacttttcttgccgtctgtatcatttgctaagcaaattctcagtcatgacttgtgatca

SEQ ID NO: 391818 - DNA, 330 bp, Homo sapiens
ctgaaaccctcctatgcactgagtgcttcattataacatctctaattcttacatctacaatgccagttacctattcctgtcctcggtttatggagaaggaaacagatatgcttaataacacacaaatctacaaatgtgttatcctcatattatggatgaggaggctgagccacagggaggcaaaataagttttccaagaacaatcactgcaaagctctggaggtgggatctgagtccagcactaccttgctgcattctccttgatactcccattgcatgtgttgcctcgcacaggatgctgtagggataggtgattctgtattttctagg

SEQ ID NO: 391819 - DNA, 408 bp, Homo sapiens
ttggattcagacggatctgagttctaatcctgactctgctctattcaagttatttgacctctatgtaactatttctttacctgaaaagtagagaatataactcctagcaagtagtgggtactcaagataagatggttttctggccaggtgtggtggctcatgcctgtaatcctagcactttgggaggctgaggtgggtggatcacctgaggtcaagagttcaagaccggcctggccaacatggtgaaaccccatctctattaaaaatacaaaattagccaggtgtggtggcaggcacctgtaatgtcagctactcgggaggctgaggcaggagaattgcttgaacctgggaggtggagattgcagtgagccaagctcatcatgccattgcactccagtctgggtgaca

SEQ ID NO: 391820 - DNA, 580 bp, Homo sapiens
ggagttgggcaatcatgtggagcttggacacctcaggaagtcaggacatggttggtgactgtatcccatcaccgttacttagctttatggttttctgaaagcaggttgctgcctgctgggatcaccttgacaactaagagcttctcttgcaggtgaaacttgcctaagtacttggtaaggtctgcagggaaattgagggctccaggaaggtggtaaggtgcgagaacaccttcactgcctctcctccctctccccttttttttttttgagacagagtctcgctctgtcacccaagctggagtggcagtgtgatctcggctcactgcaacctccacctcccaggttcaagcgattctcctgcctcagcctcccaagtagctgggattacaggcgtgagccaccaggcccggactaattttttttggtgtagacggggtttctccatgttggccaggctggtttcaaactcctgactcaagtgatctgcctgcctcggcctcccaaaatgataggattacaggcgtgagccaccacaccctgctctctcctctctctctgggactaaatcatccatgagtat

SEQ ID NO: 391821 - DNA, 508 bp, Homo sapiens
ctgactcagcctcctgagtagctggagttacaggcgcctgcaaccatgcccgctaatttattttatttttttagtagagacggggtttcactgtgttagccaggatgatctcaatctcctgaccttgcgatccgcccgccttggactctcgaagtgttgggattacaggcgtgagccactgcacctggcctttttttttgcagagtctcactatgtagcccaggctggagtgcagtggtgtgatctcactgcatcctctgcctcctgggttcaagcgattctcctgcctcagcctcttcagtagcttggattacaggcacccgccaccaagcccggctaatttttttatatttttagcagagatggggtttcaccatgctggccagactggtcttgaactcctaacttcaagtgatccaccgcacccagcgtgaggcatggtcttgaatatgcatgtctcacatttccaggtgatactgctgctgctggtctgaggactacagttgga

SEQ ID NO: 391822 - DNA, 336 bp, Homo sapiens
cggcccctggagctgcggccgggcgtgggtcagtcgttcacgggcccggaaattccactgggacacccgaaaaagtgctgcacgccgcctgagggagacggaaagggacccggggcactgagtccattgctggggtcgccagggtacgtggcaggacccgctgtgcacactcgggactgaggagacccctgggacgcggagagccgctccagggcagaaccagtccgtcagcatttagccttccacgggcctgagggtgcgagccctgcgggggccacagggtcattgtccaaagtcatccccgtttgcactgtggcagcaccgaacccggaagta

SEQ ID NO: 391823 - DNA, 109 bp, Homo sapiens
ttctttagctgaataagttatgtggtcctgcttttactattttaaccatttgacttcacagctttaaatgccatcttcatctatcttcttacatgcttttggtaagttt

SEQ ID NO: 391824 - DNA, 426 bp, Homo sapiens
tgtgtatgaggatttctgctttgttttttccttagcagagctgatctctatcaggatgcaggagttattttgagcagtttaagggacatctggaggaggcacaaagagtggagcctctgaagagggaatctgggagtcgaggaccaagtcctcggtgaatctgggcactggctgggagttccaggaccctctggaggaagaaaaggggatttggattcagcagcagcagcagaggaagacccagaagaacatgccggggtctgacaaggtaaaagaaaagactcaactgagtggccctggtgctcgcagacttggggtaggcagttcacgtgtgctcatgtggcttcattgccctgcgctgtgtctgatcactgataaatcataggtccagacccgtggcagctgtgtcagtatatggtcagcctg

SEQ ID NO: 391825 - DNA, 134 bp, Homo sapiens
gccagataccaggcttaaacagtattctctgatccttaagtctatattcctgagtggatgaaactgttaattatccaccattgtccccgtctttcttctagtaatagaagctcccaagttttaggtagacacat

SEQ ID NO: 391826 - DNA, 697 bp, Homo sapiens
acatttacaggaatgtttattgcaacattgtttaaaacaagagaaaaaaacagaaacaaagtaaatgttcaccaacaggagactggataaacaaagtataatgtataatggaatatgttgtagcagttaaaataaagaaagaaaagctacatatatcattatagtctacgtagtatcaacttggataaacctcaaaagtcattagtagtgagcaaaaaaagcaggttgcagaaggatacatacaatatgataccagttatatacaatgtttatggttcaacttttccagtctggtttattgagctacaatttgcatacagtgaaattgactagtctttgtgtacagttttgtgagtctggcagaatgcatacctttaggtagacatcatcacaatcaagatataaaagggttccatcattccccaaaattgcacactgccctattgtagtcaagtcttacccccacctcacatctcctgtaatcatggagcacatagcattttgagtctgtcttcttccacttagcataatgcctttgagattcattcatgttgttgagtatctcaacggctttttttttaactgctgaatagtagtctactgtatggatgtaccaatttatccattctgtagttgaagtgcatttgacttgtttgtactttggggcaattataaataaactgaccataaatatttg

SEQ ID NO: 391827 - DNA, 215 bp, Homo sapiens
gaagggtgaacactaacatctggagctagagacagcctcttgggagtcatttctgtacaagtggtcattgagatgacatggagtggataaaactgtgtgaagagttgagaaaaagaggaataaaaccctagggagcatttaagagtggagagagaaggctgtggaggaggcagagagagagtagggtcagcaggtcagaagagatcccagaggcg

SEQ ID NO: 391828 - DNA, 411 bp, Homo sapiens
gggagggggctcacaggcattctcttccagtatgtatgagtccttgatccagtagagccttgaaagaatgtggaactacaatgagtagtcagggattctgatgccctgggagtgggttacctggactcagccagagtgctgcagatgggctgctggcctagcctccttgctggcctagcctccttcccggcctagcctccttcccttccccaaggctggcctggaatcattctggcctcggggtagaggggaagtggcagccatcagggcatttccctcctgatcccactgtccactggctgtttggggtcactgtcctcagcattctagtagcgccccctctgaactccagctgcttcttcacaactcactttatccaccattcgcattacgtatttttggcacccattt

SEQ ID NO: 391829 - DNA, 130 bp, Homo sapiens
ccgcagggcttgtaaaaatgaactgtgattactactctggaaaggtctctcatctgactggggagaagggccacacacacaaacaagagcagcaaagcatgtagtgcctgcggaaagagctgctgatgga

SEQ ID NO: 391830 - DNA, 369 bp, Homo sapiens
agcaagttgctcaataaatagctcatcaccctaaaaataacgaggtctctgatgagacttagtctctaatgaaactaagcacaggactgagggggtgaagagcaagcagaaaatggatttccaccatgggctagactgttcacgtggcccagtggtggagagaatccttagggaaagcctaactccgaagcccagagaaggaaggaaaactaataaggagtgtgttttgcaggctgatttttctgaagttatccataggaaaattcatttatgtgagaggctaattagtcatgacagtgctttgctccagacataattgcattggtcccatgcagtctctgtgggtcagcctgtaatggaatttccatt

SEQ ID NO: 391831 - DNA, 293 bp, Homo sapiens
acagatgggttcagttataaggttatgcttcaacaaaaaagtgcagacatggcagcttgtaactgaccattgccacagaaattaaaattggggagataccatggagcaaacgttcttaatcctctttataataaccaagtcttaaggtttattatttgtagcctgatgcccattaaactattgagcaactttggaaatctatgtggagcaacagcttgtattttgcttgcactaacttgctagaaaatgcatatttaataagcttaatgatctctctagagaggcatattttg

SEQ ID NO: 391832 - DNA, 3621 bp, Homo sapiens
  misc_feature (915)..(915): n is a, c, g, or t
  misc_feature (1258)..(1258): n is a, c, g, or t
tagggaattttggccctcgaggcccaagaattcggcacagcggtaggagaatcacttgaacctgggaagtggagattgaggtgagccgagattgcaccattgccactccagcctgagcaacaagagcgaaactcgcactccgccacccacatgccaactgacttgatgcttaataaaactgctgctgcctgtttgattctatttaatgtataatttgaatattaaaccttttaacagaactgtcaacaaggacctgattttttttgtcaattgagcaggtgggaccagtgcagagagtagtgggcatttaactcacaggactgtgcacagcgggcatgcgagtgaccattagtgccctggaataaacaaaggtgcaggatggggtcaagtggcgcattctcataaaagcagccagctctacgttagcctgtcgccaccagaccaccccacttccattctgaatacgggaagcagccattctcagtagcaagctgagccaaaatgaccgaaggcatctgaacaggaaacaggtagagaaagcaaacatctcagttttggaattctttattactttgaacccaagagccactgataactggcacaatccaatgaaacagaggaagcagcagcttaaacaaaggaaaatacatttaagattataagtctgggggggcggttacaagcttaaaaagtgacccagacagggatatcattgctaaaaaaaaaaaaatccccttgtgacctgggtacattttgcaaagccacaggtttgcaatgttacacaagggccaaaggaggccatgagttgtctttggttgtggggacagagggtaactgttcatgaaaatagtgagtgtctgaagattaagaaaatcatgctgcagcagaggagaagggagaggaagacaggaaggnaaaggagatgcctgagggtcaaaagctgagcccaagcctaagcccaagctcaagctcaagccccagcatggcataattttgtgaattaactcaggctgagttgcctccagtctttggaatgtcatcttatactggtactgctgaggcagagggcagtaattggtgctttgggataggagaaggggcagttgctgaaatacaaaattaatagcatcccaagttcctcaattgcagccaaaatacatgtgttcgggcctttcggcagtatcgcccccagaactacctgctgtagtgtggtccattcccagacagcaacatgcaagaataagtttacaatacactnagcccttctggcttcagatcaggggctcagaggctgtgacaactcatgatgctgaaaatgtatccagtgaaaatgaagtactagctctctgcttcattaaaagctcttggaaagaatattaaatctcaagacaacaaaataattgaacacacaatacatttgtgtctttgtatccaatatattacctttgtcttattaacaaaaattatatctctcattatatatttcttggatctgaagtttttattcacactcagtaatttctgtaaaggacaaatctgtctctattttccatatcatttagaaatataccacattcactctttttgatgtgaactttcccaggaaaattctcttgtgcccatttagttttagaagagtgtcattttgtgctattatgtcaatatcctgttttatttccattatgtttttcaaaaaccgaagaaaataaggtttttcttaaaaagttagacattttctcttgttaattctgtatcctgttatttacagctgaagagaaactattttaacttaagtgtaaaatggtttagaatagcaaatgatacagtccactcagagtttacaaaaaaaacatttaccaggtagacacttaataaataaaacaagcacttggaaaaagttctttgaaaacagacctagggacatccacctgcatcttttgcacagattttgttaagaaaaggccagatctaaaaatgtactgtcaagaaacaagcaaaccaatgcatacatacgtaggtattctaaacagaggttcatgtggtgtccatttagagtgactgatgtaaatgccagttgtagaagtgttaatctaaatcttttactcggcgacagatttcctctgtgaagtctgagcattttgcattgcctcccaaatcttttgtcaagctctgagaaaaggaaaaagcaaaaataaaagatgtatccgcaaactaaactaaaccaaggagattttaaagccctcagtgagatgccacctgggcaagttactcggctgctctttcatttagttcctcatttcaaagtgaggaaccactccaccaccatctacccagcccaggaggatcgggatccaatctcatagtgtatacaacagcactctgcaaagaataaggtgctcttgatgcaaagggaggcagggagctttaccaaaattttccctttgttcacacaatagaccctaacccagattagttggtcatggatatttaaataaaagcgaatctaaataagaagtttaaaaatccttgggaaatatgtctcaggaatagacctgagacatattttgatctatttttgtttttattattattttttttttagatggagtctcactctgttgcccaggctggagtgcagtggcacgatcccagctcaccacaacctctgcctcctgggttcaagcgattctcctgcctcagcgtcctgaatagctggaattacaagtgcatgccaccatacccaactaatttttgtatctgatctatttttggaggctgggacacaaatacgaaagaaatatttaaatcattaactcttttttttttttttaagagacggggtctcactatgtggcccaggctggtcttgaactcagaggctaaggtgatcctcctgcctcagcctatagctgcaactacaggcatgcaccaccacacctgcctaaatcattaactcttaaacctccctctttaggaaagaaagcctcccatacaactgatctgttctaccagcttatcctttctttcctgcatacagaccccaatatatttaattctctttatctttccatcctacacaataaaagggcccactatgtaattcaggcacctctctactgggctgtagattataacttcccaaatataactttaaagaataagaaaatcatatgacctccaatgtgactatcaggctgttaaaaacaagcctgaatttcttgtattttggccacacgatataatttcaaattacagaatttttttaaaagaagggaccaactttgaagatattacgctaagtgaaataagccagactcaaaggacaaatactgtatgattccacttacatgaggtacctagagtagtcaaattcatagagacaggaagcagaatggcaggtgtcagaggatgggagggggaagggaaagttactgtttaacgggtgcagagtctcagtttgagaaaatgaaactggtctggagatgactgatggtgatggttacattacaatgtgaatgtacttaacattattgaactgtatacctaaatacggctaaaatggcaaattttatgttatgcatatttttcacaatttttgttaaaaaggacctcaaattagga

SEQ ID NO: 391833 - DNA, 244 bp, Homo sapiens
tagggaattttggccctcgaggcccaagaattcggcacagcggtaggagaatcacttgaacctgggaagtggagattgaggtgagccgagattgcaccattgccactccagcctgagcaacaagagcgaaactcgcactccgccacccacatgccaactgacttgatgcttaataaaactgctgctgcctgtttgattctatttaatgtataatttgaatattaaaccttttaacagaactgtc

SEQ ID NO: 391834 - DNA, 6580 bp, Homo sapiens
  misc_feature (3874)..(3874): n is a, c, g, or t
  misc_feature (4217)..(4217): n is a, c, g, or t
caagtcaaggttgcagagtgtatgcagccaggggtagcagccacttcaggatctgggtctggatttgtgctgagaaccactatgaccttttaaagccagtgaggaggttttctgggggcccagaagccctgagcccattggccagacctcctgggagaagcggagcggatttgcatcaaaaagaacactggcttcattgaaattctcctcatcttgagagaaacaaaaccacaaagaaaaggaaagttttaattctgagaaacttcactgaggagcaattttttttgagcttctaaaaatagagaggaaatgagcctctttgggtcactctagttgccgcctcccctgccccatgcccacccccactgctcactcaaggctagcctctctcagtgggtgactgagctgtcttcagtggaagcccgaggcagatgccacgcaattctggagctggatacggctgcccacacggggaccccagcatgctggacagcagagagaccccacaggagagccggcaggacatgattgtgaggaccacccaagaaaaattgaaaaccagctcactgactgacaggcagccactctccaaagagtccctgaaccatgctctcgagctctcagtgccagagaaggtgaataatgcccagtgggatgctccagaggaggcgctgtggacgactcgggccgatgggcgggtgcgcctgcgcatagaccccagctgcccacagcttccctacactgtgcatcggatgttctacgaggccctggataagtatggggacctcatcgctttgggcttcaagcgccaggacaagtgggaacacatctcctactcccaatactacctgctcgcccgcagagccgccaagggcttcctgaagctcggcctgaagcaggcccacagtgtggccatcctcggcttcaactccccggagtggttcttctcggcagtgggcacagtatttgcaggtggcatcgtcactggcatctacaccaccagctccccagaggcctgccagtacatcgcttatgactgctgcgccaatgtcatcatggtcgacacgcagaagcagctggaaaagatcctgaagatctggaaacagttgccacatctaaaggcagtcgtgatatataaagaacctcctccaaacaagatggccaatgtgtacacgatggaggaattcatggagctggggaatgaagtgcctgaggaagccctggacgccatcattgacacccagcagcccaaccagtgctgtgtgctagtctacacttccggcaccactgggaaccccaagggcgtgatgctgagtcaagacaatatcacgtggacggcacggtacggcagccaggccggtgacatccggccggcagaagtccagcaggaggtggtagtcagctacctgcccctcagccatattgccgcccagatctacgacctgtggacaggcatccagtggggggcccaggtttgctttgccgaacccgacgccctgaaggggagcctggtgaacacgctgcgggaggtggagcccacatcacacatgggggtgccccgggtatgggagaagatcatggagcgcatccaggaggtggcggctcagtctggcttcatccggcgaaagatgctgctgtgggccatgtcggtgaccttggagcagaacctcacctgccccggcagcgacctgaagcccttcacaaccagactggcagattacctggtgctagccaaggttcgccaggcactgggatttgccaagtgtcaaaagaacttctatggagcggcccccatgatggcagagacacagcacttcttcctgggtctcaacatccgcttgtatgcgggctacggcctcagtgagacctcaggcccccacttcatgtccagtccctacaactaccggctgtacagctcaggcaagttggtgcccggctgtcgggtgaagctggtgaaccaggacgcagagggcattggcgagatctgcctgtggggccgcaccatattcatgggctacctgaacatggaggacaagacttgtgaggccatcgacgaggaaggctggctgcacacgggtgatgctggccgcctggacgccgatggcttcctctacatcactgggcgcctcaaagaattaatcatcacagctggtggggagaatgtgccccctgtgcccatcgaggaggccgtgaagatggagctgcccatcatcagcaacgccatgctcattggggaccagaggaagttcctgtccatgctgctcaccttgaagtgcactctggacccagacacctctgaccagactgataatctgactgaacaagctatggagttctgccagagggtgggcagcagagccaccacagtgtccgagatcatagagaagaaggatgaggccgtgtaccaggccatcgaagaggggatccggagggtcaacatgaacgcggcggcccggccctaccacatccagaagtgggccattctcgagagagacttctccatttcgggtggagagttgggtcccacgatgaaactgaaacggctcacagttttggagaagtacaaaggtatcattgactccttttaccaagagcaaaaaatgtaatcagggcctatgcctgcagtttctatagaatagagggcaggcgttccgagcctcttcctgagccccaggtctcttcagtctgggcacaggcatttctgccaagtctgttagatctccaggtcagggcacagcactggctctacatttaccaggtcttacgccaacaatagctgacaattccaagaagcttcacgtgtgggtagttttaattcagtttaagtattgctttttgttcaggtgacaaatgagatcagctctccttccagaacgaaagggctgataatttttggccttagttccaggtagattaaaaagctgctagctcacatacaggacagccagcagtaggctgtggagcgggtaggagagagatggctgatactgctcacgtgcgctgcaggaaaagcaatcagtcacaactcacctagcgacctgacttactctggaatcttggcgggcatcgccgaccctattattccattaccaggcactccgccacccacatgccaactgacttgatgcttaataaaactgctgctgcctgtttgattctatttaatgtataatttgaatattaaaccttttaacagaactgtcaacaaggacctgattttttttgtcaattgagcaggtgggaccagtgcagagagtagtgggcatttaactcacaggactgtgcacagcgggcatgcgagtgaccattagtgccctggaataaacaaaggtgcaggatggggtcaagtggcgcattctcataaaagcagccagctctacgttagcctgtcgccaccagaccaccccacttccattctgaatacgggaagcagccattctcagtagcaagctgagccaaaatgaccgaaggcatctgaacaggaaacaggtagagaaagcaaacatctcagttttggaattctttattactttgaacccaagagccactgataactggcacaatccaatgaaacagaggaagcagcagcttaaacaaaggaaaatacatttaagattataagtctgggggggcggttacaagcttaaaaagtgacccagacagggatatcattgctaaaaaaaaaaaaatccccttgtgacctgggtacattttgcaaagccacaggtttgcaatgttacacaagggccaaaggaggccatgagttgtctttggttgtggggacagagggtaactgttcatgaaaatagtgagtgtctgaagattaagaaaatcatgctgcagcagaggagaagggagaggaagacaggaaggnaaaggagatgcctgagggtcaaaagctgagcccaagcctaagcccaagctcaagctcaagccccagcatggcataattttgtgaattaactcaggctgagttgcctccagtctttggaatgtcatcttatactggtactgctgaggcagagggcagtaattggtgctttgggataggagaaggggcagttgctgaaatacaaaattaatagcatcccaagttcctcaattgcagccaaaatacatgtgttcgggcctttcggcagtatcgcccccagaactacctgctgtagtgtggtccattcccagacagcaacatgcaagaataagtttacaatacactnagcccttctggcttcagatcaggggctcagaggctgtgacaactcatgatgctgaaaatgtatccagtgaaaatgaagtactagctctctgcttcattaaaagctcttggaaagaatattaaatctcaagacaacaaaataattgaacacacaatacatttgtgtctttgtatccaatatattacctttgtcttattaacaaaaattatatctctcattatatatttcttggatctgaagtttttattcacactcagtaatttctgtaaaggacaaatctgtctctattttccatatcatttagaaatataccacattcactctttttgatgtgaactttcccaggaaaattctcttgtgcccatttagttttagaagagtgtcattttgtgctattatgtcaatatcctgttttatttccattatgtttttcaaaaaccgaagaaaataaggtttttcttaaaaagttagacattttctcttgttaattctgtatcctgttatttacagctgaagagaaactattttaacttaagtgtaaaatggtttagaatagcaaatgatacagtccactcagagtttacaaaaaaaacatttaccaggtagacacttaataaataaaacaagcacttggaaaaagttctttgaaaacagacctagggacatccacctgcatcttttgcacagattttgttaagaaaaggccagatctaaaaatgtactgtcaagaaacaagcaaaccaatgcatacatacgtaggtattctaaacagaggttcatgtggtgtccatttagagtgactgatgtaaatgccagttgtagaagtgttaatctaaatcttttactcggcgacagatttcctctgtgaagtctgagcattttgcattgcctcccaaatcttttgtcaagctctgagaaaaggaaaaagcaaaaataaaagatgtatccgcaaactaaactaaaccaaggagattttaaagccctcagtgagatgccacctgggcaagttactcggctgctctttcatttagttcctcatttcaaagtgaggaaccactccaccaccatctacccagcccaggaggatcgggatccaatctcatagtgtatacaacagcactctgcaaagaataaggtgctcttgatgcaaagggaggcagggagctttaccaaaattttccctttgttcacacaatagaccctaacccagattagttggtcatggatatttaaataaaagcgaatctaaataagaagtttaaaaatccttgggaaatatgtctcaggaatagacctgagacatattttgatctatttttgtttttattattattttttttttagatggagtctcactctgttgcccaggctggagtgcagtggcacgatcccagctcaccacaacctctgcctcctgggttcaagcgattctcctgcctcagcgtcctgaatagctggaattacaagtgcatgccaccatacccaactaatttttgtatctgatctatttttggaggctgggacacaaatacgaaagaaatatttaaatcattaactcttttttttttttttaagagacggggtctcactatgtggcccaggctggtcttgaactcagaggctaaggtgatcctcctgcctcagcctatagctgcaactacaggcatgcaccaccacacctgcctaaatcattaactcttaaacctccctctttaggaaagaaagcctcccatacaactgatctgttctaccagcttatcctttctttcctgcatacagaccccaatatatttaattctctttatctttccatcctacacaataaaagggcccactatgtaattcaggcacctctctactgggctgtagattataacttcccaaatataactttaaagaataagaaaatcatatgacctccaatgtgactatcaggctgttaaaaacaagcctgaatttcttgtattttggccacacgatataatttcaaattacagaatttttttaaaagaagggaccaactttgaagatattacgctaagtgaaataagccagactcaaaggacaaatactgtatgattccacttacatgaggtacctagagtagtcaaattcatagagacaggaagcagaatggcaggtgtcagaggatgggagggggaagggaaagttactgtttaacgggtgcagagtctcagtttgagaaaatgaaactggtctggagatgactgatggtgatggttacattacaatgtgaatgtacttaacattattgaactgtatacctaaatacggctaaaatggcaaattttatgttatgcatatttttcacaatttttgttaaaaaggacctcaaattagga

SEQ ID NO: 391835 - DNA, 5971 bp, Homo sapiens
  misc_feature (3265)..(3265): n is a, c, g, or t
  misc_feature (3608)..(3608): n is a, c, g, or t
agatttcttcttcaagaaagctgggaagaagagaggccagagatagagagacagaggaggcgctgtggacgactcgggccgatgggcgggtgcgcctgcgcatagaccccagctgcccacagcttccctacactgtgcatcggatgttctacgaggccctggataagtatggggacctcatcgctttgggcttcaagcgccaggacaagtgggaacacatctcctactcccaatactacctgctcgcccgcagagccgccaagggcttcctgaagctcggcctgaagcaggcccacagtgtggccatcctcggcttcaactccccggagtggttcttctcggcagtgggcacagtatttgcaggtggcatcgtcactggcatctacaccaccagctccccagaggcctgccagtacatcgcttatgactgctgcgccaatgtcatcatggtcgacacgcagaagcagctggaaaagatcctgaagatctggaaacagttgccacatctaaaggcagtcgtgatatataaagaacctcctccaaacaagatggccaatgtgtacacgatggaggaattcatggagctggggaatgaagtgcctgaggaagccctggacgccatcattgacacccagcagcccaaccagtgctgtgtgctagtctacacttccggcaccactgggaaccccaagggcgtgatgctgagtcaagacaatatcacgtggacggcacggtacggcagccaggccggtgacatccggccggcagaagtccagcaggaggtggtagtcagctacctgcccctcagccatattgccgcccagatctacgacctgtggacaggcatccagtggggggcccaggtttgctttgccgaacccgacgccctgaaggggagcctggtgaacacgctgcgggaggtggagcccacatcacacatgggggtgccccgggtatgggagaagatcatggagcgcatccaggaggtggcggctcagtctggcttcatccggcgaaagatgctgctgtgggccatgtcggtgaccttggagcagaacctcacctgccccggcagcgacctgaagcccttcacaaccagactggcagattacctggtgctagccaaggttcgccaggcactgggatttgccaagtgtcaaaagaacttctatggagcggcccccatgatggcagagacacagcacttcttcctgggtctcaacatccgcttgtatgcgggctacggcctcagtgagacctcaggcccccacttcatgtccagtccctacaactaccggctgtacagctcaggcaagttggtgcccggctgtcgggtgaagctggtgaaccaggacgcagagggcattggcgagatctgcctgtggggccgcaccatattcatgggctacctgaacatggaggacaagacttgtgaggccatcgacgaggaaggctggctgcacacgggtgatgctggccgcctggacgccgatggcttcctctacatcactgggcgcctcaaagaattaatcatcacagctggtggggagaatgtgccccctgtgcccatcgaggaggccgtgaagatggagctgcccatcatcagcaacgccatgctcattggggaccagaggaagttcctgtccatgctgctcaccttgaagtgcactctggacccagacacctctgaccagactgataatctgactgaacaagctatggagttctgccagagggtgggcagcagagccaccacagtgtccgagatcatagagaagaaggatgaggccgtgtaccaggccatcgaagaggggatccggagggtcaacatgaacgcggcggcccggccctaccacatccagaagtgggccattctcgagagagacttctccatttcgggtggagagttgggtcccacgatgaaactgaaacggctcacagttttggagaagtacaaaggtatcattgactccttttaccaagagcaaaaaatgtaatcagggcctatgcctgcagtttctatagaatagagggcaggcgttccgagcctcttcctgagccccaggtctcttcagtctgggcacaggcatttctgccaagtctgttagatctccaggtcagggcacagcactggctctacatttaccaggtcttacgccaacaatagctgacaattccaagaagcttcacgtgtgggtagttttaattcagtttaagtattgctttttgttcaggtgacaaatgagatcagctctccttccagaacgaaagggctgataatttttggccttagttccaggtagattaaaaagctgctagctcacatacaggacagccagcagtaggctgtggagcgggtaggagagagatggctgatactgctcacgtgcgctgcaggaaaagcaatcagtcacaactcacctagcgacctgacttactctggaatcttggcgggcatcgccgaccctattattccattaccaggcactccgccacccacatgccaactgacttgatgcttaataaaactgctgctgcctgtttgattctatttaatgtataatttgaatattaaaccttttaacagaactgtcaacaaggacctgattttttttgtcaattgagcaggtgggaccagtgcagagagtagtgggcatttaactcacaggactgtgcacagcgggcatgcgagtgaccattagtgccctggaataaacaaaggtgcaggatggggtcaagtggcgcattctcataaaagcagccagctctacgttagcctgtcgccaccagaccaccccacttccattctgaatacgggaagcagccattctcagtagcaagctgagccaaaatgaccgaaggcatctgaacaggaaacaggtagagaaagcaaacatctcagttttggaattctttattactttgaacccaagagccactgataactggcacaatccaatgaaacagaggaagcagcagcttaaacaaaggaaaatacatttaagattataagtctgggggggcggttacaagcttaaaaagtgacccagacagggatatcattgctaaaaaaaaaaaaatccccttgtgacctgggtacattttgcaaagccacaggtttgcaatgttacacaagggccaaaggaggccatgagttgtctttggttgtggggacagagggtaactgttcatgaaaatagtgagtgtctgaagattaagaaaatcatgctgcagcagaggagaagggagaggaagacaggaaggnaaaggagatgcctgagggtcaaaagctgagcccaagcctaagcccaagctcaagctcaagccccagcatggcataattttgtgaattaactcaggctgagttgcctccagtctttggaatgtcatcttatactggtactgctgaggcagagggcagtaattggtgctttgggataggagaaggggcagttgctgaaatacaaaattaatagcatcccaagttcctcaattgcagccaaaatacatgtgttcgggcctttcggcagtatcgcccccagaactacctgctgtagtgtggtccattcccagacagcaacatgcaagaataagtttacaatacactnagcccttctggcttcagatcaggggctcagaggctgtgacaactcatgatgctgaaaatgtatccagtgaaaatgaagtactagctctctgcttcattaaaagctcttggaaagaatattaaatctcaagacaacaaaataattgaacacacaatacatttgtgtctttgtatccaatatattacctttgtcttattaacaaaaattatatctctcattatatatttcttggatctgaagtttttattcacactcagtaatttctgtaaaggacaaatctgtctctattttccatatcatttagaaatataccacattcactctttttgatgtgaactttcccaggaaaattctcttgtgcccatttagttttagaagagtgtcattttgtgctattatgtcaatatcctgttttatttccattatgtttttcaaaaaccgaagaaaataaggtttttcttaaaaagttagacattttctcttgttaattctgtatcctgttatttacagctgaagagaaactattttaacttaagtgtaaaatggtttagaatagcaaatgatacagtccactcagagtttacaaaaaaaacatttaccaggtagacacttaataaataaaacaagcacttggaaaaagttctttgaaaacagacctagggacatccacctgcatcttttgcacagattttgttaagaaaaggccagatctaaaaatgtactgtcaagaaacaagcaaaccaatgcatacatacgtaggtattctaaacagaggttcatgtggtgtccatttagagtgactgatgtaaatgccagttgtagaagtgttaatctaaatcttttactcggcgacagatttcctctgtgaagtctgagcattttgcattgcctcccaaatcttttgtcaagctctgagaaaaggaaaaagcaaaaataaaagatgtatccgcaaactaaactaaaccaaggagattttaaagccctcagtgagatgccacctgggcaagttactcggctgctctttcatttagttcctcatttcaaagtgaggaaccactccaccaccatctacccagcccaggaggatcgggatccaatctcatagtgtatacaacagcactctgcaaagaataaggtgctcttgatgcaaagggaggcagggagctttaccaaaattttccctttgttcacacaatagaccctaacccagattagttggtcatggatatttaaataaaagcgaatctaaataagaagtttaaaaatccttgggaaatatgtctcaggaatagacctgagacatattttgatctatttttgtttttattattattttttttttagatggagtctcactctgttgcccaggctggagtgcagtggcacgatcccagctcaccacaacctctgcctcctgggttcaagcgattctcctgcctcagcgtcctgaatagctggaattacaagtgcatgccaccatacccaactaatttttgtatctgatctatttttggaggctgggacacaaatacgaaagaaatatttaaatcattaactcttttttttttttttaagagacggggtctcactatgtggcccaggctggtcttgaactcagaggctaaggtgatcctcctgcctcagcctatagctgcaactacaggcatgcaccaccacacctgcctaaatcattaactcttaaacctccctctttaggaaagaaagcctcccatacaactgatctgttctaccagcttatcctttctttcctgcatacagaccccaatatatttaattctctttatctttccatcctacacaataaaagggcccactatgtaattcaggcacctctctactgggctgtagattataacttcccaaatataactttaaagaataagaaaatcatatgacctccaatgtgactatcaggctgttaaaaacaagcctgaatttcttgtattttggccacacgatataatttcaaattacagaatttttttaaaagaagggaccaactttgaagatattacgctaagtgaaataagccagactcaaaggacaaatactgtatgattccacttacatgaggtacctagagtagtcaaattcatagagacaggaagcagaatggcaggtgtcagaggatgggagggggaagggaaagttactgtttaacgggtgcagagtctcagtttgagaaaatgaaactggtctggagatgactgatggtgatggttacattacaatgtgaatgtacttaacattattgaactgtatacctaaatacggctaaaatggcaaattttatgttatgcatatttttcacaatttttgttaaaaaggacctcaaattagga

SEQ ID NO: 391836 - DNA, 1529 bp, Homo sapiens
tggtcatccttgttttgttcctgatctcaggggagaagcattcactaacttatcattaagtatgtttggctgagcacagtggcctacacctgcaatcccagtactttgggaggctgaggcaggaggattgcttgagctcaggaattcgagaccagcctgggcaacatagaactgggactggcagaagggggccatggatgagatgtctgagcaggctgagtcgtggatgacaagccgaggagagggaaacttgggtgagcatttgtcgtcggggtgctgccaccagcccccaagcaggtgtgagttgctttggagggcctgccactgcttcttggctcccagaaagggggcatctccagctgtgctgaggcttccgggttgtggttgaggcttgggttgtggttcagctggggcacctggactacattctgtgccgggggcctggccttgcctccccagaattaatcatcacagctggtggggagaatgtgccccctgtgcccatcgaggaggccgtgaagatggagctgcccatcatcagcaacgccatgctcattggggaccagaggaagttcctgtccatgctgctcaccttgaagtgcactctggacccagacacctctgaccagactgataatctgactgaacaagctatggagttctgccagagggtgggcagcagagccaccacagtgtccgagatcatagagaagaaggatgaggccgtgtaccaggccatcgaagaggggatccggagggtcaacatgaacgcggcggcccggccctaccacatccagaagtgggccattctcgagagagacttctccatttcgggtggagagttgggtcccacgatgaaactgaaacggctcacagttttggagaagtacaaaggtatcattgactccttttaccaagagcaaaaaatgtaatcagggcctatgcctgcagtttctatagaatagagggcaggcgttccgagcctcttcctgagccccaggtctcttcagtctgggcacaggcatttctgccaagtctgttagatctccaggtcagggcacagcactggctctacatttaccaggtcttacgccaacaatagctgacaattccaagaagcttcacgtgtgggtagttttaattcagtttaagtattgctttttgttcaggtgacaaatgagatcagctctccttccagaacgaaagggctgataatttttggccttagttccaggtagattaaaaagctgctagctcacatacaggacagccagcagtaggctgtggagcgggtaggagagagatggctgatactgctcacgtgcgctgcaggaaaagcaatcagtcacaactcacctagcgacctgacttactctggaatcttggcgggcatcgccgaccctattattccattaccaggcactccgccacccacatgccaactgacttgatgcttaataaaactgctgctgcctgtttgattctatttaatgtataatttgaatattaaaccttttaacagaactgtc

SEQ ID NO: 391837 - DNA, 1324 bp, Homo sapiens
tggtcatccttgttttgttcctgatctcaggggagaagcattcactaacttatcattaagtatgtttggctgagcacagtggcctacacctgcaatcccagtactttgggaggctgaggcaggaggattgcttgagctcaggaattcgagaccagcctgggcaacatagaactgggactggcagaagggggccatggatgagatgtctgagcaggctgagtcgtggatgacaagccgaggagagggaaacttggaattaatcatcacagctggtggggagaatgtgccccctgtgcccatcgaggaggccgtgaagatggagctgcccatcatcagcaacgccatgctcattggggaccagaggaagttcctgtccatgctgctcaccttgaagtgcactctggacccagacacctctgaccagactgataatctgactgaacaagctatggagttctgccagagggtgggcagcagagccaccacagtgtccgagatcatagagaagaaggatgaggccgtgtaccaggccatcgaagaggggatccggagggtcaacatgaacgcggcggcccggccctaccacatccagaagtgggccattctcgagagagacttctccatttcgggtggagagttgggtcccacgatgaaactgaaacggctcacagttttggagaagtacaaaggtatcattgactccttttaccaagagcaaaaaatgtaatcagggcctatgcctgcagtttctatagaatagagggcaggcgttccgagcctcttcctgagccccaggtctcttcagtctgggcacaggcatttctgccaagtctgttagatctccaggtcagggcacagcactggctctacatttaccaggtcttacgccaacaatagctgacaattccaagaagcttcacgtgtgggtagttttaattcagtttaagtattgctttttgttcaggtgacaaatgagatcagctctccttccagaacgaaagggctgataatttttggccttagttccaggtagattaaaaagctgctagctcacatacaggacagccagcagtaggctgtggagcgggtaggagagagatggctgatactgctcacgtgcgctgcaggaaaagcaatcagtcacaactcacctagcgacctgacttactctggaatcttggcgggcatcgccgaccctattattccattaccaggcactccgccacccacatgccaactgacttgatgcttaataaaactgctgctgcctgtttgattctatttaatgtataatttgaatattaaaccttttaacagaactgtc

SEQ ID NO: 391838 - DNA, 4484 bp, Homo sapiens
  misc_feature (1778)..(1778): n is a, c, g, or t
  misc_feature (2121)..(2121): n is a, c, g, or t
cttttctattttttaattgcttcaacaatttattcattcaagagatggaacaaataaatccatttcagagaaaatggactgagggtcaaaactgggtacaggtcaaggaaaaggcagatgtagcttacactactttcctatgtgtataaaagaaactgatcttttataacctattctcagaggtgacataccaacccttcatctatactccactggccacaaccagtggtataacacaggagactacacacaagccatatgaataccaggagcgatcactgtcttggaggctggctactgacggtcctgattatctggcttaattcctgagttatatataggactgagtgtgagtctttaccacacacattctcagagttctcagagcctgggcctcactcatttcttctcatttcccttttaggtcccacgatgaaactgaaacggctcacagttttggagaagtacaaaggtatcattgactccttttaccaagagcaaaaaatgtaatcagggcctatgcctgcagtttctatagaatagagggcaggcgttccgagcctcttcctgagccccaggtctcttcagtctgggcacaggcatttctgccaagtctgttagatctccaggtcagggcacagcactggctctacatttaccaggtcttacgccaacaatagctgacaattccaagaagcttcacgtgtgggtagttttaattcagtttaagtattgctttttgttcaggtgacaaatgagatcagctctccttccagaacgaaagggctgataatttttggccttagttccaggtagattaaaaagctgctagctcacatacaggacagccagcagtaggctgtggagcgggtaggagagagatggctgatactgctcacgtgcgctgcaggaaaagcaatcagtcacaactcacctagcgacctgacttactctggaatcttggcgggcatcgccgaccctattattccattaccaggcactccgccacccacatgccaactgacttgatgcttaataaaactgctgctgcctgtttgattctatttaatgtataatttgaatattaaaccttttaacagaactgtcaacaaggacctgattttttttgtcaattgagcaggtgggaccagtgcagagagtagtgggcatttaactcacaggactgtgcacagcgggcatgcgagtgaccattagtgccctggaataaacaaaggtgcaggatggggtcaagtggcgcattctcataaaagcagccagctctacgttagcctgtcgccaccagaccaccccacttccattctgaatacgggaagcagccattctcagtagcaagctgagccaaaatgaccgaaggcatctgaacaggaaacaggtagagaaagcaaacatctcagttttggaattctttattactttgaacccaagagccactgataactggcacaatccaatgaaacagaggaagcagcagcttaaacaaaggaaaatacatttaagattataagtctgggggggcggttacaagcttaaaaagtgacccagacagggatatcattgctaaaaaaaaaaaaatccccttgtgacctgggtacattttgcaaagccacaggtttgcaatgttacacaagggccaaaggaggccatgagttgtctttggttgtggggacagagggtaactgttcatgaaaatagtgagtgtctgaagattaagaaaatcatgctgcagcagaggagaagggagaggaagacaggaaggnaaaggagatgcctgagggtcaaaagctgagcccaagcctaagcccaagctcaagctcaagccccagcatggcataattttgtgaattaactcaggctgagttgcctccagtctttggaatgtcatcttatactggtactgctgaggcagagggcagtaattggtgctttgggataggagaaggggcagttgctgaaatacaaaattaatagcatcccaagttcctcaattgcagccaaaatacatgtgttcgggcctttcggcagtatcgcccccagaactacctgctgtagtgtggtccattcccagacagcaacatgcaagaataagtttacaatacactnagcccttctggcttcagatcaggggctcagaggctgtgacaactcatgatgctgaaaatgtatccagtgaaaatgaagtactagctctctgcttcattaaaagctcttggaaagaatattaaatctcaagacaacaaaataattgaacacacaatacatttgtgtctttgtatccaatatattacctttgtcttattaacaaaaattatatctctcattatatatttcttggatctgaagtttttattcacactcagtaatttctgtaaaggacaaatctgtctctattttccatatcatttagaaatataccacattcactctttttgatgtgaactttcccaggaaaattctcttgtgcccatttagttttagaagagtgtcattttgtgctattatgtcaatatcctgttttatttccattatgtttttcaaaaaccgaagaaaataaggtttttcttaaaaagttagacattttctcttgttaattctgtatcctgttatttacagctgaagagaaactattttaacttaagtgtaaaatggtttagaatagcaaatgatacagtccactcagagtttacaaaaaaaacatttaccaggtagacacttaataaataaaacaagcacttggaaaaagttctttgaaaacagacctagggacatccacctgcatcttttgcacagattttgttaagaaaaggccagatctaaaaatgtactgtcaagaaacaagcaaaccaatgcatacatacgtaggtattctaaacagaggttcatgtggtgtccatttagagtgactgatgtaaatgccagttgtagaagtgttaatctaaatcttttactcggcgacagatttcctctgtgaagtctgagcattttgcattgcctcccaaatcttttgtcaagctctgagaaaaggaaaaagcaaaaataaaagatgtatccgcaaactaaactaaaccaaggagattttaaagccctcagtgagatgccacctgggcaagttactcggctgctctttcatttagttcctcatttcaaagtgaggaaccactccaccaccatctacccagcccaggaggatcgggatccaatctcatagtgtatacaacagcactctgcaaagaataaggtgctcttgatgcaaagggaggcagggagctttaccaaaattttccctttgttcacacaatagaccctaacccagattagttggtcatggatatttaaataaaagcgaatctaaataagaagtttaaaaatccttgggaaatatgtctcaggaatagacctgagacatattttgatctatttttgtttttattattattttttttttagatggagtctcactctgttgcccaggctggagtgcagtggcacgatcccagctcaccacaacctctgcctcctgggttcaagcgattctcctgcctcagcgtcctgaatagctggaattacaagtgcatgccaccatacccaactaatttttgtatctgatctatttttggaggctgggacacaaatacgaaagaaatatttaaatcattaactcttttttttttttttaagagacggggtctcactatgtggcccaggctggtcttgaactcagaggctaaggtgatcctcctgcctcagcctatagctgcaactacaggcatgcaccaccacacctgcctaaatcattaactcttaaacctccctctttaggaaagaaagcctcccatacaactgatctgttctaccagcttatcctttctttcctgcatacagaccccaatatatttaattctctttatctttccatcctacacaataaaagggcccactatgtaattcaggcacctctctactgggctgtagattataacttcccaaatataactttaaagaataagaaaatcatatgacctccaatgtgactatcaggctgttaaaaacaagcctgaatttcttgtattttggccacacgatataatttcaaattacagaatttttttaaaagaagggaccaactttgaagatattacgctaagtgaaataagccagactcaaaggacaaatactgtatgattccacttacatgaggtacctagagtagtcaaattcatagagacaggaagcagaatggcaggtgtcagaggatgggagggggaagggaaagttactgtttaacgggtgcagagtctcagtttgagaaaatgaaactggtctggagatgactgatggtgatggttacattacaatgtgaatgtacttaacattattgaactgtatacctaaatacggctaaaatggcaaattttatgttatgcatatttttcacaatttttgttaaaaaggacctcaaattagga

SEQ ID NO: 391839 - DNA, 2837 bp, Homo sapiens
caagtcaaggttgcagagtgtatgcagccaggggtagcagccacttcaggatctgggtctggatttgtgctgagaaccactatgaccttttaaagccagtgaggaggttttctgggggcccagaagccctgagcccattggccagacctcctgggagaagcggagcggatttgcatcaaaaagaacactggcttcattgaaattctcctcatcttgagagaaacaaaaccacaaagaaaaggaaagttttaattctgagaaacttcactgaggagcaattttttttgagcttctaaaaatagagaggaaatgagcctctttgggtcactctagttgccgcctcccctgccccatgcccacccccactgctcactcaaggctagcctctctcagtgggtgactgagctgtcttcagtggaagcccgaggcagatgccacgcaattctggagctggatacggctgcccacacggggaccccagcatgctggacagcagagagaccccacaggagagccggcaggacatgattgtgaggaccacccaagaaaaattgaaaaccagctcactgactgacaggcagccactctccaaagagtccctgaaccatgctctcgagctctcagtgccagagaaggtgaataatgcccagtgggatgctccagaggaggcgctgtggacgactcgggccgatgggcgggtgcgcctgcgcatagaccccagctgcccacagcttccctacactgtgcatcggatgttctacgaggccctggataagtatggggacctcatcgctttgggcttcaagcgccaggacaagtgggaacacatctcctactcccaatactacctgctcgcccgcagagccgccaagggcttcctgaagctcggcctgaagcaggcccacagtgtggccatcctcggcttcaactccccggagtggttcttctcggcagtgggcacagtatttgcaggtggcatcgtcactggcatctacaccaccagctccccagaggcctgccagtacatcgcttatgactgctgcgccaatgtcatcatggtcgacacgcagaagcagctggaaaagatcctgaagatctggaaacagttgccacatctaaaggcagtcgtgatatataaagaacctcctccaaacaagatggccaatgtgtacacgatggaggaattcatggagctggggaatgaagtgcctgaggaagccctggacgccatcattgacacccagcagcccaaccagtgctgtgtgctagtctacacttccggcaccactgggaaccccaagggcgtgatgctgagtcaagacaatatcacgtggacggcacggtacggcagccaggccggtgacatccggccggcagaagtccagcaggaggtggtagtcagctacctgcccctcagccatattgccgcccagatctacgacctgtggacaggcatccagtggggggcccaggtttgctttgccgaacccgacgccctgaaggggagcctggtgaacacgctgcgggaggtggagcccacatcacacatgggggtgccccgggtatgggagaagatcatggagcgcatccaggaggtggcggctcagtctggcttcatccggcgaaagatgctgctgtgggccatgtcggtgaccttggagcagaacctcacctgccccggcagcgacctgaagcccttcacaaccagactggcagattacctggtgctagccaaggttcgccaggcactgggatttgccaagtgtcaaaagaacttctatggagcggcccccatgatggcagagacacagcacttcttcctgggtctcaacatccgcttgtatgcgggctacggcctcagtgagacctcaggcccccacttcatgtccagtccctacaactaccggctgtacagctcaggcaagttggtgcccggctgtcgggtgaagctggtgaaccaggacgcagagggcattggcgagatctgcctgtggggccgcaccatattcatgggctacctgaacatggaggacaagacttgtgaggccatcgacgaggaaggctggctgcacacgggtgatgctggccgcctggacgccgatggcttcctctacatcactgggcgcctcaaagaattaatcatcacagctggtggggagaatgtgccccctgtgcccatcgaggaggccgtgaagatggagctgcccatcatcagcaacgccatgctcattggggaccagaggaagttcctgtccatgctgctcaccttgaagtgcactctggacccagacacctctgaccagactgataatctgactgaacaagctatggagttctgccagagggtgggcagcagagccaccacagtgtccgagatcatagagaagaaggatgaggccgtgtaccaggccatcgaagaggggatccggagggtcaacatgaacgcggcggcccggccctaccacatccagaagtgggccattctcgagagagacttctccatttcgggtggagagttgggtcccacgatgaaactgaaacggctcacagttttggagaagtacaaagcatggtcaaaaagtcccatgtggcgcagcatcatcacggcactgagcaggagggctgtgggattcgccatgtccttgcctgcaatgtctggagccgtcccatgaacctacacatcgggaacaagtagcatcatcaagggagagacaaaaactaacagtcctcttctggggaagctggagtcttaaccatctttcctcagcaatacaaaatatgcactgaaagctactgcgtgcaattcatctgatatggactgaagaaataaagtctgg

SEQ ID NO: 391840 - DNA, 3203 bp, Homo sapiens
caagtcaaggttgcagagtgtatgcagccaggggtagcagccacttcaggatctgggtctggatttgtgctgagaaccactatgaccttttaaagccagtgaggaggttttctgggggcccagaagccctgagcccattggccagacctcctgggagaagcggagcggatttgcatcaaaaagaacactggcttcattgaaattctcctcatcttgagagaaacaaaaccacaaagaaaaggaaagttttaattctgagaaacttcactgaggagcaattttttttgagcttctaaaaatagagaggaaatgagcctctttgggtcactctagttgccgcctcccctgccccatgcccacccccactgctcactcaaggctagcctctctcagtgggtgactgagctgtcttcagtggaagcccgaggcagatgccacgcaattctggagctggatacggctgcccacacggggaccccagcatgctggacagcagagagaccccacaggagagccggcaggacatgattgtgaggaccacccaagaaaaattgaaaaccagctcactgactgacaggcagccactctccaaagagtccctgaaccatgctctcgagctctcagtgccagagaaggtgaataatgcccagtgggatgctccagaggaggcgctgtggacgactcgggccgatgggcgggtgcgcctgcgcatagaccccagctgcccacagcttccctacactgtgcatcggatgttctacgaggccctggataagtatggggacctcatcgctttgggcttcaagcgccaggacaagtgggaacacatctcctactcccaatactacctgctcgcccgcagagccgccaagggcttcctgaagctcggcctgaagcaggcccacagtgtggccatcctcggcttcaactccccggagtggttcttctcggcagtgggcacagtatttgcaggtggcatcgtcactggcatctacaccaccagctccccagaggcctgccagtacatcgcttatgactgctgcgccaatgtcatcatggtcgacacgcagaagcagctggaaaagatcctgaagatctggaaacagttgccacatctaaaggcagtcgtgatatataaagaacctcctccaaacaagatggccaatgtgtacacgatggaggaattcatggagctggggaatgaagtgcctgaggaagccctggacgccatcattgacacccagcagcccaaccagtgctgtgtgctagtctacacttccggcaccactgggaaccccaagggcgtgatgctgagtcaagacaatatcacgtggacggcacggtacggcagccaggccggtgacatccggccggcagaagtccagcaggaggtggtagtcagctacctgcccctcagccatattgccgcccagatctacgacctgtggacaggcatccagtggggggcccaggtttgctttgccgaacccgacgccctgaaggggagcctggtgaacacgctgcgggaggtggagcccacatcacacatgggggtgccccgggtatgggagaagatcatggagcgcatccaggaggtggcggctcagtctggcttcatccggcgaaagatgctgctgtgggccatgtcggtgaccttggagcagaacctcacctgccccggcagcgacctgaagcccttcacaaccagactggcagattacctggtgctagccaaggttcgccaggcactgggatttgccaagtgtcaaaagaacttctatggagcggcccccatgatggcagagacacagcacttcttcctgggtctcaacatccgcttgtatgcgggctacggcctcagtgagacctcaggcccccacttcatgtccagtccctacaactaccggctgtacagctcaggcaagttggtgcccggctgtcgggtgaagctggtgaaccaggacgcagagggcattggcgagatctgcctgtggggccgcaccatattcatgggctacctgaacatggaggacaagacttgtgaggccatcgacgaggaaggctggctgcacacgggtgatgctggccgcctggacgccgatggcttcctctacatcactgggcgcctcaaagaattaatcatcacagctggtggggagaatgtgccccctgtgcccatcgaggaggccgtgaagatggagctgcccatcatcagcaacgccatgctcattggggaccagaggaagttcctgtccatgctgctcaccttgaagtgcactctggacccagacacctctgaccagactgataatctgactgaacaagctatggagttctgccagagggtgggcagcagagccaccacagtgtccgagatcatagagaagaaggatgaggccgtgtaccaggccatcgaagaggggatccggagggtcaacatgaacgcggcggcccggccctaccacatccagaagtgggccattctcgagagagacttctccatttcgggtggagagttgggtcccacgatgaaactgaaacggctcacagttttggagaagtacaaaggtatcattgactccttttaccaagagcaaaaaatgtaatcagggcctatgcctgcagtttctatagaatagagggcaggcgttccgagcctcttcctgagccccaggtctcttcagtctgggcacaggcatttctgccaagtctgttagatctccaggtcagggcacagcactggctctacatttaccaggtcttacgccaacaatagctgacaattccaagaagcttcacgtgtgggtagttttaattcagtttaagtattgctttttgttcaggtgacaaatgagatcagctctccttccagaacgaaagggctgataatttttggccttagttccaggtagattaaaaagctgctagctcacatacaggacagccagcagtaggctgtggagcgggtaggagagagatggctgatactgctcacgtgcgctgcaggaaaagcaatcagtcacaactcacctagcgacctgacttactctggaatcttggcgggcatcgccgaccctattattccattaccaggcactccgccacccacatgccaactgacttgatgcttaataaaactgctgctgcctgtttgattctatttaatgtataatttgaatattaaaccttttaacagaactgtc

SEQ ID NO: 391841 - DNA, 6329 bp, Homo sapiens
  misc_feature (3623)..(3623): n is a, c, g, or t
  misc_feature (3966)..(3966): n is a, c, g, or t
gtgcctgccaggtgcaagaaggaggaagggcggtccggtggagccgggcctctctggggctgctgtggctctcccggggggactccgtgacatgttctctgaggttctggctctctcctgggcaagctcacagattgcagccaccccccaggcaccatgccagaggtgctcctgctcaggtctgccagctccatcctgaggactgcgttcttaagcagatggctgccaggtgggcctaggtgtgttcacaaacttagttttgttcggaacctgcagtgccgacaaggagtgaggctgaatgtgagaagcagctcactgactgacaggcagccactctccaaagagtccctgaaccatgctctcgagctctcagtgccagagaaggtgaataatgcccagtgggatgctccagaggaggcgctgtggacgactcgggccgatgggcgggtgcgcctgcgcatagaccccagctgcccacagcttccctacactgtgcatcggatgttctacgaggccctggataagtatggggacctcatcgctttgggcttcaagcgccaggacaagtgggaacacatctcctactcccaatactacctgctcgcccgcagagccgccaagggcttcctgaagctcggcctgaagcaggcccacagtgtggccatcctcggcttcaactccccggagtggttcttctcggcagtgggcacagtatttgcaggtggcatcgtcactggcatctacaccaccagctccccagaggcctgccagtacatcgcttatgactgctgcgccaatgtcatcatggtcgacacgcagaagcagctggaaaagatcctgaagatctggaaacagttgccacatctaaaggcagtcgtgatatataaagaacctcctccaaacaagatggccaatgtgtacacgatggaggaattcatggagctggggaatgaagtgcctgaggaagccctggacgccatcattgacacccagcagcccaaccagtgctgtgtgctagtctacacttccggcaccactgggaaccccaagggcgtgatgctgagtcaagacaatatcacgtggacggcacggtacggcagccaggccggtgacatccggccggcagaagtccagcaggaggtggtagtcagctacctgcccctcagccatattgccgcccagatctacgacctgtggacaggcatccagtggggggcccaggtttgctttgccgaacccgacgccctgaaggggagcctggtgaacacgctgcgggaggtggagcccacatcacacatgggggtgccccgggtatgggagaagatcatggagcgcatccaggaggtggcggctcagtctggcttcatccggcgaaagatgctgctgtgggccatgtcggtgaccttggagcagaacctcacctgccccggcagcgacctgaagcccttcacaaccagactggcagattacctggtgctagccaaggttcgccaggcactgggatttgccaagtgtcaaaagaacttctatggagcggcccccatgatggcagagacacagcacttcttcctgggtctcaacatccgcttgtatgcgggctacggcctcagtgagacctcaggcccccacttcatgtccagtccctacaactaccggctgtacagctcaggcaagttggtgcccggctgtcgggtgaagctggtgaaccaggacgcagagggcattggcgagatctgcctgtggggccgcaccatattcatgggctacctgaacatggaggacaagacttgtgaggccatcgacgaggaaggctggctgcacacgggtgatgctggccgcctggacgccgatggcttcctctacatcactgggcgcctcaaagaattaatcatcacagctggtggggagaatgtgccccctgtgcccatcgaggaggccgtgaagatggagctgcccatcatcagcaacgccatgctcattggggaccagaggaagttcctgtccatgctgctcaccttgaagtgcactctggacccagacacctctgaccagactgataatctgactgaacaagctatggagttctgccagagggtgggcagcagagccaccacagtgtccgagatcatagagaagaaggatgaggccgtgtaccaggccatcgaagaggggatccggagggtcaacatgaacgcggcggcccggccctaccacatccagaagtgggccattctcgagagagacttctccatttcgggtggagagttgggtcccacgatgaaactgaaacggctcacagttttggagaagtacaaaggtatcattgactccttttaccaagagcaaaaaatgtaatcagggcctatgcctgcagtttctatagaatagagggcaggcgttccgagcctcttcctgagccccaggtctcttcagtctgggcacaggcatttctgccaagtctgttagatctccaggtcagggcacagcactggctctacatttaccaggtcttacgccaacaatagctgacaattccaagaagcttcacgtgtgggtagttttaattcagtttaagtattgctttttgttcaggtgacaaatgagatcagctctccttccagaacgaaagggctgataatttttggccttagttccaggtagattaaaaagctgctagctcacatacaggacagccagcagtaggctgtggagcgggtaggagagagatggctgatactgctcacgtgcgctgcaggaaaagcaatcagtcacaactcacctagcgacctgacttactctggaatcttggcgggcatcgccgaccctattattccattaccaggcactccgccacccacatgccaactgacttgatgcttaataaaactgctgctgcctgtttgattctatttaatgtataatttgaatattaaaccttttaacagaactgtcaacaaggacctgattttttttgtcaattgagcaggtgggaccagtgcagagagtagtgggcatttaactcacaggactgtgcacagcgggcatgcgagtgaccattagtgccctggaataaacaaaggtgcaggatggggtcaagtggcgcattctcataaaagcagccagctctacgttagcctgtcgccaccagaccaccccacttccattctgaatacgggaagcagccattctcagtagcaagctgagccaaaatgaccgaaggcatctgaacaggaaacaggtagagaaagcaaacatctcagttttggaattctttattactttgaacccaagagccactgataactggcacaatccaatgaaacagaggaagcagcagcttaaacaaaggaaaatacatttaagattataagtctgggggggcggttacaagcttaaaaagtgacccagacagggatatcattgctaaaaaaaaaaaaatccccttgtgacctgggtacattttgcaaagccacaggtttgcaatgttacacaagggccaaaggaggccatgagttgtctttggttgtggggacagagggtaactgttcatgaaaatagtgagtgtctgaagattaagaaaatcatgctgcagcagaggagaagggagaggaagacaggaaggnaaaggagatgcctgagggtcaaaagctgagcccaagcctaagcccaagctcaagctcaagccccagcatggcataattttgtgaattaactcaggctgagttgcctccagtctttggaatgtcatcttatactggtactgctgaggcagagggcagtaattggtgctttgggataggagaaggggcagttgctgaaatacaaaattaatagcatcccaagttcctcaattgcagccaaaatacatgtgttcgggcctttcggcagtatcgcccccagaactacctgctgtagtgtggtccattcccagacagcaacatgcaagaataagtttacaatacactnagcccttctggcttcagatcaggggctcagaggctgtgacaactcatgatgctgaaaatgtatccagtgaaaatgaagtactagctctctgcttcattaaaagctcttggaaagaatattaaatctcaagacaacaaaataattgaacacacaatacatttgtgtctttgtatccaatatattacctttgtcttattaacaaaaattatatctctcattatatatttcttggatctgaagtttttattcacactcagtaatttctgtaaaggacaaatctgtctctattttccatatcatttagaaatataccacattcactctttttgatgtgaactttcccaggaaaattctcttgtgcccatttagttttagaagagtgtcattttgtgctattatgtcaatatcctgttttatttccattatgtttttcaaaaaccgaagaaaataaggtttttcttaaaaagttagacattttctcttgttaattctgtatcctgttatttacagctgaagagaaactattttaacttaagtgtaaaatggtttagaatagcaaatgatacagtccactcagagtttacaaaaaaaacatttaccaggtagacacttaataaataaaacaagcacttggaaaaagttctttgaaaacagacctagggacatccacctgcatcttttgcacagattttgttaagaaaaggccagatctaaaaatgtactgtcaagaaacaagcaaaccaatgcatacatacgtaggtattctaaacagaggttcatgtggtgtccatttagagtgactgatgtaaatgccagttgtagaagtgttaatctaaatcttttactcggcgacagatttcctctgtgaagtctgagcattttgcattgcctcccaaatcttttgtcaagctctgagaaaaggaaaaagcaaaaataaaagatgtatccgcaaactaaactaaaccaaggagattttaaagccctcagtgagatgccacctgggcaagttactcggctgctctttcatttagttcctcatttcaaagtgaggaaccactccaccaccatctacccagcccaggaggatcgggatccaatctcatagtgtatacaacagcactctgcaaagaataaggtgctcttgatgcaaagggaggcagggagctttaccaaaattttccctttgttcacacaatagaccctaacccagattagttggtcatggatatttaaataaaagcgaatctaaataagaagtttaaaaatccttgggaaatatgtctcaggaatagacctgagacatattttgatctatttttgtttttattattattttttttttagatggagtctcactctgttgcccaggctggagtgcagtggcacgatcccagctcaccacaacctctgcctcctgggttcaagcgattctcctgcctcagcgtcctgaatagctggaattacaagtgcatgccaccatacccaactaatttttgtatctgatctatttttggaggctgggacacaaatacgaaagaaatatttaaatcattaactcttttttttttttttaagagacggggtctcactatgtggcccaggctggtcttgaactcagaggctaaggtgatcctcctgcctcagcctatagctgcaactacaggcatgcaccaccacacctgcctaaatcattaactcttaaacctccctctttaggaaagaaagcctcccatacaactgatctgttctaccagcttatcctttctttcctgcatacagaccccaatatatttaattctctttatctttccatcctacacaataaaagggcccactatgtaattcaggcacctctctactgggctgtagattataacttcccaaatataactttaaagaataagaaaatcatatgacctccaatgtgactatcaggctgttaaaaacaagcctgaatttcttgtattttggccacacgatataatttcaaattacagaatttttttaaaagaagggaccaactttgaagatattacgctaagtgaaataagccagactcaaaggacaaatactgtatgattccacttacatgaggtacctagagtagtcaaattcatagagacaggaagcagaatggcaggtgtcagaggatgggagggggaagggaaagttactgtttaacgggtgcagagtctcagtttgagaaaatgaaactggtctggagatgactgatggtgatggttacattacaatgtgaatgtacttaacattattgaactgtatacctaaatacggctaaaatggcaaattttatgttatgcatatttttcacaatttttgttaaaaaggacctcaaattagga

SEQ ID NO: 391842 - DNA, 2210 bp, Homo sapiens
cagagacctttactaagccgactcacacagggagatggggtactttttagaaggtgacatttctcttactgaaacctgatctatttttcctgtcaatgcagatctggaaacagttgccacatctaaaggcagtcgtgatatataaagaacctcctccaaacaagatggccaatgtgtacacgatggaggaattcatggagctggggaatgaagtgcctgaggaagccctggacgccatcattgacacccagcagcccaaccagtgctgtgtgctagtctacacttccggcaccactgggaaccccaagggcgtgatgctgagtcaagacaatatcacgtggacggcacggtacggcagccaggccggtgacatccggccggcagaagtccagcaggaggtggtagtcagctacctgcccctcagccatattgccgcccagatctacgacctgtggacaggcatccagtggggggcccaggtttgctttgccgaacccgacgccctgaaggggagcctggtgaacacgctgcgggaggtggagcccacatcacacatgggggtgccccgggtatgggagaagatcatggagcgcatccaggaggtggcggctcagtctggcttcatccggcgaaagatgctgctgtgggccatgtcggtgaccttggagcagaacctcacctgccccggcagcgacctgaagcccttcacaaccagactggcagattacctggtgctagccaaggttcgccaggcactgggatttgccaagtgtcaaaagaacttctatggagcggcccccatgatggcagagacacagcacttcttcctgggtctcaacatccgcttgtatgcgggctacggcctcagtgagacctcaggcccccacttcatgtccagtccctacaactaccggctgtacagctcaggcaagttggtgcccggctgtcgggtgaagctggtgaaccaggacgcagagggcattggcgagatctgcctgtggggccgcaccatattcatgggctacctgaacatggaggacaagacttgtgaggccatcgacgaggaaggctggctgcacacgggtgatgctggccgcctggacgccgatggcttcctctacatcactgggcgcctcaaagaattaatcatcacagctggtggggagaatgtgccccctgtgcccatcgaggaggccgtgaagatggagctgcccatcatcagcaacgccatgctcattggggaccagaggaagttcctgtccatgctgctcaccttgaagtgcactctggacccagacacctctgaccagactgataatctgactgaacaagctatggagttctgccagagggtgggcagcagagccaccacagtgtccgagatcatagagaagaaggatgaggccgtgtaccaggccatcgaagaggggatccggagggtcaacatgaacgcggcggcccggccctaccacatccagaagtgggccattctcgagagagacttctccatttcgggtggagagttgggtcccacgatgaaactgaaacggctcacagttttggagaagtacaaaggtatcattgactccttttaccaagagcaaaaaatgtaatcagggcctatgcctgcagtttctatagaatagagggcaggcgttccgagcctcttcctgagccccaggtctcttcagtctgggcacaggcatttctgccaagtctgttagatctccaggtcagggcacagcactggctctacatttaccaggtcttacgccaacaatagctgacaattccaagaagcttcacgtgtgggtagttttaattcagtttaagtattgctttttgttcaggtgacaaatgagatcagctctccttccagaacgaaagggctgataatttttggccttagttccaggtagattaaaaagctgctagctcacatacaggacagccagcagtaggctgtggagcgggtaggagagagatggctgatactgctcacgtgcgctgcaggaaaagcaatcagtcacaactcacctagcgacctgacttactctggaatcttggcgggcatcgccgaccctattattccattaccaggcactccgccacccacatgccaactgacttgatgcttaataaaactgctgctgcctgtttgattctatttaatgtataatttgaatattaaaccttttaacagaactgtc

SEQ ID NO: 391843 - DNA, 2864 bp, Homo sapiens
caagtcaaggttgcagagtgtatgcagccaggggtagcagccacttcaggatctgggtctggatttgtgctgagaaccactatgaccttttaaagccagtgaggaggttttctgggggcccagaagccctgagcccattggccagacctcctgggagaagcggagcggatttgcatcaaaaagaacactggcttcattgaaattctcctcatcttgagagaaacaaaaccacaaagaaaaggaaagttttaattctgagaaacttcactgaggagcaattttttttgagcttctaaaaatagagaggaaatgagcctctttgggtcactctagttgccgcctcccctgccccatgcccacccccactgctcactcaaggctagcctctctcagtgggtgactgagctgtcttcagtggaagcccgaggcagatgccacgcaattctggagctggatacggctgcccacacggggaccccagcatgctggacagcagagagaccccacaggagagccggcaggacatgattgtgaggaccacccaagaaaaattgaaaaccagctcactgactgacaggcagccactctccaaagagtccctgaaccatgctctcgagctctcagtgccagagaaggtgaataatgcccagtgggatgctccagaggaggcgctgtggacgactcgggccgatgggcgggtgcgcctgcgcatagaccccagctgcccacagcttccctacactgtgcatcggatgttctacgaggccctggataagtatggggacctcatcgctttgggcttcaagcgccaggacaagtgggaacacatctcctactcccaatactacctgctcgcccgcagagccgccaagggcttcctgaagctcggcctgaagcaggcccacagtgtggccatcctcggcttcaactccccggagtggttcttctcggcagtgggcacagtatttgcaggtggcatcgtcactggcatctacaccaccagctccccagaggcctgccagtacatcgcttatgactgctgcgccaatgtcatcatggtcgacacgcagaagcagctggaaaagatcctgaagatctggaaacagttgccacatctaaaggcagtcgtgatatataaagaacctcctccaaacaagatggccaatgtgtacacgatggaggaattcatggagctggggaatgaagtgcctgaggaagccctggacgccatcattgacacccagcagcccaaccagtgctgtgtgctagtctacacttccggcaccactgggaaccccaagggcgtgatgctgagtcaagacaatatcacgtggacggcacggtacggcagccaggccggtgacatccggccggcagaagtccagcaggaggtggtagtcagctacctgcccctcagccatattgccgcccagatctacgacctgtggacaggcatccagtggggggcccaggtttgctttgccgaacccgacgccctgaaggggagcctggtgaacacgctgcgggaggtggagcccacatcacacatgggggtgccccgggtatgggagaagatcatggagcgcatccaggaggtggcggctcagtctggcttcatccggcgaaagatgctgctgtgggccatgtcggtgaccttggagcagaacctcacctgccccggcagcgacctgaagcccttcacaaccagactggcagattacctggtgctagccaaggttcgccaggcactgggatttgccaagtgtcaaaagaacttctatggagcggcccccatgatggcagagacacagcacttcttcctgggtctcaacatccgcttgtatgcgggctacggcctcagtgagacctcaggcccccacttcatgtccagtccctacaactaccggctgtacagctcaggcaagttggtgcccggctgtcgggtgaagctggtgaaccaggacgcagagggcattggcgagatctgcctgtggggccgcaccatattcatgggctacctgaacatggaggacaagacttgtgaggccatcgacgaggaaggctggctgcacacgggtgatgctggccgcctggacgccgatggcttcctctacatcactgggcgcctcaaagaattaatcatcacagctggtggggagaatgtgccccctgtgcccatcgaggaggccgtgaagatggagctgcccatcatcagcaacgccatgctcattggggaccagaggaagttcctgtccatgctgctcaccttgaagtgcactctggacccagacacctctgaccagactgataatctgactgaacaagctatggagttctgccagagggtgggcagcagagccaccacagtgtccgagatcatagagaagaaggatgaggccgtgtaccaggccatcgaagaggggatccggagggtcaacatgaacgcggcggcccggccctaccacatccagaagtgggccattctcgagagagacttctccatttcgggtggagagttgggtcccacgatgaaactgaaacggctcacagttttggagaagtacaaagcaaaacacgcagcctcaattcttgcagcatggtcaaaaagtcccatgtggcgcagcatcatcacggcactgagcaggagggctgtgggattcgccatgtccttgcctgcaatgtctggagccgtcccatgaacctacacatcgggaacaagtagcatcatcaagggagagacaaaaactaacagtcctcttctggggaagctggagtcttaaccatctttcctcagcaatacaaaatatgcactgaaagctactgcgtgcaattcatctgatatggactgaagaaataaagtctgg

SEQ ID NO: 391844 - DNA, 588 bp, Homo sapiens
aaaactgaccttaaaagtctaggggttcggctggaagaaggtttttggttttgttcatgttgttttgctttatttggttaatggaagattataggctaaatctcagttcttttctttgtgttgactctttaggtttccaagtctactttgttttgttttattttttctccaagttacttctttgcacatttccctgagaattagctaccatccaactagaattccaaaatagtagtttctgagcaggacgttgaatatttggtaccctcaaactctttggggcaacaagatagggcctatgatccttcatgttttctgatccagaagctggaagggaaccatctgtccaggagacacccatccaacagtgggggacagtgaccagctgtctgggatggtcaagtacatgcagcctgttggctcagttctcacttgctctgttttctctgggtcacgctgctgcatcttatgctgtagttgacagtactgccttttctctaaggttgtgaactgatgcctaatttccatggtcttcagattagctgagtttgagaaatatttagtatgtaattcatgatgatgtgcaag

SEQ ID NO: 391845 - DNA, 836 bp, Homo sapiens
  misc_feature (1)..(1): n is a, c, g, or t
  misc_feature (18)..(18): n is a, c, g, or t
  misc_feature (20)..(20): n is a, c, g, or t
nggagcatccagcgcggntnctgcagacaggggcgaaggagccgctgagagtgaggcaagagcgggaagccgaaggaaggaaaggagatggggaagggaagaaaaggaaggaaggaagaaaggaagataatgtgttccatcagtattctggtagaaagaatttcaaaccatgcttctctggttaaatatattgattagcattaaaatttgttttgaaagtatctggtgattttgcatttaccagcatctctattctctagttttagcaagtgtttcctttttcacctacagaccctggtagttcagccaggtggatagttgcccataagtctgttgtttggggctctgtctgtatcccatgtgaccagcttctaaccattttgaactttagtttcccttttctgctatgtcaaatattttgattttccataatcatcctgagtccctatccaacaacctttacaactgatacagcctcactttctgttagataacttagtgttaattaaagcagtctcactaaaacgtgcttttgctgttcttccccattttcaccaaagtgaatgagccagtccactaaaaatcagggcctatgggatacacagtgtcctgggtcacaaggcattactgtctttaatgatttgctgggaacaaacgaatcagccatattttctccatcagccatataagaaatctcagaaatacctggatcccttctgcctcacttcgctatggaaccatttttgtttaaatggtcttttaaattggagttgtaagcatcagttgtcttttattcactacctaataaaggatgaagcctaaccacagaacttaca

SEQ ID NO: 391846 - DNA, 525 bp, Homo sapiens
gctcgacgaaaatggaatccttttaacaggcttcaatgttctctgaacaaagtaggagatcatttttatattgtatcagaactgaatcacaaggtcacaagggaaatttatgtcttttgtttcgttttgttttgttttgagacagtttcgctctgtcgcccaggctggagtgcagtggcacaatctcggttcactgcaacctctgcctcccgggttcaagcagttctcttgcctcagcctcccaagtaactggtactacaggtatgtgtcaccacacccggctaatttttggtatttttagaagagacggggtttcactgtgttagccaggatgctcttgatctgctgaccttgtgatccacccatcttggcctcccaaagtgctgggattacaggcatgagccactgtgcccggcctcaaactttttattctcttggctctggcagcgtagtactcacctgtgtaagacagaataataatacaaccaaagatgtgtataccctaatctcctatgaagatattac

SEQ ID NO: 391847 - DNA, 462 bp, Homo sapiens
ctacagacaactggacaggagagagagaaaacagccctctggattctccaggatggcagccgatgtcactagaagctcagggctgatgttcctggttggctattgcaccatttcagctgatacagtccaccatcactgattaccggcgcggttgcggtggatgcacttgaaccaaaccagtgtatctcctgtgatttgttttcatgtgtccgaagacaccagggaaacagagatcctggtgttgttccttgttattacgttttactgctgaaagtaagaggtttatttttctgtcactcagtggagacataccctggaaaggagaggggaaaaaaaaagcaaagatacaagagataatcacctttgcatttgaaagttgaggcccgaggtttactacaaccagcatttttgccaacggttggtgattgatttccatcacggtgtgtggggtgggaagaagtt

SEQ ID NO: 391848 - DNA, 414 bp, Homo sapiens
gcagcctgcttactcaaaccctagtctgactcccctctggagcttgctggattgtgaggaaagtggtgtgtgtacagacagccattggcctgaatcccatcttttccactggagagcttttcacttttgccttaatgacaagcaaatggttccttatgggaattttgcctaactttaggggtgagcgctctagaggaggggggagggttagaagcttcaatgcctaccagaccaagcaagtaacaaatatgtggagtgagtgagccaggtataaaacaaaaaggctaggatgagacctgtggcaaaccagagaataaatatcccctctaaaggcagcggctgtcccagctgagctgtcttgcaggagcactgtcttagcatagctaggtctttaagagaagccagaaatctcgt

SEQ ID NO: 391849 - DNA, 130 bp, Homo sapiens
gctcagaaacagctacgcagtgtttccagtgaatcttggaatgagccaccctaaatacacagccagccccaaacccaaatggttgccacacaggtgccagagttggaccacaggatttgaatccaggccc

SEQ ID NO: 391850 - DNA, 116 bp, Homo sapiens
ttcagaggaatttctaggactgctaaccttctattggcttactagggattcaggtcctaatctataacctcaacatgtgctttgaccatgtgcctcccaggctccactacggatat

SEQ ID NO: 391851 - DNA, 375 bp, Homo sapiens
ataattgtatacccatgttcatagcaacattattgacaatagacaacaggtaggagccacctaagagaacaggtaagcaaaatgtggtacatacatagaactgattcagccttaaaaaggaaggaaaatctgatacatgctacaacacagatgaacttgaggacattatactacgtgaaataagccagtcacaacaggacaaataccaatgactccattatatgaggcatgaagaatagtcaaattcattgaaacagaaagttggatggtggtggctaggcactttggggaaggaggaatcggggggtgtttaatggatttggagtctcagttttatgagatgaaacagggtgggcaggtgtggtagcgcacacc

SEQ ID NO: 391852 - DNA, 367 bp, Homo sapiens
tgctgctgtgcaaaagtgtgagttgtcggtttgtttcattgtacagttgcatcatgctggggtcgtcgtaactggactggctgctttccccgacgtcatcctccatggagatattcttaccatctgtgtgctctgtcttgagttcattttcatccaggttgtgagtggtatttatttcagaactgttatctgtatgaggtgaagcccacatgtctaggttcccaggacctgaactgattcgatttcgagatgactgttgcagtgactgttgcagtgactgaggaggaatgtcagtctcctctgccatggagttaccatcttttgactcaaaaccttcctctttagcaaatggcttgtgttcagtttc

SEQ ID NO: 391853 - DNA, 353 bp, Homo sapiens
actccccaatgagctcaaatgcttaggagaagaaggagacatctccccctgtgaagaagtggactctggggatgagtgattcaccaaaacaagtcaccagaacattaaggtccatgataaacacttcagacaagtccatttatcatcttcaacccagagacaaaagttgccaagtagactgcttaagtacccccttcagagataaagatgagaactgcaaccatttgtctccatccagctgtcctctgcaggtgccttctaccactcaacaagtatttaataaggatgtgctttcttcattcaatacttgaacccctaactctcaacacatgacctaaaaatactgcaccatg

SEQ ID NO: 391854 - DNA, 430 bp, Homo sapiens
gcctcccaaagtcctgggattacaggtgtgagctactgcacccagccgcaaatatatattgataacttactggaagtaaggtaacatggtacaggttggtagaagaaatatagagaaaaacaggaagctgggcttcccttccagatgtccctagattcaaaggggaagaggcaaaatgtattaaatgtgacccttgagcaaggctgcccgtgagaaacttcccaacttcatgggcaatgttgaaaacatttgtccacttgcccttgccccagagagggagaaggtccacatatggtgcctttgacatgttatcccttggcataaagtttggcccaaatgtacatttgaaacctcacgttccctcgataaatttaaagtatgaaacttttgaaactctaaaaaggtggtgaagaccacagttctccctgtt

SEQ ID NO: 391855 - DNA, 414 bp, Homo sapiens
agcagggcctcgaaggttggcaagggacttgcagggacagagcatggagatgggcatatgtagcgtgtgttctggacacggcacgtggaggcagagcacacatgcatagagtgtgtaatgcttcacttccatccttgttccttcagcaagcacccgtgctttacctcgtgctgacccttgagcaaggctgcccgtgagaaacttcccaacttcatgggcaatgttgaaaacatttgtccacttgcccttgccccagagagggagaaggtccacatatggtgcctttgacatgttatcccttggcataaagtttggcccaaatgtacatttgaaacctcacgttccctcgataaatttaaagtatgaaacttttgaaactctaaaaaggtggtgaagaccacagttctccctgtt

SEQ ID NO: 391856 - DNA, 228 bp, Homo sapiens
gccgttctgccccccagccccagccgggccacagccagcgaggccacatggaggcctgacctgttggatgacgggccactggcctccccagaccgcacggtccaagggttgcgtccaactccacatctggacttttcgaattggtcgtggcttccaactggaacaaaaggacccgggatggggaaaacatgggttccccctgccccaccccacctgtttgcacaaagg

SEQ ID NO: 391857 - DNA, 636 bp, Homo sapiens
gtgttggttagtggcttagtgtgcggtaggctacccatgaaacctttgtgctccgatgcctgactgaggacacagtcctcctaaaaaagagtgtgaggcccatcccagcatggctgactctctaatggccaagttcttttgggcctgtgtgtggcttagctctcaggacggtcaggtaatatgtccagagctgggccttgggacctggctagacagacctgaagagttttctgttgcaatcaaataaaggataacaatattaatttggaacatgttgagaagacattgttgtaattaagcacaagttaagcatacataataagcacttcacataattgattagaattattttaacacaaccaaagcaagatccaaaaattcaaaacaaaaattcaattctcagtctttctctctttctcatgctagtgaccattattgacactgtcacctgatttcacctagaatttatttctcaatttacttgatattctctaagtcatagcacttaatatgatgacttctgtacagcaacagtttccttacgcctgatttcctagggccaaggactcaaggagtctgtaaaatttgaccataatttaaaattggtcatatgttcgatgagtaggagagttgatg

SEQ ID NO: 391858 - DNA, 638 bp, Homo sapiens
tcttgaggaccccggcgcatggggtctgtaggctacccatgaaacctttgtgctccgatgcctgactgaggacacagtcctcctaaaaaagagtgtgaggcccatcccagcatggctgactctctaatggccaagttcttttgggcctgtgtgtggcttagctctcaggacggtcaggtaatatgtccagagctgggccttgggacctggctagacagacctgaagagttttctgttgcaatcaaataaaggataacaatattaatttggaacatgttgagaagacattgttgtaattaagcacaagttaagcatacataataagcacttcacataattgattagaattattttaacacaaccaaagcaagatccaaaaattcaaaacaaaaattcaattctcagtctttctctctttctcatgctagtgaccattattgacactgtcacctgatttcacctagaatttatttctcaatttacttgatattctctaagtcatagcacttaatatgatgacttctgtacagcaacagtttccttacgcctgatttcctagggccaaggactcaaggagtctgtaaaatttgaccataatttaaaattggtcatatgttcgatgagtaggagagttgatg

SEQ ID NO: 391859 - DNA, 569 bp, Homo sapiens
ccaagatcgtgccactgcactccagcctgggagacagagtgagactctgcctcaagaaaaaaaaaaaaaaaattccagtctgagcttaaaaggcaaagtgttttgttaaattctctgactgagaacctgcctaagcacgacactccataggttcaaactcagccacctttgaacaaggagaaccaatggaggtcatcctgataagcagcaaattagagcctcattcatcattgctcagatgagattcaaatgcctgtctcaagacaccacatggagagtgagaactatgggattcaacaggagcagacagcacatatcacttcacattccatgataaataaataccaagtagacttgagcattcccccgaacgtgtacagaatgaaggttccgaagatttaagataaaatcttgactacttgattagcataatctccatggtcagaaatgatttcttattcataatggtgctctatgtccctgtaaaacttaccttttaatatccaagttgacgtgtcttgcaatgatgttaaaaagattatggaaatatgatatgcaataggctcttt

SEQ ID NO: 391860 - DNA, 223 bp, Homo sapiens
tcctgcacttacctgcaggctcacctgcaggccacaccagctttccttggcttcctcaaggaaagcccctcactgcctacctcagagacagctccggtgccgtgccctgtgccaggaatgctgttcctaacctcttccccaagcccccgtgcatcttccaggtttcagcttaaatgctactttcccaaggaagccttttcctgaccctctcctcaaacaagtc

SEQ ID NO: 391861 - DNA, 352 bp, Homo sapiens
tccttcagcttaatctctcccactctaagttcccaagctgcccctaatcccgctcaaagcagccctgagaaacatcgccaattatctctccataccaccccaaaaaattttcaccgtcccaacactttaccactatttcgttttatttctcttattaatataagaagacaatagcaactaataaaaacttaaaagaactcaaagaaattttaaaatacttgtgatattgtgacttattataagaaatataaatctggtctttatccccatttcctggcttacagctccgaaagcccttgcattctctgaagttataagtgtctttttgtatgctaataagatgactgatggc

SEQ ID NO: 391862 - DNA, 302 bp, Homo sapiens
cccagctggttctttgcctccctgcactcctacccgattcgggtcttacatcctgcccccttcagcccccagccaggtgatcagtctccatgaagcccaaatctgatcatgtgccaacctgcttccaagcctataatggcccccatgaccctacagtaagagccagactcccccaggaccctgcccgatcctgcccctgctgacccccagggcctggcccacagatctcagtggcacaaatctgccactagggaccccgcgtgcccagttctttcccatcccagagagcgggagcaggctga

SEQ ID NO: 391863 - DNA, 521 bp, Homo sapiens
tctctcagtttctgtgggtcaggaagccaggtacagcttacctgaatcctgtttcagggtcttgcccaggctacagggaaggtgccagctagagccatagtcctctcaactggggctggatccatttcctggctcagtcattgattgctggcaggattcagttcctcataggttgttggactgaaaccttcagtagtctctggctgatcactggaggctgccctcaattccttgctatgtgggcctctccatagagagcttcatcagaccaagtaagtgacagcaacagagagaatgccagaaggtggaagccaccgtctttttaaacgcaagtgtggaagcgacatctcattatttttgatgtattctgttcactagaaagaagtcactagatccagtccaccctcaaaaagagtggagtatataagagtgtgaatagcaggaggtggggactgttggcccaccacaagaaacacatgtaatatctattgagcactatgcctcatatttctcaatgccag

SEQ ID NO: 391864 - DNA, 313 bp, Homo sapiens
cctgactcttatatgcaaactgttcagccagcagatgtttgctttgtcccccattttgctccttcccctaatttcttctttaaagaaattaaattgcctgaggaagactaggatagctgggttttaaggtggcatctgagaacaaagcacattgcaggctgacatttagaaatctcaaggcataaagatcagtttacgtggaaacaaagcctgccattcatctcctcttatccatgtacacagagcttccaggaaagttttctactgcttcattcttaaatatgaatggacaaccataagccagaagctattt

SEQ ID NO: 391865 - DNA, 466 bp, Homo sapiens
gtgaaacgtaagatcctacatcatgagaacatataaaatgaaagggaactgaaaaaaagaaggagtcattggagatgatgggaaaaatggaagatacgagaaaaacaatgcttgtaatattttctcaaaattaacatctgtacctcaacattttccgcatttgctttaacccgtaggtatgattactctttgtttcaggtcgggggctgagacagaagaggtatattctccactagaaaacctttcctgattctactaaactccaacttggctagtgctttcttccccaactttctctctgtgtgtgcatgagagtgcatgaatgtacctgagcacatatacagacgtacacagcttcaatcctgtactgatgtctccactgtggaaaaatgtcaagaaggtccaagagtacaagaaggtccccaactagaaatcacagcataaggattcctattatcttattttc

SEQ ID NO: 391866 - DNA, 557 bp, Homo sapiens
gcatggtcctgtcggttgctaccgacagcctggttcaaaagttagggatttcagttaactttcctgctacttcaaagtaaggtgggctaagaaaagcaccaggccatgggccagtacactgcttttcagtgtcatgaacatcagcttgaatcctagctctgccacttagctgggagagctttgccgaactacttcacttttctaagtatcagttttctaatctgtgtaaggggatatgaatacttacatctagagctgtggaaaggataaatgagatttgtaaggtgctggtacattgccagtaatcaagaaatgaccaacaatgacattgatataattatgatgcacgttactaaggtatactaagatgctgggtccttaagggattttatctgtagagtcaacatagcctattatctaatgagtgatcttaggaaactcgtttgaatttgtttccccagttattacatagacagggagcccagtttttcagagaagccgtatgcaatgctctcttctaaggactcttgcactctcttcatgtaaaaaggcttatg

SEQ ID NO: 391867 - DNA, 463 bp, Homo sapiens
cagggtgagacagagcactctggggttgtccaacgacaacatggggcagcaggaacaaaaacatagcctacatcagtccacccaacctcgcttcccctcttcattcccaatccagggtgtagcctgggcaggttcaaagagctcattctgatctgtggtgaccccaggaaatctgccctaaaccctctaagcagagttttttggacaaccagtgtgtgatccaggagtggtagctaaattatagtggttggaaaggctaaggattgctaagacactctagagctaatctaaatttccagagggacccagcacagataccctctaactgtcaagatgaaagcaggtaccagggaaactcaactgccattgaggacacctaaacactacccatttcagtggccaaccattctgcatgctagtattttcatattttcaaagacaacttgtaaattcacttgacagt

SEQ ID NO: 391868 - DNA, 814 bp, Homo sapiens
accagtactgttgcttctccattcccgagttagtccatctcctgattgaatttcattgtcaggcagtcttttcaagttacaggtactgcatgcattctttgggttcttatacacttcattgattcaaaatatttgtcttttgtttttatattacttgaaggattacttggctaggtataaaatttatcagtcacactttattccccctcaactttgtaaatgttgttccataatctcctagtgtttgattggctggatttctttgtccaatgttttctctttttattaggaagaatttgtgagtattatagtctctgagtttcaatgcttgctgttttctttaatgcttgagaatgtctgtctattgctttcgttcctgaaaaataacttgtttgggaacactttcattagaactttgtggtccctgttttattattttgggacatctagtgttactgtagaaaagtctgatttttctccctacctccttgaaggcaatttttttttttaatctaaaatgcctgagagttttcttctttatttttgaaattcagtaatataaacaaggtatatctaagtgtcacttataatcatttttccctaaattatagtatgcccttagttcttctaagaacattttccttgtttattaccatgaatacttttttttggtcaaattattagatcctctacttcatgacaccagtttttttaatactgaattttcttttgttgttcgtatgtattctaattgctttgatttgtcttttacctttgcatttactgtgatcatctgaagcctttctttttgtca

SEQ ID NO: 391869 - DNA, 320 bp, Homo sapiens
tccctctgtgtgcatgtctgtgtcctaatctcctcttcctataaggacatcagtcattggattagggtctaccctaggggcctcattttaacttaattacctgtctaaagaccctatctccaaatgcagtcacatgctgaattactggtggttagaacctaagaatttggggttaatacgattcagccataaaaccaagcattcaaataatacacaatactatcctagagcaatatttcaaactgtccctttctttggcactctaggagtttgtacgctccagaataaagcattatagtaagattgaccaacaaaaaaaa

SEQ ID NO: 391870 - DNA, 363 bp, Homo sapiens
cttttgggtcactttgtttgtatttctcacaccaggcctcctctgcttcaaggaggcagagtgggacgattcagaactaaacggccactgtttgtacccacaccggaaggcagcatggtagaagcatttccctaaaatcaggaacaggacaaggatggcctgtcacacttccatacagccctgctcaggagggcctggcccaggcagcaaaacaggaaggaaaaatacgaaagatataaggaagaaacagagtcttcaccactcccacatgacgtgaatgtctactgagaaaatccccaaaatctacaaataaattttaagcaatggcaaggtgatcagctgttaaatcaatacccaaaagtc

SEQ ID NO: 391871 - DNA, 453 bp, Homo sapiens
ttgtctgatctgttacttttcttcttgaaatccactaatggtaccctattggcctatgggaaaaattccagccaccctcaagttagttcccagtgctcttcagtgccctgtgagatcctggatggaacgagatagacctgccctctcctgaccttggcaactccacagcccttgccctgaaccaggtgctgtattagataaggaggcagcaggcatcacacatgtgtaaccttgtttcattttaggattgaccagccacttggaaagttttagggactatctctcaataagagataaaactcttactggcatacctctctgtctctcttctttaccagtaatcacaattttggataagcttttgcattttggcaaccatgaaggatggtaagtaaagaggtctaatatcgtaagtcttgagcagggcaggtagcagctacggttgccatgatg

SEQ ID NO: 391872 - DNA, 314 bp, Homo sapiens
agtaaatcaccagacatttgaagaaagcctctaacatgaagaaaaaatattcctgaagttgagttctatgcccagacaagtgcaagggacatttacaaggtctccaaatatttagctgccatgaaccctttctcaggaagctactagaggatgtgctccaacaaaacaaagaattaaccaagaaaaagatacaagctctaggaaacagggaatctaacacaggagagaaggaaaaatggagtaatccctgctaagatcccacattcccaaacctaaattaagttgttatctgaccttcctagaaatcagaagaa

SEQ ID NO: 391873 - DNA, 799 bp, Homo sapiens
atttgctcttggaattctccctctcaggaaactaacagcctgctatgaagcccaagccacaaagagaggccaaggggaaataaacagagtgtgattatatgcaaaacctacaagaatgaggacctccaaactcagtgtacagagtgattttctgctgaaacaattggcttttaaaaaattgtgtgactgaccagcagcagtggctcacatctgtaatcccagcactttgggaggccgagaaaataaaagagacatcagtgtgtgaatgacgactttctgttgctgacttggaagacagaggaattgggtcatgagccaaggaaggtgggcagcttctaaaaggcggaaaagaactgaattgaattcaaatcaaaaaaggtctgaacctcatttaaaagatggttttgtaactgaagaattgaaaggatttctttatgaactagcatcatcttaagacaaaggataaggaccctgaagacagcattatagtgaatcccagaggtgctctccaaaatggtgctaatacagccaagaatacaggtatgaggaaggatgtggaagggtaccttacaggagaaagcaccacttatccaccaagatggcagaggccttcttttctgacccgtggtacaaaaagaaaacattatacaggagagacaataggcaaacaaagagcacacgagaagaaacatagaatgaaagacaagagagggtcaaagagaagaaaaataagatcacatgaaggtgataatacaattttatatagaacacggcaatttgcaatccacaagctgatcta

SEQ ID NO: 391874 - DNA, 674 bp, Homo sapiens
aacatatgtgtgtgcaaactggcttgctttcaaattcctaaatcatacaattaaattttaaaaataactgtatttggaaacaagaaaaaagtcactttgacacccaactgatgtatataaaggagactgtgcatatgggttttaaaatgagatgaaaattgaaatttgatctttgagattaaaaacaatgttatgtaaatctatttttatttaatttttctgaaaaatattgtatttgctttataccctcttgctatacaaacttatattgttttgcttaccctctttttttattcctcctactttttcttaattttgatatctctgaatttaaagtctagagaatgattcatcttcactagttctatcttttccagtgctagtatttttgtttttgagctgtggtttccctatcccatttttgagatctcaaactataatttggtgtcgagtacccaggtatcttatctttaaagtgaagacgtaggcagcacaaaggtgcttttattagaacgtccactagatcagaatgaccagtgcacaaaatttattttcctagcagactcaccaaatttaacctggaagagaatgtctgactctgttgaattttcttaggcaaatacaatatttgaaagtcactgaatgtttcaaacaaaatataacaacattcagat

SEQ ID NO: 391875 - DNA, 393 bp, Homo sapiens
ggtgagtgatggatacattggtaatatgggtgaatgatgtttctatatgtaatagtaatctttgttgaaactagctctttccaaaaatggcatttatctctcagtttcaacgggatgttcttcttgactaggcatgttccaaaggagaaatgattgcaatcacaaccagttaggatctctgtcctgtcttaaaaacactcagcatgagcaaggccttcagatgaaagccatgaaaagattaagaggtagattccattgaaatctacccaggaagtgaaagcctgccaggttaaagataatttcacatctcatttctcctaaaacaaaccacctaataacaggctcattgatcttcaagtctggagaatacattacagctgtcagtttcccctt

SEQ ID NO: 391876 - DNA, 641 bp, Homo sapiens
gacttcatagttaccagaacacaataaaaggaactgctgggcaacactcaagcatggaagaaagaatgagaaaggaaccagaatcacttccctctctttaaggtgaatggttccagacactcatgattgcaaaataaatattaaaatcccttcataaaagtcagttgtgcacctggactcagggttaccatggagattcaaggcagcaatctcactgacactggatccgtgccttctctcaccccaaagttacctatgaggaattcctgagttttactgtggttcatttaacatccggagttcagagacatgaatacttgagcaggccggggcttcgtgagaactaaagcaatgttagaagagcccgcatgactgccttaatgaggaagactctgctggaactggggtcagggtctccaggaaattccagtccatcatctcccttggtgagcaaaagaagccactggtggtccttgcaagtagaagtgcaatgaaaacaggattatggcgatggatgacagtgtgagagagaaaagaattatcaccttcttcccctttcccaaataattcattctctaagttcagcagtccaacaagaatggcttctcatgccagagtagactcttcttgtatttaggacg

SEQ ID NO: 391877 - DNA, 659 bp, Homo sapiens
  misc_feature (220)..(220): n is a, c, g, or t
gttttgtagtatacgtctttaattcgtcacgaccctacttcaggtgacattttaccactttacaacagttcatttttattttccccctcctggtctttgtgctattcttgtcatacattttacgtccatgtaagtttgttgttgttgttgtttgaaacagagtcttactgtgttgcccagactggagtgcagtggcgtgatctcagctcactgcaacctnccacctcccgaattcaagtgattctcctgcctcagactcccaagtagctgggattacaggcacccgccaccacgcctggctaatttttgtatttttagtagagacaacttttcaccatgttgaccaggctggtcttgaactcctgactcggcctcgcaaagtgctgggattacaggcatgagccaccgggcctgacctacttctataaaagttttaaactgcagtatgttgttgttatttttgctttaaacaatcagttctcttttgtggatacttaaataaacaattctttatatttatcgatgttgtttccatttctgatattgttcattcttttgtgtatatccagattctaatctggtgttgttttcctattccttgaaggactttctttaccatttctttaaaatgtaaggactgtggtgaattcttttacctt

SEQ ID NO: 391878 - DNA, 504 bp, Homo sapiens
caaacagttttccaaagtgagatatgaacaagtcatattttctgaaaaaaatttgaagcttgtcatagttgaaatatttgagaatctcagtgggacttagtccaaggatatttgccacaaattaaaactacagaattcgggttgtaaaacttttagcatttccacatggctaataaagaatcactaagtactactgaaacacctataaatcctccccctcatgccccagtgggcccaaagttagccagttttataaaatttaattccttgtgtcaatgttttgtgaggcatttttattttttagatgcagcctctaagtgttgactctgtctaaacatctatcaagtataaaggatgatttgttgaacttaaaagaagagaagtcaccatggtaatgagaaacttgttggagcacatcattgttcttagcaactacaactcttatctgagacacctttctgagaaaaaaatcactcaattattccctttattaagaggtgctaa

SEQ ID NO: 391879 - DNA, 221 bp, Homo sapiens
ctgccattcccttttaaaacttaattgctgtttttagatcaaatagccacccaaagtagcaggcaagaacatgactacatacttctcttttccacctagaattaatttcactagtgccaattattttcaggaaagaaatgcatctccaaatggcacttgaaaaaagaaaaaaaactgggcaaaaatttcacacctccaggcaaatcctttacatcatttga

SEQ ID NO: 391880 - DNA, 2266 bp, Homo sapiens
gccccagccgggccggacgcgggagggtcagggccagggtgagcgcccgactccgagctgtccccgctcccggcgcggcgctccgctctcagccacctcacggctgccaggagtgcgcgggagtttgccccggagcgcggggaagtttcctccgaagctgcgctcctggaacagcagcacctgcaagcgcccggcagcggcccgcgaggttactttatggaattgggctcttagagaacaagaaaagactgaagttttacgggaaaacaaatcatgtggtcttcagattctgaaataaggagaaatgcagccatctgaaatggtcatgaaccccaaacaagtcttcctctctgtgctgatatttggagtagctgggctactcctcttcatgtatttgcaagtctggattgaagaacaacatacagggagagtggagaagagaagagaacaaaaagtaacttcaggatggggaccagtgaagtacttgcggcctgtacccagaatcatgagtacagaaaaaatccaggaacatatcaccaaccagaaccccaagtttcacatgcctgaggatgtacgagaaaaaaaggaaaatcttctactcaattctgagagatctactaggctcttaacaaagaccagtcattcacaaggaggggatcaagctttaagtaagtccacagggtcaccaacagagaagttgattgaaaaacgtcaaggagctaagactgtttttaacaagttcagcaacatgaattggccagtggacattcaccctttaaacaaaagtttagtcaaagataataaatggaagaaaactgaggagacccaagagaaacgaaggtctttccttcaggagttttgcaagaaatacggtggggtgagtcatcatcagtcacatctttttcatacagtatccagaatctatgtagaagataaacacaaaatcttatattgtgaggtacctaaggctggctgttccaattggaaaagaattctgatggtactaaatggattggcttcctctgcatacaacatctcccacaatgctgtccactacgggaagcatttgaagaagctagatagctttgacctaaaagggatatatacccgcttaaatacttacaccaaagctgtgtttgttcgtgatcccatggaaagattagtatcagcctttagggacaaatttgaacaccccaatagttattaccatccagtattcggaaaggcaattatcaagaaatatcgaccaaatgcctgtgaagaagcattaattaatggatctggagtcaagttcaaagagtttatccactacttgctggattcccaccgtccagtaggaatggacattcactgggaaaaggtcagcaaactctgctatccgtgtttgatcaactatgattttgtagggaaatttgagactttggaagaagatgccaattactttttacagatgatcggtgctccaaaggagctgaaatttcccaactttaaggataggcactcttccgatgaaagaaccaatgctcaagtcgtgagacagtatttaaaggatctgactagaactgagagacaattaatctatgacttttattacttggactatttaatgtttaattatacaactccatttttgtagtttgcattcattttctaaaaccctgtatatacttaatgatgataagttcaaatcagctgtaatttttctataattctctgtatgacagaaatttaaccaagtgcagttgtcttgatttaatgtagatttttaccaaatagtatgacaccaattggcacaaagttataggaaaatcacctacaggagatgtaaacaacttgagttgctctaaaatgtttggaaaagagctgcttttgcattatgaattatattgttgaagcaataacctagccagctgttgcattagctaaagcagcctcttgcaatggtaggaaaaaaggatctcaaatagcatgagtgtatgtctatatcctgaaatttattgtctaaaatgcatgaatatatttttagcagtctgtggcatattaatcaaactgttgaattgttttcttacaccctggaaatctttctatcaactataatgataaatccattttgaagtgatattttggacttaggcattttactttagattggaaggcattatgtgatttacaatatgagaatatagcagaaaaaccagatgaggctgtggctttttatattcaacagccaataaaaaatgcacaacatgctaagatcaaagcaaca

SEQ ID NO: 391881 - DNA, 2217 bp, Homo sapiens
gcacgaggaccattctgatgttggagcggcgctccgctctcagccacctcacggctgccaggagtgcgcgggagtttgccccggagcgcggggaagtttcctccgaagctgcgctcctggaacagcagcacctgcaagcgcccggcagcggcccgcgaggttactttatggaattgggctcttagagaacaagaaaagactgaagttttacgggaaaacaaatcatgtggtcttcagattctgaaataaggagaaatgcagccatctgaaatggtcatgaaccccaaacaagtcttcctctctgtgctgatatttggagtagctgggctactcctcttcatgtatttgcaagtctggattgaagaacaacatacagggagagtggagaagagaagagaacaaaaagtaacttcaggatggggaccagtgaagtacttgcggcctgtacccagaatcatgagtacagaaaaaatccaggaacatatcaccaaccagaaccccaagtttcacatgcctgaggatgtacgagaaaaaaaggaaaatcttctactcaattctgagagatctactaggctcttaacaaagaccagtcattcacaaggaggggatcaagctttaagtaagtccacagggtcaccaacagagaagttgattgaaaaacgtcaaggagctaagactgtttttaacaagttcagcaacatgaattggccagtggacattcaccctttaaacaaaagtttagtcaaagataataaatggaagaaaactgaggagacccaagagaaacgaaggtctttccttcaggagttttgcaagaaatacggtggggtgagtcatcatcagtcacatctttttcatacagtatccagaatctatgtagaagataaacacaaaatcttatattgtgaggtacctaaggctggctgttccaattggaaaagaattctgatggtactaaatggattggcttcctctgcatacaacatctcccacaatgctgtccactacgggaagcatttgaagaagctagatagctttgacctaaaagggatatatacccgcttaaatacttacaccaaagctgtgtttgttcgtgatcccatggaaagattagtatcagcctttagggacaaatttgaacaccccaatagttattaccatccagtattcggaaaggcaattatcaagaaatatcgaccaaatgcctgtgaagaagcattaattaatggatctggagtcaagttcaaagagtttatccactacttgctggattcccaccgtccagtaggaatggacattcactgggaaaaggtcagcaaactctgctatccgtgtttgatcaactatgattttgtagggaaatttgagactttggaagaagatgccaattactttttacagatgatcggtgctccaaaggagctgaaatttcccaactttaaggataggcactcttccgatgaaagaaccaatgctcaagtcgtgagacagtatttaaaggatctgactagaactgagagacaattaatctatgacttttattacttggactatttaatgtttaattatacaactccatttttgtagtttgcattcattttctaaaaccctgtatatacttaatgatgataagttcaaatcagctgtaatttttctataattctctgtatgacagaaatttaaccaagtgcagttgtcttgatttaatgtagatttttaccaaatagtatgacaccaattggcacaaagttataggaaaatcacctacaggagatgtaaacaacttgagttgctctaaaatgtttggaaaagagctgcttttgcattatgaattatattgttgaagcaataacctagccagctgttgcattagctaaagcagcctcttgcaatggtaggaaaaaaggatctcaaatagcatgagtgtatgtctatatcctgaaatttattgtctaaaatgcatgaatatatttttagcagtctgtggcatattaatcaaactgttgaattgttttcttacaccctggaaatctttctatcaactataatgataaatccattttgaagtgatattttggacttaggcattttactttagattggaaggcattatgtgatttacaatatgagaatatagcagaaaaaccagatgaggctgtggctttttatattcaacagccaataaaaaatgcacaacatgctaagatcaaagcaaca

SEQ ID NO: 391882 - DNA, 2228 bp, Homo sapiens
gccccagccgggccggacgcgggagggtcagggccagggtgagcgcccgactccgagctgtccccgctcccggcgcggcgctccgctctcagccacctcacggctgccaggagtgcgcgggagtttgccccggagcgcggggaagtttcctccgaagctgcgctcctggaacagcagcacctgcaagcgcccggcagcggcccgcgaggttactttatggaattgggctcttagagaacaagaaaagactgaagttttacgggaaaacaaatcatgtggtcttcagattctgaaataaggagaaatgcagccatctgaaatggtcatgaaccccaaacaagtcttcctctctgtgctgatatttggagtagctgggctactcctcttcatgtatttgcaagtctggattgaagaacaacatacagggagagtggagaagagaagagaacaaaaagtaacttcaggatggggaccagtgaagtacttgcggcctgtacccagaatcaaaccccaagtttcacatgcctgaggatgtacgagaaaaaaaggaaaatcttctactcaattctgagagatctactaggctcttaacaaagaccagtcattcacaaggaggggatcaagctttaagtaagtccacagggtcaccaacagagaagttgattgaaaaacgtcaaggagctaagactgtttttaacaagttcagcaacatgaattggccagtggacattcaccctttaaacaaaagtttagtcaaagataataaatggaagaaaactgaggagacccaagagaaacgaaggtctttccttcaggagttttgcaagaaatacggtggggtgagtcatcatcagtcacatctttttcatacagtatccagaatctatgtagaagataaacacaaaatcttatattgtgaggtacctaaggctggctgttccaattggaaaagaattctgatggtactaaatggattggcttcctctgcatacaacatctcccacaatgctgtccactacgggaagcatttgaagaagctagatagctttgacctaaaagggatatatacccgcttaaatacttacaccaaagctgtgtttgttcgtgatcccatggaaagattagtatcagcctttagggacaaatttgaacaccccaatagttattaccatccagtattcggaaaggcaattatcaagaaatatcgaccaaatgcctgtgaagaagcattaattaatggatctggagtcaagttcaaagagtttatccactacttgctggattcccaccgtccagtaggaatggacattcactgggaaaaggtcagcaaactctgctatccgtgtttgatcaactatgattttgtagggaaatttgagactttggaagaagatgccaattactttttacagatgatcggtgctccaaaggagctgaaatttcccaactttaaggataggcactcttccgatgaaagaaccaatgctcaagtcgtgagacagtatttaaaggatctgactagaactgagagacaattaatctatgacttttattacttggactatttaatgtttaattatacaactccatttttgtagtttgcattcattttctaaaaccctgtatatacttaatgatgataagttcaaatcagctgtaatttttctataattctctgtatgacagaaatttaaccaagtgcagttgtcttgatttaatgtagatttttaccaaatagtatgacaccaattggcacaaagttataggaaaatcacctacaggagatgtaaacaacttgagttgctctaaaatgtttggaaaagagctgcttttgcattatgaattatattgttgaagcaataacctagccagctgttgcattagctaaagcagcctcttgcaatggtaggaaaaaaggatctcaaatagcatgagtgtatgtctatatcctgaaatttattgtctaaaatgcatgaatatatttttagcagtctgtggcatattaatcaaactgttgaattgttttcttacaccctggaaatctttctatcaactataatgataaatccattttgaagtgatattttggacttaggcattttactttagattggaaggcattatgtgatttacaatatgagaatatagcagaaaaaccagatgaggctgtggctttttatattcaacagccaataaaaaatgcacaacatgctaagatcaaagcaaca

SEQ ID NO: 391883 - DNA, 363 bp, Homo sapiens
gtaacccacagtgtggagggttatttgtagaaactgactcaagacctaggctgtgatttccacactattgtttctttggccttttcccacagagactcaagctaactggcttatttcttcttttgaagatctctggcctttgacttctgtttttgccaatgaataacatgtgataatccatactttagatgggtagtttcagattcgcttagtctaatttactacctaaaagtaatataaaaagtaagtatgaaattatagctcttagaattggaggtaagggttggaaggttttatctagggaagacagtagctcatcaacaatcttagatgagtatagaattttgcgttcaagtcctatat

SEQ ID NO: 391884 - DNA, 293 bp, Homo sapiens
gtttttggcctgggaagcagtagagccattcattccctgagcagagggggaggttgggcgaggatgatgagtttaatttttaaatcctattttttcccacctgactttgtggtcaatcagaattaactctggggacaaatacctgtttacctctctagcttcaaaagattcaactaaactaaattaacaagacaggttcagtcttgctcctaaaaggcatgcctcagttgatccttaccagccttttccgggaacacagtagaatggattagtcattatcctctgcttctgat

SEQ ID NO: 391885 - DNA, 373 bp, Homo sapiens
aagacatgatggaatatggtccaaaagtttgaagaacagtgaggggcatcagggcctggatgataaagctggacttcagtggattctgtgttaactgtctagatactgaattattgtgtagtaaatcatcaatgcagagtggaaaccttggaaatgttggctggaccttgactacagttggagaatagcaatttctgtaaggctggctgaatcatagtcagatcatctcagaaaagatgagcagcagtggttaagaaggcaatctctggagtctgtctgcccaggtctgaatcgtggcaggctgtctaatcttgcttttctcatttataaaatgagatgacaaaaatagtatttatttccaaggtatgttgtg

SEQ ID NO: 391886 - DNA, 533 bp, Homo sapiens
acttgaaacttaggaaattttcaaagatttagagtggggccaaatcacaaactcaatgctgcagaacccaagcagaaaaggaaggggctcaggtcctttagagcagggaattccttggtcctacatacctcaaagcatgatctgaaatgggttatgggtatatcccagtggctctgcagactcctggctgtggagagtgtcacaatctgagagccagaatggctctaaagggagggcccagggatccaggcttactactcttgctgttgttaaaagctgatctggtcgctgtgattgttttcaggtgaaggtcacacgccctagctaaacaggcagttgctacacagctcaagccagttgttacaaggaataatgtgagcctggtattgcctggtcttttgattctttaagtgtaaaatatgtatttttatgtctataaaaatatgtaactggactacatagcagctaagatagatagctgtacctaatatatcaacacagatatatttcaaaaacaatggtgtttttgagaa

SEQ ID NO: 391887 - DNA, 470 bp, Homo sapiens
gagaggacgtatcagcatctacctctctggttacctagctactaatcacagtatggcaggcagctaggtgtgtagattctactgtgtcatcgaaccaatttttcaaacagaaagtcagtgagatgtgattaaagcccaagtgctgcaaaagatacaaggtggtctattggaactcctcaatcttcctggaaactgtcaccacataatcacagaaatatcaaatcatagcaaaacttaagctttccttttcttttttcgcctttttttttcttttcttttttttttttggcacactacttttaatagcagaacagtgtgaattaagataatgtgtaactgaagtctaagaatccctgagggtcatgcagatctctcaggtacagtgtgtctgaaacctaacttatccttcagtagagtcttggctacatttcaggtagtgaataaggatataagggtgacagttgggtgaa

SEQ ID NO: 391888 - DNA, 319 bp, Homo sapiens
acttccttacatatcagaaagggagaggagtcaccgccacaaaatcctagcccagcgaccccacaggaaagagctgctttgtcccatcatcatctaaaatcctgtggaagttgtttattgacccaggtcaagccgtgtaaccaggaagagcaagatcttatgattgggaactacatgatgaagcggaggggaagttcattaaaggaaggatgtggatctctttccaaagaactggggagggctacggggcagaaaaagaggttcactgcctagggtatggcggtctaaaggactgaggaaggaccaagtctaacgagaa

SEQ ID NO: 391889 - DNA, 326 bp, Homo sapiens
tggggaagcctcattaaaggcactaatgagcgctccctttcatcgcaggcactgtcttgacatctccatagatgtctctgcaatgatgggcccctccctgtgtactgcctgggagagcagccagggcgaacctgcaatgggggctgagctctgtgaacaaaagaagcctcccttctgaaaggcaagcccaagttgaagtcatcagacagagataactgagctacgggccctcaaggctacactggagcaggtctgaggccagcccagactcttgtcattagaacagtctgcaagacatatggctggcattttgctgaccaagcccc

SEQ ID NO: 391890 - DNA, 304 bp, Homo sapiens
cagggggaaccgaaggctctaggaaagccaaggctggggcaggcgcggcggccggcagtggagggaggacagagcgccgcacaattctcccacctcactccctggctgagcccctgctggagagattctgggaacagccgtggggcctcagaggcctgtggtacaaggcctgagttggaactccgagaacctaagcttccttccccttcttcagtccacccaacactgagaccacaaagaaatggccccaggcggtctaagaacacgggggccgaacctgaggtgcttcaaccttgaagcggag

SEQ ID NO: 391891 - DNA, 162 bp, Homo sapiens
catgatttccagacacttcactactcttaggatacttgttttggatgcattcttttctatctgtgacctaaaattgccttagtttttatagctaccttgttgttcttttggtttttgttaaacttatttgcactgaagctttatttctcatatgaactgctg

SEQ ID NO: 391892 - DNA, 820 bp, Homo sapiens
acggttctatgaattttaacacacatatagatctgggtaacaatcatcaaaatcaaaacatatattagttccatcaccccctgaaaatattcccctgtgctatcgatcctacctttacagtaatctcaaccccagtcaaccactggtttcccatcattatatctttgtcttccagaatgtgacaaaaatgggattttacagtatgtaaccttttgggactgcctccttgcactcaacagaatgcctctgagattcacccacattgctgcatgcatcaataattcatctctttaatagtcccttgtatgactatatcacaagttatccattcacctgctgagggacatttgggttgtttctagaagtttttaataattatgaatagaactgctataaatattcatgttatgcttttatataaacatagccttcatttctctaagacactcagaagtggtattgctgggtcatatgttaggtgtatgtttaactttatagaaaactgctaaaatgctttccagatcggctgtactattttgcattcccactagcaatataagcaatatatgagagttccagttgctccacatccttgccaacgcttggtattgtcaatatttttaattttagacattagactagatcgtagtggcatcccaccacatatggttttaatttacatttccctcagggttaacgatgtttcaatacctttcattgcttatttgccatcatcatatccttttttactgaattgtctgttcaatcctttgtccatttaaaaaaatcatgttgcttgtttctttttgttgacttttga

SEQ ID NO: 391893 - DNA, 100 bp, Homo sapiens
tcccacccactccttggactgctgcaggcaccaggagatgacagatgtcagtctttggagtttggctgatggagggaatgccggtatattcctgagaagc

SEQ ID NO: 391894 - DNA, 410 bp, Homo sapiens
gcgaggttgtaattatgactagttggtaccttcctggcccagaatcatggctaaaaagttaaagttttctgctcattgagagggagtggggaatagaagggaatatgaaggccgaaatcagattgactgcatgttcttactggataacatgaaaggttaatttgttaggaaaacagtaagttttgacctccctctcctgtgggcaggggcacctcttgcacaggtgggtctgtgtcttcatacatgtaggggagagaacgctttgtaggtggccaaagaggggcaaggaagcagggctgaacgcctgaatgtgaaaaggttgccctggagtctggcgcgggaaaggatcaggggtgtgagtgcagggagtctcacttacttcctcttgatgccgtttcggagctatttga

SEQ ID NO: 391895 - DNA, 874 bp, Homo sapiens
tgtattcagtgtgactgcccagcagtcacgggctctaggcctggtcagacctgctcccttcctcagtcgaggggagagaggtgcatccatccccagcggggcacccgctgcagctccggtaccccagccagctccaggccgggtgcccattgcagcttcggtaccccagccagctccagcacggcaggtgccctgtctccgtggcccggtaggtctcctctcagcgagtctcctgttcatgagctgtgcctgttttttggtgttttgctttcctacagctacgaggaacttcttcagtctgtggatgccaatccttttccaattttattcactgtaactactatttggccagttcacagcttttattttccattggtttatggtgactttaacaatgttgccttgtttcaatttgccaatgtttttctctatgcttttagttattaagaaatccttttctatctcaggcattaagaaaatctcctagtttttaactttaagattacactttttacatttagtcactccttcttttgggtttttatgaactatggaatatcaaatatgtataacataaaatttgccattttagctgtctttgagttacccgtcagtggcattcacgatgttgtgcaaccatcaccgtttctatttccaaagctccttatcacctgaacagactcattcactttctaacccgatattcagtggcactggctgagcatctcctaatggccgggccttgccctcagggggattgctgtctagcaggggaggcagacagacaggcacagtgggcacagcaaacaagtgaatgagagggcctggggctgggcaagggcagcctggatggctttgcagagggaacctttgt

SEQ ID NO: 391896 - DNA, 693 bp, Homo sapiens
tgtattcagtgtgactgcccagcagtcacgggctctaggcctggtcagacctgctcccttcctcagtcgaggggagagaggtgcatccatccccagcggggcacccgctgcagctccggtaccccagccagctccaggccgggtgcccattgcagcttcggtaccccagccagctccagcacggcaggtgccctgtctccgtggcccgctaccaaagaagagacaacatccagcagcagccactcccgccggactccagggaacaaggatggaatgagaattgagaagcagagctgagctgtgactcaagcaccgggctggctgccacacagcatccctgtgacactcagatgccagctaacgtgttctaataaaactaaccagtcacatcggtcaaaccctaccttgatccggtgatgggcccctgcccaccccaaaatttcccgcgtgttcatgaaagacgactaactccagaacggaacatgacgcacgtgccgagacatcagcattgagtaagcacccgctgtgggccaggcccggtctccggacagctgcgcgccctccagactccacggtcctacagacaatgaatattatgcaaccaaaatgtcctgggaattcagagccaaaggcagcattcttaggaaatgcctcccactctcctgccatggcatagagctctgctgggctctg

SEQ ID NO: 391897 - DNA, 308 bp, Homo sapiens
gggattacaggggtgagcaaccgcacccagccacaaagcctgtttaaacacattccaattttcacccaaatgtacaccttaatcctatcaactgttacatttctatattctcccagtctagttgtagcccatgttacagcttcactaatggattttggtacctccgtgtatgaggcttccatataaaggggtcccagaaagttctcttttcctcccattttacccagaaacttctcttcaccacccatttcatgtgcacaaagctttgggtccccatcccggggtggagccaaagaacctttgccctt

SEQ ID NO: 391898 - DNA, 474 bp, Homo sapiens
tctcttgggtatatactcgggagtggaatggctgggtgtcatatggtcactctatgttgagccttgaggaactgccagactcttttccgaagtggctgctccattctgcgtgccatcagcagtgtttgagggttctaattattccacattctagccaacacttggtaggattgccagtctggtcatttcatgccaagtgttcttgagaggcagtgtgtgtgcgtatgtgtctttgtgtgtgcatgtgtacactgtgtgtaaatggagtgtgttctgtagcatgagagatgtgcgtgggtaaatgtcctaatgatggcagaatgcccaaacatgaagatgtagtagaaccgtcagtggtagagcaatatagcacagactctctatggctaattgtgcaaggttcctctcacgagcaggaagagtgagacaggaagattaaaaagataatatatttttatgttggaattacttcgt

SEQ ID NO: 391899 - DNA, 278 bp, Homo sapiens
ctaaggaagtcgagatttcatagctgtattcggtgctgatattggtagtccgcatatacttgaagtttcccaaacagaacagacagaaaagaagccctctctggtttgtagaattgaattaacctcgacaagcagcatctctgaaaatatgtctgagttatgtctgctctatcagaactcaccatatactcacaagttaacaaatgctgagctgccattaattacatgggaatttaaacaactgcattttgctctgttttgacacagccactgctagg

SEQ ID NO: 391900 - DNA, 600 bp, Homo sapiens
tggtcaggttggtctcaaactcccgacctcaggtgatccgcccatctcgacctcccaaagtgctgggattacaggcatgagccgccgtgcccggctcaaaatgtatcttaataaagttcatatgtagttagagcagaggttaattgtatccctggtggtgttattagccagaactctctgaaatgtaaataattatacaatgctgttactacctttcatgttttgataccatagtaagtgactcacaaaaaatcagtgcttactattcatctgcatatgttttctgaatatcagtaacactttaaaaagaataatttttgtgagggttattccttagttgagtaactttgagcttaagtttttaagtgaacaaatcctcttacctctggcagtttagctatagaaaataaataacattaaatatacgttaactgtctcatatggttcatgactactattgaacaaaaattagacgtgtgatactgttattcacttattctcacatggtatattaactcttttgatcttagcatatccaaacaaaacacttgaccgactttaaaaagctggagcgggtaatactgaatagaaataagaaaa

SEQ ID NO: 391901 - DNA, 398 bp, Homo sapiens
caagatttgcttaggtatggaaatatcaattttcaaatagtcttacagtaaaacaaatttaaaaggtcctagaaggaaaaaaaaagttttagttaaactcacttatttgcaaactactaaaaaaataaaataaaatgcaaaactgtacttcacctttattttattgctggatgaaattttttgttttcagaattattttcagacaatactgtaaatttttatggccagaatcttagcatttgcattttttatgccagatatgcattattttgatgtctaggttccttcatcttaaaaatacagttcatgccaagttttgggagattgatcattaagcaagctggcgattaagcatagcaacactgaatgtatggatgtaaccattcagataggtggtt

SEQ ID NO: 391902 - DNA, 401 bp, Homo sapiens
tggaggtgctgtgggcaggggctggcttgggcaatgagaaaatggtgttgcttatgtgcccactctgtgctgggactcagctgtgagtgcctccaaattcaccacatttatcaaacctcagtgctctgagacagcatatgatggcctagcaggatgtccattcttttcctggaaccacccatccagttatctccttgagtcgcctgggtggtgaaaagtggtctcatgcacaatggatgcggtgtgatccccttgctatgtcacgcatggcgtctgccctcttccctggcacctgtgccactccaggttatgcctgtgctgctgcccattctacgcccacctggaaagcctgaaaccttctcgtgccttctactgcagctggggagcttcttccacgtctc

SEQ ID NO: 391903 - DNA, 708 bp, Homo sapiens
tgtgataaacaaagttccttttggtggcaccagcttacctctgacctaaaggggcacattcttccgtgccccaccatgcgtctcccaactcaatcatcagactcagttattctgaccaacgttataatatacagtatgaatcctcaactgttacaaaaatgtatttccacattgatcaaaatgtattgaaaaaaactattgcactgtttttgtatattgtttcagattccaatggaaagaactagaataaactataaattcttctaggacaaaaagaaaaaaaactctctgtcatcttctgccaccagaactctacaattcttagcacaagagagacattcaaaaactatctttagtaagataatttagtaagagtctggtaatagagaagtttaatggagagaagaggttggaaagtctattgcttgaggtggtggagactgtggtagtactgccctatggtgttgggaaccatagtttctgtgttttctgtcaaaagaactaaaaaattaagaggcgtgaggtggtttccatgaccatgtggaaagatcaaacatggaagaatatagaaaatcaactttcttttccttataatttaatttatgaacaattttcttttataaatttaagagaagcttaaatggggctctttctaacatagctttgaatgaggttccaataattaacatcagataacaagatgtgtat

SEQ ID NO: 391904 - DNA, 550 bp, Homo sapiens
ccaggcgcttgtgaaaagatacactgacatttaggcaggaaatgcacacaaggtaattcattcctattgaagctcactgagcatcaatctggttgcgatatgaattattcatgtccccccccaccccgccgccgctgccacgccagcctcatgttcaaggctgatgtcagtgcaggacccatagctcctctctctaggccctttcccgggcagctgtgcacagatcaacaccccgtcctagagccagctctcattctctctgtggtgagggctcacctacacggacccagaggctgcgatcgacacctgatgggccactacaattcaattttcttgtccatctgctagaagacagatgaattcatccaacagccagcccaggactccagaggaaacaacttgagataatttatgaattgatttatgccacttctctttccacaaagaatgtatggtggctgcataatatgccttttgttgaacttaccaaatcgttctctcatttcatgttgtggacgtcctagtagggagtgataaatgcatatgctat

SEQ ID NO: 391905 - DNA, 146 bp, Homo sapiens
acctaatagacatctacagaactctccaccccaaatcgaccaggagcctttctaatagttctaatatttctttgtatcattatactgccacatatttaaccggttggcatgcaggttttctgctgcagggccacgacattgtgatt

SEQ ID NO: 391906 - DNA, 483 bp, Homo sapiens
accaagtcatgtctggtaactaattagattaggaaagagatggaggaggagtgaggaaagtgttcagaatgactcgggtttctagcttttgcacaagatgaaggaggtggagccaactgagacagaatgcaggctgcacaggaagtttggggaagaagatgaggtggtccccacctcacagagggtcacccagtgtcactgagttgttagcaaaggtctgaaccagaaatgaaaaacagcatccctgactccacgttcttttacactactccatgctcccagccgctttttagagtttttccaagagttatttcatactgataaacaggattgtgaaggcaggtggaggggaaggacaggaagagttcagtaactgcagcttctgaagcaacacagaaaaactatctctagggctctggctgattgcaaataagctacatctgatgccctggggggactgggggcaacaaacatttactgagg

SEQ ID NO: 391907 - DNA, 442 bp, Homo sapiens
cccagcattcaaatggaatattgaagaactcgcagaaatgtcttttgaagcgctattgttcttttccatacacaaaggctctcttaaaggtttaggaagttcaaaatgcagtggtttgaaaggactgactttgtaactatttggcaacgctgggaggatccgcagggatgagaaaagaggccgaagtgggaagtgcaaatatgttgtgaccatcttcttgggaacggtgctgctatcaagtaggaattcttcaattctacacatcgagttggcaattaaatctcttcctaaagcagatttagaagatgatttttagtagtttttattttttaatggtttgcttgaggtctgaataggcatatctgaaacatttaatcatgttcattgtattcaacgataaaatctgaataaaaattacttattgttgatgaagctcatctca

SEQ ID NO: 391908 - DNA, 586 bp, Homo sapiens
ggaactagacatggttttggtgcctccctctggggatcagacaatttagagaggactttgttcctttaatgcacatgtagataaaagcgtccacacccatgcctatagccacgtgttgcacaagcgtaggggcgcacacacacgttccctctccaccttccgcacaaaaacagtatgtaatttaatcagcaaatgccccatttccatctctaccggaaagctttcagacgcattcccagatcagacagaggactagggttaaggctgggaatgaaacaccagctagtatcccagtgagctttcccaaacacacatacacagcaagtcagactaaacaacgtccaactgaagactcacctcaaatacttagacctaagattcacgtccaggctctttcagatacaccaggtaagtaagcacttggcattcctatctcagccattcacttcacagaatcttttgggtgcctactgtgtgcccaatactgtgcttagtggtacttgccctcagcaggaaaaaaaattaaaagtgttaaatgttatgaaagaaacagaatggaaatagaaaatcacaaggcattcaggtc

SEQ ID NO: 391909 - DNA, 701 bp, Homo sapiens
ccggatgcaaggtctcggatgcaaaggtctctggatgcaaagtgtcctctggatgcaaaagtgtctggttatattatatgtatttcacaaaatgcaagttagcctgagagtctagcatagattaagagatgcaatcaaacacacgctggtagtactggtgaagcagattaaacaggtaacccctgaaatgtgtacccaagaatatgtttagtttttagaaattgtcaacaaagtgaaaagctccaactatgcaaagaggacaagccctacctttgtaaacaagacacctttacaattgtgtatttgtgtatacaggttgaagatttggccagtagcatccgtgtcaaaataaaatagtgaaatgtccatatcttctcaatttcagcgataaaatccatcaatgcgtctccacattgattctttgctaatgacattggtttaaagattatcttgtttatttttcacatgatgactgaaatatctatgcatggtattacttttatatgtaaagttataccgtgttgacagattttgtagtcttttatatgacaaggcagtatgaaacaaaacctttccatgactaccaaagaaagcaatggggttaaatgacagagctttcctaactatttgtctgtcatagagaacagtaaattgcagcctgtctcaaggttggtgtttagacacattctcagattaacggt

SEQ ID NO: 391910 - DNA, 775 bp, Homo sapiens
ctcaaatgctccaggcatgtccaactgccaaactcctgaaatgaaacatcctctgaagtcacaaggcatagattgggccactgtagtcctcctgtgaccccaggaaaggcccctggcctcctcaagcctcagtttccatgtttgtcaagtggggagaataaagcagcactagcactgcctgcctcatggttctactgtaagaatcatggggcaggttgaaggcagagggacttcctcggctcagtgtgccttcaagtgggagctggggagtattagccatgttccagagcactgcaaatgcgctcctttaagagtagagacgctacctgtggacctcattttcactgtcatttttccatgtgttctgattttgtcctatttgccacaagagagggatggggttctcactgcgtcaactccacagagggctgttctccctgagtttttagcataagtaacccaggacccaaatgaggaatttgggtgtttagaggtcctcttatgggtttattttgaactagctgctaagaataatcattaatcatcatgaaataagtaaattgtgggatgccgcccatgcagcctgccatatggagttgccactgttagaagcaggatcttctcacagcaatatctgcccctggagaaggacatctgccatttgccttttttgtttgtttgttttattccctcctctctctctcttttatcttcatataccatcagtttctttcctaatcaataagcctcatggaccatctactattatctcagt

SEQ ID NO: 391911 - DNA, 317 bp, Homo sapiens
agtcagaggaattctaaaaagaatgtatggggaggggtaggcaggggaatcagctctgtcaaatattaaaatatataacaaaacatgtagttgttgcacaggcatgtatagaacagaatgagaaatccagaaacaaactcaaatacacctaagaattttgtatgtgatttttaaaatgttattaatattatttaaaatctgtaggtaaaagatgaatgttcaataaataggattaggattgctgggtaatcatctaggaaagtggatgaaagattaaaatataaaaaacaaaaagtgaccgggcatggtggctcaca

SEQ ID NO: 391912 - DNA, 638 bp, Homo sapiens
tgattaatgcaatatagtgtcaactagatgtagattcctgaggtcttttatctgttgtagctttgtctttttctttttcttttcattacatcaggtatattgccctgtaaattgtggtagtggtaccaggaataaaaaattaaggaatttttaacttttcaatatttgtgtagttcagtttttctacattttagtacagaaactttaacaaaatgcagtttcgaaggtgtttccttgtgagttaacaagtaaagaagatcattgttaattactattttgtatgaattttgctaaagttaactgtaaaggaaacacctgctgacttgcagtttaaggggaatctattctccccatttccaaaccatgatatgaatgggcgctgacatgtggagagaatagataatttgtgtgtatgcaatgtgtgtattagataaataggattgggtatttaaattagcatttgtgaatttaatagcattaagattaccttcaaatgaaaaaaaatctcaaaatttctatttggttttggtgcattttcttttacaatgtaatcatatgatcttagtgtgttagacttgctgagtcctagctgtgtaaagaacatctctattctacatgcacattcctacatgcatcgg

SEQ ID NO: 391913 - DNA, 1501 bp, Homo sapiens
cgtcctcgtgctttctcttctctttagctgtttactcacgccaactaattagctgtcttgctttggtggatgtgctccgtcgctgtgttctttgtcgacagttagtctgatcgtttccttgttcttcttttgtttgttttctggtcttgtcgttttttgcttttcgttgtacttggtactccattgtccggcgttgtgtgtccttctcttcttccgtcgtacttgtttctgtgtctcgttttgtcttgtgttctgtgtcgactcttgtattggtgctattgtgtattgtctgggataattacgagagcaccgggcgggggagaaaaatatgtgttgtatgaataagataaatatcacctactagctagcaattgttttttcagcgcggcgcatcaaataatggttagctggtgggttttttccccaccaatcaatacgaccacctggctaggagtttggttattatttttctcgcctccaccgtagtggggtatataatatttttcgttcgtggtgggttgtgttttccggccccctatgttttgccccctgcccgccgcagggagtaggggctgcttctcgcagaaagggcgtcccggtggcgctgttgcccctcgcactcggtcttgtttttacaccctcgcgccgcgtgctcgtggtgtatttataataactagcgcactccctacctgtatgggggcgccccgcttgtatcacacaaagaccgctgggtgcggtcgttatgtatgggtggcgcccccgtcggaagaggagtatcttctatttggaccgcgcgccgccgcctgcctctgtttttctttttttttttttttttttttttttttttttttttttttttttttttttttttttttttttttttttttttttttttttttttttttgtcttttatctgttgtagctttgtctttttctttttcttttcattacatcaggtatattgccctgtaaattgtggtagtggtaccaggaataaaaaattaaggaatttttaacttttcaatatttgtgtagttcagtttttctacattttagtacagaaactttaacaaaatgcagtttcgaaggtgtttccttgtgagttaacaagtaaagaagatcattgttaattactattttgtatgaattttgctaaagttaactgtaaaggaaacacctgctgacttgcagtttaaggggaatctattctccccatttccaaaccatgatatgaatgggcgctgacatgtggagagaatagataatttgtgtgtatgcaatgtgtgtattagataaataggattgggtatttaaattagcatttgtgaatttaatagcattaagattaccttcaaatgaaaaaaaatctcaaaatttctatttggttttggtgcattttcttttacaatgtaatcatatgatcttagtgtgttagacttgctgagtcctagctgtgtaaagaacatctctattctacatgcacattcctacatgcatcgg

SEQ ID NO: 391914 - DNA, 750 bp, Homo sapiens
  misc_feature (366)..(366): n is a, c, g, or t
aatctttaaaatgatgtaaagactggtttgctttagtatgaaggacccctagttgataaaccatatatttcctctaatagagaccccttcaagtataaaatttacttaaagaacaaaaaagcttccacttgatggatttttgtctcataatcagtgaatagtttcatcacatactgtccacagctgcgcctactgtccctgaaaaagatttcacacataggtctagcctttctcagtctggtatgtattcttgagaaagcatgtgtaagtattatttttgctaagtggaattatttttatttatttgtttatttttttgagacagagtctcactctgttgctaggctggagtgcagtggcgtgatncccggcttactgcaacttccgcctcctgggtttaagtgattctcctgcttcagcctccctagtagctgggactacaggtgcatgcgacaacatccagccaatttttgtacttttaatagagatgtggttttaccatgttggtcaggctggtctcgatccctttacctcatgatgtgcccaccttggcctcccaaagtgctgggattacaggcgcgagccactgtgcccggctggaatcatttttaatatagtttggctagtggtcagggctctgtttaatgaattttattttatttatttatttatttatttattttgagacaaagtcatgctctgttgcagtgagctgagatcacgtcactgcactccagactggcgacagag

SEQ ID NO: 391915 - DNA, 361 bp, Homo sapiens
agggtacacctaaaattcaacaaatgtcaaacatattgtgtaaaagaaaagaacacagctctgagcataacacatggaaagcagattttcccctgtaacattttccaggctaagccacttcaaacacctaaactggacatcagctgcaagacctataatgtgaagcatctgatttagataatgttatgatcaccataggtctatataacttaaacctaacaccagaaaagtaggaaattgttgacttgttgcaaactgtcatcaagtatattagactgtgcctatacagggaggttggggaaggatgccaagttaccctcaaccccaatccctaacttccttaattatcccagggagtgag

SEQ ID NO: 391916 - DNA, 787 bp, Homo sapiens
tcccagctggtgaataaaatctatcacgttgacaaaacagcgtgagtgaaaatcttttaaacatgcatcagctgcaggagctgagtgttgagaaatacaagattaagatgatgctggagagaactgaggggcactcacgttcacccctctaggaaaaccctgcctgtgctctactgagtcatacaccattagggtgataaggcaagctcagctgctaaagacatgtctttcctataatgtatatatcaaaaaaacatggcagagacgttatggctcagctccctgaatcaagttatctctaaaatgaagattagatattagttttattactctattattagagttataacaaatctaagtgctaaattcctttgaatatattgtccttcataccaagctggcaataccataaagataacaactgaggtagaatatttaacaaatatttattgatcacctactatgtgcgaaactacaaagataaatcagacttggtcttggacttgcaggagcaaaacttcatgttccgtgaggataataggcatacataaataacacccaagctgactataacatgaagaagaatggaggagtagaattctgtcatggtgtgtgtagggaggagggtgaggaagaatgaataaagatgacagttgggaaaagatagtttatataacattccagtgtggtctcggagttttcatcctgactggattactaacaagctgcgtgaccttcacccagtctctgtgctttcgttgtctcatctgtaaaatgaaggggttat

SEQ ID NO: 391917 - DNA, 341 bp, Homo sapiens
tccttatggggaggggtggcagtaggagtgaaaagaaaggaaaagagagacattttcaataagggagtacccaggcttgatgacaggttgaatgaccctgaagagataataaggctagaagctaacagcatagctgatattccctggtggcctgaggttccattttaagaactttgtatgcattaatacatttaaatttcacaataactctttaaggtaggtactgttttaattcccattttatagacagaacaactgaatcacagaaaagtttacacaattattcccaaaaggtggtagaacaaggatttggacctaaagaagctggctctggagcccca

SEQ ID NO: 391918 - DNA, 323 bp, Homo sapiens
ggtctgagaggctctgagccaggagcaactgagcgccggtgtctgggaggctgggaggcccgcttcacacctgaggggcagtgcttgctgtttagtgtcacggaagagcatccgggcacaagagacggaaaccacgggagtacgcagagtagcagagatttctccaaaaggccagcctgctctggatttgcctgaggggacttcgtcactgatgataagaaaacagctgccaggctattgcgttctttcattaaccctctgaccgctttttatttatttatttatttagaggcggagtttcgctcttgttgcccaggctggag

SEQ ID NO: 391919 - DNA, 155 bp, Homo sapiens
cactggctatctatcagttccaagagaactccacaaactcgaaatttaaaagatcaagttagaagatgataccccggaagcaatgaacacaactagcgatcatatcttattttcaaaactctgttctcccaacataaagtataagaattgcttag

SEQ ID NO: 391920 - DNA, 438 bp, Homo sapiens
agactctgtctcaaaaaaaaaaaaaaaaaaaaaaagaacctaacataggctgtgtttaactgtgataccaggtgaaatgagaaccacaatctcaggcataaagcccttctccttctccatcagattcaaggtaagagctcaggcccagttttgcatctaccttatttatgttcccatgtcaataaacagtaggtgtttcccttccttcactttccttttctagctattgaggggcaggttagagccacactctgacagtgatcatgtatcttagatttttgtggacaatcatgattttaaacatttttgtctggtggtccacctaagagcatgtcattttcatacaacaggctcccaaattaggtttagaaattatggccacagtgcctactgcacttaagatgcaacttggaggggtggggagggagtggcaggtga

SEQ ID NO: 391921 - DNA, 783 bp, Homo sapiens
aggccctcccacgctctgcccagatccctgggcaagagtccaccgtcagcatcgtcgcttagtgctctccctggttattccagaaacaccagtcgctgaggatctctcacctgcagttccctgctggatcttcattctgactggttgtacaggcatggcaacagcctctgttccacttctggggaggcctcagggaccttttattcatggcagaagacaaagtgggagcagcttgcctgggaccagtggcagggaccccggaacctgaaggtgctgacaaagatgacctgctgctgttgagtgagatcttcaatgcttcctccttggaagagggcgagttcagcaaagagtgggccgctgtgtttggagacggcaagtgaaggagccagtgcccactatggccctgggagagccagaccccaaggcccagacaggctcaggtttccttccttcgcagcttttagaccaaaatatgaaagacttacaggcctcgctacaaggtaggtaaggtggggatcgaaactggggtacgtagtcattctgttgtttcaatccaaaagcatatgtcttccttcttggtcttgttcaatgtttgctctatttttattgaccttttgtacactggagactccggaatcacattccaactttatgtttcagggtgtaacatacattccttttcataattctcccctgtgttagcatcacaggttagatgagtggttctaaatcatattgtccatccttggatttagacttcttgtggcatactgagcaggatcc

SEQ ID NO: 391922 - DNA, 281 bp, Homo sapiens
ctttgactagactaggcttcagcttctgacaaagacagtaaaatgaaactggcttctgggaatggcataagagcctgtttatccaattcttcctttagattgttctcagttgagctcagcaaactaagtggacggaggcttgtaaaaggtaactgcaaaaagggtacaaggtgattttgcttaatttgcattttaaattatagcagtctatgcaaactgtttgaaggaagactgagagatgttttttggtggggaggcacaagattacagatagcttggaa

SEQ ID NO: 391923 - DNA, 409 bp, Homo sapiens
tccaaagtagaagtggcaagtcagcttctgggtcaaaatccttatgccaatgctctcagccgggctgcttttagatcctcaaggggagctttaaaaaacactagtgccaagtccccccttagcccaattagatagaatcccaggggggccaggactgagtacggggattctagaccagtgcttctcactccaacatgctaataaatcacttggtgatcctgttaaaatgcatatcctgcttctacaggtccgggttggggcctgagattctgcagttgggacaagctcacagatgctactgatgctgctggtccctggaactcacctaagtagcaggttcaggacctgcactgcccagcacggtagccactggccacaggtagcgatggagcactcaaaatgtggccag

SEQ ID NO: 391924 - DNA, 464 bp, Homo sapiens
ccacagaaatccatgagtataatccacagaaacaatccacagtctaatttctatacgggaaaagaactgggtaaattaagttagcaagagtccaaaagaaccagaggttatactgtaaccaggaagatccttccacagtacacatctggtatatatttaagtttggaagaccaaagttaattcccttcagtcaaatcctcctcttatttctgcttgaaatccaaggtgcatggtgataaatgtgcacaatttgcctaatttgcaatattagacatcccaatcccttcagataagccctccagaaattgagaaactgaaatggcttactatttttccctgaagaacttttgccttgggaatgtcattaccctaactttctatataatcttcgtctgggtaacttaaaacaagagatttaccttttttgctaaaagtggtatttgtatctgcctgaaatgatgaac

SEQ ID NO: 391925 - DNA, 573 bp, Homo sapiens
aacaataaaaaaattaaggtatttgtcatatctgttacagtattttttaatctttagtgattctttttggctcttagaatttttatctccttgcttacattgctcccctgttcttgcatgctctctacattattcattagagcccttagcaaattaataatagttgttttaaatttccattttgataattccaacgtccgttatatacctggatctggctttaagtcttattcttttcagactgtgtttattgccttttagtatgagacttgcaattttttcttgacagccagacaaaatgtactgggtaaaaggaatggctgtatttaagggtttattaatgtggtgtaaggtgctggagaaaaagtagcattcaacagttctatgataaggtctcaatcttttaccgagcctgtacctgtggattgtgaacttcgaacttccttctcagtttctgtctcctgcccttatgtagaatgagagggtttgagaggtctggagatgtatatttttctccatcccagaggaaggctagagaaagccggagtttagtttctgtagctttgcatttaa

SEQ ID NO: 391926 - DNA, 425 bp, Homo sapiens
ccaggtttctgtcttcccccaattgtttagtaaacttttttttccctctaattaaaaaacacactgagaaaactgcacaaatcataagtaaatattgcagtgatcttttacctgcaacacatcatctagatcaagaaatatagctttgccagcttcctgtaacccttgcctggtgtcccctcccagttgtcactcccatcaaaggcaggcattcttctgccttctattcctgacagttagtgtggcctgactttggaacgttgtataaatggaatcacattggatgaacttgattgtttctggtttctctggctcaccattttgaaattcacccatgtcatgtgtgcggttcacttattctcattgtggtatagtgtcccattgtatgactatgcaattcttaatccattctactgataatcttt

SEQ ID NO: 391927 - DNA, 415 bp, Homo sapiens
cagttcttataaaaattaccagaggacacagtataatttcagtgttgattatttatttaaaatattatacataatttagtttttgaggacagcagcgatcaacagacagtaatatctaggtaacaggaaagtaaattcattttattgttttaggtgctgtttagatagtgtcattgtttaggttctgtttctgtattgtttctgtgatagaaagtttcttggtgttttgaatcattaaccaaatgaactttcttattctcttattataggcttaaaatgaacttccagtggaaagtcactactactatcctaaaatttttatggtgggaaacagaattctaggatctcatgccagtagtgctattgacagtccatatgcttgtttgttgattaaactcaattttgaaacaattag

SEQ ID NO: 391928 - DNA, 546 bp, Homo sapiens
gtcctcactcacacccacaacctaactctcacctactcatgtccaatccagtccagctctggatttctttccccaagtgtcccgagtacctctgaccggactctgcaaacccctcaacactgcacaggtccaaagctgaactcatcttctcctgaaatgagctcctgcttctctgcattccctctctagtgactgggaacgttacctatccacccagctgcccaggcagtaaagcagagtcagcttcaactcctccctcgccgcagatccaatcagctttattgacacaacctaccagaatacacatctttagaatccttctatcttgagagcttgtttggaggttctagcaggggagcgcagctactcgtatacccttgaccaaagaccggtcctcctctatcggggatggtcgtcctcttcgaccgagcacgcagcttcgggagggacgcacatggaacggtgagggaggaaggggacacccgcctagccagccagatcagccgaatcaactctggcgatcaatggggtgacagatgtcacagc

SEQ ID NO: 391929 - DNA, 456 bp, Homo sapiens
gggattgaaggcatcaatggatgggtccaagagaaatgacaggagaagaactggaaacagtgcttttagataatccctttctagtcatctagtcattttgtcaacataggccagtagcttgagggggaatgtggcattaaagctgaaacatgaggtcatccaatctcgaaatagtcccaaatgattgctgaagactgacaagcaagtcagatgagacatggctcgaatgccaccagtaataatagaaatatttttagaagattcagatttcttctcttttttttttttggaccaaacatttttgtgatattctcacaatcttaatggaaaattataacaaacataaaaatcacacgggatctttcttttagaattctgcaaacacaacaacttttggttacactgatgattctggcagcacaggtagggctgttcctctgcagatgttactaaccc

SEQ ID NO: 391930 - DNA, 467 bp, Homo sapiens
gctctgattaaaactgacaaacatttaaactgagattaaaaataaattctacacattaatcatttacgcattcactttaaacttgcttacacttactgataatactgctttgtcttagtttatagatgtatattactcaaaatatttacagttcatttattgggaaccaggtaatgatggtattgaaaagaagttatgaacaattctcacttaataatacctacaatttattgagtgtttattatctgtcaggctctgctctatgttagtatctgtggacctctctctaagaaggtggtatttaatggtgccttgaaaagcaggtaggattttaataggcagcacacgaaaaagcacttaaggaagaaggagctacagaagctgaagcacggaaggctgggtaccaggtgctggatagttcaatatggctggagtttacacctgtccaggggaagaacaaaaggtga

SEQ ID NO: 391931 - DNA, 436 bp, Homo sapiens
ggaagcaattctgggtgtttaagaatgaagtaaaaatggtatttttatttcattttatgtgtacttttttttcaaatgactaataagttgttaggacataaatacttcagctgtttaaacccaactaattaaaaagaactgctgagtgtgttttttggctcaggggtactatgaaaacattactgagacaaattactgggaagcaagaaaggtggggaccccctggcctagcccaatgcctgctacacagcagaggtcttctgtgaagatgaccacaagtgattaaatccaggcaggtgctggaatgagcccagctgagaagttccacctgaatgaacccaacccaaagaattgtgagctaaatagatggttgttgttttaagccacatgctttgcagcagtttgttacagcgcagaagctaatggatacaagctt

SEQ ID NO: 391932 - DNA, 606 bp, Homo sapiens
agcggacgctctgccgccaggagtggcaggaggcgagctgagtgaaatgagctgctccagttcccgcccacgaagggggttaagatgaagggaacaatcctgtctcatctgggggcctgtccaggatatgaaaaacaagtatcactccatcacccaggctggagcacagtggtgcaacctcagctcactgcaagctctgcctcctgggttcgagtgattcatgtgcctcagcctcccaagtagctggaattacagactctacccaacaacagcagaatacacattttcttcaggttgaccaagagcattaaccaagagtaatcaaaaagaggagccgactagacacagccaggaagagcttctcccaccggaagaccagaccagcaagaaagttggcaccctccaagcaggttgttgaaaggaaggccttgaatgtggacagaggacgatgcagatgaggaaagactagaaggttctgtacctgttaacagtggctgatcctagaagagtgaaatttaggcaggtagttggaaagaacacagcacagaaaactttaggatgaattttcctagcagccattctgtatcgtcaaaggtgagttgcaga

SEQ ID NO: 391933 - DNA, 524 bp, Homo sapiens
tagtgcatagccagctccttgagcacaggaagggactctcttccacactggacacaggtggctccctcacttgtttccagaggtcctctttagagctagcacctgtctcccacaagcccccgcccccacccccccaaggaaattgaaggagaacagcacagaatgggatgcagctggggaaaacaatcttggcaatcctgcacagaccctatcagactgcagacagccatccacctattactgtgcctactacagatcctggccacagacctggatgcaaacctcaactccaaaaactagtctatggagttaaaagtcaggatagttcttactgtggggaggagggaagggaaggggttggggaggggcatgagaggggcttcagaatggtaagattctgtttcttgatctgggtggtagttactgggtgtgttctctttgtgatactctctcgagatgtacacttaggatttgcaatcttttctgtaaaatatttcaataaaagacatttattttttaaaaat

SEQ ID NO: 391934 - DNA, 239 bp, Homo sapiens
caagtgagattgtttcttcatcaggttgttcaggcttttgtcatccattggtatctaccctgccccagcctcctctccctgtgtttggctacagcagcctgaaggcccctcccaggcagaggtagaacaacagtggctcatggggcaggtgcagcctcgctgtgggctgctgttgacacccccaagcatgtcctcctgtgagtggcctgacccagggcagctgggcccagaagcatctg

SEQ ID NO: 391935 - DNA, 652 bp, Homo sapiens
agccgccgccaggggcgctcgtctccagggcgccggagcctgctcggggctggagcaggcaggcggagcccggctgaacggaggacgactgtccgagggaggaaagcccttcctccccccaccccaagccccagaagacagacttgcagacatctcctccagatacacagaccctcctccccaccaggagacagatgtacaaactccccgaaaggaacaggcaaactggggctcattccatccaccacgtgcaagaggggagtgagtgaccctgccagccgacagttgagccagactacattttaagcccatgctctttgctctccaccaaggttatacacaccccctcaacccagagagcaagaactgttcacaccagcccattgcaaactttcttctagggcagatggagtgtgggggaacagacctcaaaacatcatctcaatttctgctgtgttcccactgcccccaacttttctgctcctgttcccaaaagctgtatgcccaacagatctgggtgaagtccaagacacctcatccctgtgtgaccagggagccacgtgtatgagtctcaccatggagaaagaactgtggtctcctccaagcctctcttgagcaccaaagcccagcttcagcccaagagctaccagaa

SEQ ID NO: 391936 - DNA, 648 bp, Homo sapiens
ataaaaggtgtggtggtgggtgcctgtaatcccagttattcgggaggctgaggcaggagaatcacttgaacccgggaggcagaggttgcagtgagccgagatcacaccacttcactccagcctgggcaacagagtgagactccatctcaagaaaaaaaaagaaaaacatgctctaagcatttaaaatgtcattctctcttactttaaaacacacatatgaaagaatttaaactattaatgagctgacagggaaatgtggcagaaggatgaagattttatggtcatgaagccctaagtttggggtgctaggtaaccctactcaaagccccaatttctttgtttttattttaaattttatttttaactgacaaataatgattttatatatttgtgggatacagtttccttatttgtaatgcgggaattataataatatcttaccttttgtgaggattaaatgagagaatgtaataaagcacttaatacttagaaagcattaattcattcaacaaacatctgaggagttactaagtgaaggctcagtacaagtggtgaaaaaaacatgtagtgcctatcctcaggaaactctctttttagctggaaagatatttttaaaatgtataaaaacaaaaaaaatgtataattgtg

SEQ ID NO: 391937 - DNA, 518 bp, Homo sapiens
cgttaaaaccacaggcggcagagaacaagtggaggcggagagaagggaagaaaaccaaagctctggtaagaacgaagcccttgatatctgcaaaagtcgggagcatacggtttccatttattacttggacaaagagacactcccaccatcctgaattgagacattctcccactcagttccatgtggcaggaaccaaagcagcttcaatcttgaaggatgtctctgatcactctcagggcccactcataatccatattcatagtccagggtcacccaaggggatcagggcagagaaagcactgcaatgaaggaggagattcaagcccaccctgcttcctgctcccctgtgtggattccttatcctaaagaggctccagcattttaattccaccattagttcttgccctccctggccaacatcccagggtctggtccaagacagaggcagagcgtccatatctcaacctagttttagtgagaaggctatggaggcctctcaacatcaccctttctgtccc

SEQ ID NO: 391938 - DNA, 223 bp, Homo sapiens
tggatatatgtttaatatatccatacctatatatacgcaaaagtaattatttgatgttgagggtaaagttgctgaaaagtgtcaatggctctagaaatattttgtataaaaggatcaggactatacaacacatttaactgttgcaagtagattttatgtccgcagaatagaaataatctcatccccagacacctccggtcatatgttcagtaatgccccccac

SEQ ID NO: 391939 - DNA, 715 bp, Homo sapiens
cagaaaccagagattctcaaacttcagtgtgtgtgtcagaattacctagagggcttcttaaaagagaccactggaccctaccctcaatttctgatttaacaagttctctggtgatgctcaaactactggccgggtgaccacagttttagaaaccctgtgctaagttatttggttcatttggttggctgtatgaccatttctgttcccctggatatttttgtagtctttctcagacttgaaagttcaagtggaatgtgaggagaaataatatttgactctggaatatttttaagaagctcttcatcttctagcttaatgatttgcctgtcctttccctgatatagacattattctgccagacatcataagaccatgcaaatgttgaatgaaaactttgcctttcagccaaaagttttaagttctgcaggtggaataaacagttcattttgaggggaatacagataacctaaaaatctgaagtccaaagtgttttaacgtcagaaacgttttgagcatcaacatgacactacaggtggaaaattcttcacctgatttcatgagatcacagtcaaaacacacaaaattattaaacatattgtataaaattaccttgaggctatgtgtataaggtgtatagaaacacaaatgaagtttttttgttgttgttgtttatttttttgaggtggagtctcgcactgtcgcccaggctggagtg

SEQ ID NO: 391940 - DNA, 267 bp, Homo sapiens
ctccatttcacctgcttcccatttcacctgcaggttagacattaattcagatttcatgctgaacatatttatgtacacactcccccaccccaattattcttctttttttttccccccagtaaggcctgtagtaatggtgctaatgttagtagtaatggtggcttatagttgtttgcagtaattaagtcagcagtagtttttacacattctacttactactgtggttgctgtttgctgatactaccataacaaaataccacagacttg

SEQ ID NO: 391941 - DNA, 587 bp, Homo sapiens
acccttacctgagcaagatgcatctgcttggtctctctgtctcctccattgcccctctcaaggccattttccactgagctgtagagccattcgtttatagccctgcttagccccctcaagtggccccctgttttgtctgtacaaatgaagtccaaattcctcagcacgcatacagtcaagcgtctttgagatctggcttcaccgttgtcccattccctatccagtgtgcttcccagccaggctgaacttcttgcatttcccaaaatgccgttgtgcccttgtttggttgttttctgtgcctggaatgctgccctatctgtacctcccctggtttggtagatacttgctcatttgttaagacctggctcaaaagctacctcttctatgaagcttttcctgattacctcctcctctccagaattgatgacctcttcctttggactctcagtatcacatctatatttatgtgccagtgcaggtagcattttattacactgacttgttagatctgtaagccacttgataagggctgcacgtgtatcttgtccccagttgtacccaaacttagctctgtgtctggctggaaa

SEQ ID NO: 391942 - DNA, 192 bp, Homo sapiens
aggctgaaggggaaaagggaattactgagaatgatgtgggagcagtagaagaagagagagaggaaagtgtctgaggggaatcagaaagggttaccagcaccccaaaatcacacgcaccatgtagtgaggctgcctgtgttacacacaccacctgcaatccccatcaaccccactaagtccagaatagccagc

SEQ ID NO: 391943 - DNA, 514 bp, Homo sapiens
caacattaaaaaaaaaaaagaggaataatgttaggctatttatttgagatactattattatgattattattttagagactgggtctgactctgtcacccaggctggagtgcagtggcatgattatggctcactgcagcctggaactcaagtgatcctcctgtctcagcttcccaaagtactgggattacaggcctgagccaccatgcctggcctcttcttttttaatgtaagaatttattgctatcaacattcttcttagaactgcttttgctttcgttgcatcccctaggttttagtatgttatatttccattctcttttgtctcaagatacgtttctcttttgatttcttctcaaccaatctattggttgttcaggagcaggttgtttaatttccacatctttgtgatttttccctgaattccctctgttactgatttctagtttttttaccattgtggttggaaataatacttgttatgatttcagttataaatttgttaagacttgtttt

SEQ ID NO: 391944 - DNA, 405 bp, Homo sapiens
agacagcccattttttcttatgataaagacggcatttggctcatgagcaaggtggcaagatcatcaagtgagtcagacgtgcagctctgggaaacagaagaggatgacatgacagaaggtgatttagggtatggcctcggaaggaaacctggtgggatttatgaaatagaattttcacataggtctagaaaaagatcagatggaaagaactttagccctcctccatttccgagaaagggagaagaaagaaatgaagcgagttttcagtattccaagcataagagccagcaagatacattccctcaagtgtccagaatttccaattacagacgacaaagtagcactggtaagaatgctgaattgtcaatgaagaattaaggctatgtcttaatgaactttagagat

SEQ ID NO: 391945 - DNA, 785 bp, Homo sapiens
cttatatgctagaatagaaactagttgtcattatttctctttttaacttatgctacatggtttaaatgtgtttcttttgtttttttctttatagtagcatataacactcctattaagaggtctggtaagtgccttatcttatccagcagatgattgtaggccaggggtctgaccagtcactatcattgtccatctcaaatgaacccccatggacaacctcatccttttaatttttcgctaacatccgggctcaagagaacttcagagtaaaagtcatttggaatatatataggtcattcctatgtatactcccttgtttcctcaacagtcagttaaagcactatacattttagtgttgctttattatttttttttccgtaagtattaaattagaatggttttctgttttgggctttgatactcaagaataggagttcaagtgcatttttctgtttggatatattgtattgttatttgttttttcctcttgaagaaagcattaaacctttcgaaaactgcttaaaaagcaaaggccttcccctgtgacctggaacaagacagggatatctacttttaccatttctattcaacactgtactggaggtactaggtaggacaattaggcaagaaaaggaaatagaaggcattcagattggaaaggcagaagtaacactatctttatttgtagatgacatgatgttatacttagaaaatactgagtaatccactaaaaatctattagaactgacaaatgaatccagcaagtttgcaggatacaaccatgt

SEQ ID NO: 391946 - DNA, 654 bp, Homo sapiens
cagaatggcacaggataggaaggggaagtggaagagatggcaagccagtgccagcatgggctgaatgtaaccagtcactgtctagataggaagggctggtggcactcatgtcagtggatgagatcagcaatttgtcattttacttggcatttacaaaatgaacttggagtttggtttgtagctaaagttaggttggctgctcagcttgaaatggaaacatagccaatgaaatgattaatatacatgttgggtcccacagttttgtacctgaagcagtgcaaggcttgggcatattgattccttcctaggagatctaaagaaaaatcccttgaatcaagagagagcttattagatcagttttatccatggtatatccctctatttttgttttttaagtattaaatatttgttagactcaattttggtttgttgactgtcatgatagaggacttgcagagtctgtgcttggtgacctaccttgtactgtcttgttcttcacactttgctgcatcttctcccatatgtaattgattcatttgtttgaattttgaattttggagcctattacatctccctttccctcccagtctccttgatattcccttgtcctccccatttagcagcctttttgaagctgattaccaccatggaggc

SEQ ID NO: 391947 - DNA, 219 bp, Homo sapiens
ggactgggacggagagactgaccttggaaccggatgcaggagggtcatcagtgagaagagtttctggggagtggtggatgcgggagtctgtgttgaagctcaagacagagcgaccctataatttatagtcaaaatcaggacccttttttttttttgagatggagtctcgccctgccacccaggctggagtgcaatggcgcgatctcggctcactgcaac

SEQ ID NO: 391948 - DNA, 134 bp, Homo sapiens
cattctcagaaatctagccagagaaagtctaaatggtaaaggttccagctcattatcttcttcccttttctcaagttttctctccatctgacatgtgagctcagtatttaccattgccctttctacaaatttaa

SEQ ID NO: 391949 - DNA, 661 bp, Homo sapiens
ctagaaatggggtgcacagagatgaacaagaaagagcaggtccctgccattgtgcagctcacaaggagttggaggaaacaggcaatacacaatacatgcatcactatgggtagtggaacatgctctgcaggaaacaaatagggtgatccaatggaaagtcatcactggaggaatgagctgctcagggaaggcctcttccttccatagtgatgtggtctgagatttagaagacagggaaggaccagttataggaagaaccatgggaagaaaattctaggaggtaaagggaagaaccaaggccctgagttagctgaagaaaggagggtggggaatgcgggagagagggatgggagcaggatcgctggtgcctcacaggctgtggtactgagaaggacagttgggacatcattgaagggttttaagcagaagagtgtcatgatttgattcatgttttgtaagctcattctggctgttgagaatgaattctggggagaggcaagagtggaaactggggaccagtgaggagtttgtggtcatagtccagactggacatgatgatgacactgagatgacaatgatgacaatgacaatgatgttaagaatacaaacagctcacgtaagtgccaggcattctttgaaaagcaatgcatttaatcctcac

SEQ ID NO: 391950 - DNA, 253 bp, Homo sapiens
aaattctgatgaatgttgaagtttgagaatcatggatctcacggaaaaaagcatcgtgattccagatttatacagctacgttgcttgctctcttgctcaggtaatgaggcagggagtgttaaacaaagtaactaggtttaacactccgacttccttgagagctcccaaattatattaatttcctcatcttcccaagcaaatggtccctttctcttttgttcatcataatcactgctaaagcttttaatataga

SEQ ID NO: 391951 - DNA, 256 bp, Homo sapiens
catatgcctatctagttctcaacattgaacaatacttgtatcctaggtagaaagcttgatgacaggcagcacgcctcacggcagtagagacagacaatactcccccataacagttaataatcaccatgcaggccaggcatggtcttatgcctgtaatcccagcattttgggaggccaaggcaggtggatcacgtgaggccaggagttcaagagcagcctaggcaacatggtgaaaccccgtctctactaaaaatac

SEQ ID NO: 391952 - DNA, 154 bp, Homo sapiens
ggaaaatgacgttgagaattggacgttacactacaatgtagtcctccaatgaaggctctcaatgggcatttctttaaggcctaagttaaagataaaatagaacaacttccatcactacaaaagatagtgtactcggaggaacttgtagagattt

SEQ ID NO: 391953 - DNA, 550 bp, Homo sapiens
tgcttcgagacagggaagggaagacggatgtcaagatgacctttccaatgcctggcaccggagacttggcaccactcagctcacggccacctccctcttggcagactggaggccttcagggcccagcaggccctgacagcaactcctgcagttcatcaagacaagggcctcagctctctcagcctggccccagggacttgcagcacatcctcagggcatgctgcagcctgactgaacgcaccaggtgaggaggaggcccaagcggggcagttctcgttccttggatagttctagtcttctcgatctatcaaaaataaactcctgtggggagctcagattgggccagcttcaggatgggcacaggaggggaacagttatctgctgtgggtgcatggatttccggcaccttgctttttgccaacaaggtcacaacgtgcacctggtgtttccaagtgaggagggaaggggcagaggccgggatggagggagggttggaaagtggtggctggagaatgtgtgaggactcattccagaaatccctacgctgccc

SEQ ID NO: 391954 - DNA, 171 bp, Homo sapiens
taacaaagaaatatcacacgtaatctacactacagaccaaatcgacctaacagatatttacagaacatttcatacgaaggtcacaggatacacattcttttcctctgcacacagatcattctcaaagataggtcatgttaggtcacaaaacttgtcttcaaacgttcaaaa

SEQ ID NO: 391955 - DNA, 397 bp, Homo sapiens
tccaacagtgttgcctctggggaagaaaactacagtgtggaggcgaggaagaatggaggggagttggtgttccctatttattctttttgtttgtttgtttgtttgagatggagtctcctctgtcacccaggctggagtgccgtggcgcgatcttggctcactgcaacctccacctcctgggttcaagcgattcttctgcctcagactcctgagtacctgggacaacaggtgtgcatcaccacacccagctaatttttgtatttttagtagagatggggttatgccatgttggccaggctggtctcaaactcctgaactcaggtgatccacctgcctcagcctccctatttattcttttgcacctttttaatgatttcctagttgcatgtatcaccta

SEQ ID NO: 391956 - DNA, 322 bp, Homo sapiens
acgtctgtttctcgctcctaggcaaggttggcctcttgcacctctttccatagatcccagctctgcctttggggggtgcaggcctgtgcacctgcaagagggcccagcagtgcccagcccctcggagcccgagtcagtgagagcacccaggaccgggaccagaggcccccagtcagcacagctgcttcaaaattgaaagccaggctgggcgcggtggctcacgcctgtaatccctgcactttgggaggccgaggtgggtagatcacttgaggtcaggagtttgagatcagcttggccaacatggtgaaaccccgtctctatt

SEQ ID NO: 391957 - DNA, 224 bp, Homo sapiens
tataaactcataggtggcacctgtatcctagaaggtaaaactcaaacagccagccatttggcagccgtctgtggaacaggccagcaggaagataaacaattgctattagatctgggactgtgggaagcaaggaaactgggctttgctttgggaacctttttatggaagattgggagaactaaaagctccctaatgagtttaaagtttagcattataggaaaagc

SEQ ID NO: 391958 - DNA, 483 bp, Homo sapiens
tgggctcaagcgatcctcctgtgtagctgggactacagtcgtgcaccaccacacctggctaatttttgtaatttctgtagagacagggttttgccatgttgcccaggctggtctcaactcctgggctcaagcgatctgcccacctcagcctcccaaagtgcttggatgacaggtgtgagctgccgtgcctggccccaattttgtttacctcttgagttttctgaatttatttcaccatattgcccctcccttcctttgacgagcacagtatgggaaaacttgtacaagacatggaaatgggcttctggaaggagaaagtcagcttgtcaatgatgagcaggattagggcaggagggtcccctgcctcctcacagggtcaccgtgtaagcaaactcctgcggcagaagtgaaccaagttggaggcagggaaagggcagaaaaaggaatattctggcaagaagaggggcataagagaaagctgaa

SEQ ID NO: 391959 - DNA, 268 bp, Homo sapiens
agggggagaaacagctgctttctagagccctcaccttttccacttctctcatctttctgggttagggtctagcgggggttccatgaggatcaggctaaatgagcttagaaaaactaagcagactactgtatcagaactggatcacagtagacaggcgttttcaacaaacatatattgagtatccctgagtgctttggacaggaagaggaattatagacgaagattgtaagtcgcagtaatagatgaggcaaggagcaccagtgaggac

SEQ ID NO: 391960 - DNA, 182 bp, Homo sapiens
gcggccgcctactactactactgctcgaattcaagcttctaacgatgtacggggacatgttggtcctctgccctggacctgtgacattctggactatttctgtgtttatttgtggccgagtgtaacaaccatataataaatcacctcttccgctgttttagctgaagaattaaatcaaaaaa

SEQ ID NO: 391961 - DNA, 457 bp, Homo sapiens
ctgtatcagttcctcttctaacaaactacggtctttcttgttgctactcgataatcgctctctcaccttttcatccagaagctttgtggtgttcacataaggacttcagtgctttcagcacttccactatcgctggacacgcctgctggagactgcgcttgtctcttcaccacggtcatcctaagagaccgctcatgcctggagacaaggcattccaaatgctctaacagcagcctgaagtatattctttagaatttcatttagtaagcaagttatattaattcttctttgtctgaaaatttttttttcaccctcattttcaagaagcaggaactggccagttcctgcttctgtaagaatcctgaatttaggattttcaactgtcactactccaacttctatttctgaaggtttgaaatcaattgatagaacagtagacaggcatgtaattgcagtt

SEQ ID NO: 391962 - DNA, 806 bp, Homo sapiens
atgaaaggggcttttagggtttgccagcagtagataagacagatgtagagagcagcagcttggatggagggaactcagaaatgagctgtccaagtaggattttttaaagtataattttttttattaaatgtgataaaacttccttttcaccaggcttcctaaagacataaattatctttcaaggtcttgggaggtagattcgtgtgtctgattagcgtgggttccacatggcaacaggcctcaaagcagaagcacacagtacttgatttatttgttggggttacacaagcttccctgcctgttctgctgtgggacagcctggagtccacacccacactagcctatttttggtctgggttgggtagcttacaaggaaggtaagaggccaattgaccccttatcagtagtttcattaaccaagccactcccagatttttatttgtttggtgggaggtctgggtcatcaagtggggaaacttccccagaacaagctactaagtctccgaacaaaggaacacaaaaggtgttaccattttttcctgaacaattggtgggttttttgtttttgtttttttttgacagagtcttgctcttttgcccaggctggagtgcagtgatgtgatctcagctcactgcatcctctgcctcctgggttcaagtgattctcctgcctcagcctcctaagtagctgagattataggcgtgtgccaccatgcctaagggaggagaccacccctcatattgtcttaagcccaatttctgcctccaagaaagaagtaaaaactaaaaggcagaaatgaaatcca

SEQ ID NO: 391963 - DNA, 198 bp, Homo sapiens
ttctcttacatgtatctgaaagcattctaactcataggccctgcagtgcacatggtcaaatctctgctcagatacctagattcctttttctatttttgttcctcattccttatacccattttgcttccagtgggctgtacccatgacactcctcagggacctgcttgtttgctcaaagagccagaagtgccttgaatt

SEQ ID NO: 391964 - DNA, 180 bp, Homo sapiens
agaggctgaaggcagagcccttcaaaatatcaacattaaggaatgggcataggaagaggatatggagaatgtattgctgaatagaaagtcaaccaaaagagaagggacccatagaaacggagggaggagaatgttttaataagaacaaggtggtcaaaagtgtcacctgctccaaggact

SEQ ID NO: 391965 - DNA, 261 bp, Homo sapiens
gggacttcaggcaagcactggcttccctcaggctctgctcctaacctctcaatggcagtagggggcagaaggcaagacatgggccatggggaaatagtttccagttttcagatagagaaattgaaatcagagtataccatttgggaaaacttaatttaaaatttaaaattcataagaatttataatgtgactctcaggcaggctttaatcgcatttggcagattaaccatgctaggcacattgtccagatagcggccattg

SEQ ID NO: 391966 - DNA, 240 bp, Homo sapiens
tttctataattttgaaccttactcattagcaagttatttaaggtgtgacacatttcacgtaatgctgttgtgattcataggaaccacataaatagagaccacatgtttcccacttaagttatcaaaagtcaacacaaacaggagtgatgactatgtagtcaaacagccacaccctgccttgtatacaattttttcttctctttcttgtttgcccctttccttattttcctaaggcagtta

SEQ ID NO: 391967 - DNA, 746 bp, Homo sapiens
catagtggctcacgcctgtaatcccagcactttggtggggggctgaggtgggcaaatcacttgagcccaggagttcaagaccagcctgggcaacgtggtgaaaccccgtttttgtgaaaccccaaaaatacaaaaaatcagccaggcatggtggtggcatgcctgtggtaccagctactcgggaggctgcagcgggaggatcacttgaacccaggaggcagaggttgcagtgagccaagactgcgcctctgcactccagcctggccagcagagtgagaccccatctcaaaacaaacaaacaaaaaataaaattacacatattaaaacttcaagataaaacactgagttatcttacattctttgttgttgttgttaagtctttgaaattgagtgtgtctcaggcaaatccagcacactctagtctggaggagccatgtctcaggtgccgtccagtgcatgtggctcgtcaggctgtcctggacagcggctccagcctctgacctcatcttctatcttcgtccattccccttcctcaggtgatgcattcgctgcaccacctaagggggtaccacgtttgtcagtctcagctacgggacctacaaagaacgcccttcataaccctggcactcaggccccacgtgcccctgagggagcacgagaagagcggtgaccttgaaatcgattcactgaatatttgctgaacacctactacctgattaacacagataggacagttatcatcctca

SEQ ID NO: 391968 - DNA, 237 bp, Homo sapiens
ggggacaaagtaacaaggggtgatttttcaaaagggaagcgagggaagcccctctgacaaggcgataatttagatacggcctgagaaaacagagggagtgagccacataggtatgtggtaaaagtgcattccacacagagggaccagcaaacaccaaggctgcaagcagaggatcgcattaaccaaagatgtggtgctgagggtggaatgtgcctagtgctgtgtgaggtgggagat

SEQ ID NO: 391969 - DNA, 501 bp, Homo sapiens
aacgaggataaaagatgacgagatagacattgttctgtcaaatggttaactttactttggagggttttaatgttttaacttttgggattaaagatcctcttcatggaatggagactaaaatatagtttaaagcccagctattttccagcaataatctaaaataacatttgcaaaattattcagaataggtaagaatggtacttactgtttactggagcctcttctttaagacggagttttcgctcttgtggtccaggctggagtgcaatgaatggcacgatcttggctcactgcaacctctgcctcccgggttcaagtgattctcgtgcctcagcctcctgagtagctgggattacaggcgcccgccaccacgcctagctaatttttgtattttagtttcaccacgttggccaggctgggctcgaactcctgacctcaggtgatctgcctgcctcggcctcccaaagtgctgggattacaggcatgagccactgtgcccgg

SEQ ID NO: 391970 - DNA, 195 bp, Homo sapiens
tggttaatggattatttcataatgttcatcagaagctgcgactcagttgatggcattacaggaatagagtgcaatctgctaaggaaaagtaatgacaagagagttttggtgattaaagaaatttaaaatcactgtattaaatcagcttaataaaaaacacacattggctgggcacggtggctcatgcctgtaatc

SEQ ID NO: 391971 - DNA, 305 bp, Homo sapiens
gagccctgggaatggtgagcgaaggatagtcgttcagatattatcagggggtcagcgaggcctccaaatgggagtcccaactaggacacctccacctgcccagtgactagacaccgggggcattgccaagcctcaggcaacgggaagaagacaatttggtcgaaacaacaagagggttagaaatgaatgttcctgggatgttctaaatcttgaagtaggtgctagacacacaggtgtatctgtgtgtaaaaactcatggcatggtacagtgaagatttatgctaacacttatatataaatatttt

SEQ ID NO: 391972 - DNA, 513 bp, Homo sapiens
ggtgagtaacctagcagacaaaatacttcagctgaaagagtcaccagctggatggtggcagagagaagtacttggcaagattggtttttcacacaaggtcaacgcgaacggaacctctcataccagccacctactagggtacagcatcaagacctaatttcagggagggaaatgggaaatgcatccatttcatcatcactggatactaagggttaggcctggcctcaggctttataaaccacatgtgtgccaaatgtccacgtctaaacctagagtttagggtgaaaactatgaatgggctaccatggaagttacaaaataagaatgcaggggggaagcctgagggcgcgcgccacccgaatgcgggaggagccagatggggcagcataggaagggctgttctttaccactgatctggggggctcatgatcgcccagagggacagaccaacagcatcggggtctgtgggttgatattcatctgcacgtcgacactggtggggatgccagggaa

SEQ ID NO: 391973 - DNA, 729 bp, Homo sapiens
ggcaaggaggatgtgcacacagtgctactggcttctagtgagtagaagctaaggaagatgctaaattctacaatgcacaggacaaagaattatctgacccaatatgtcaatagtgccaaggctgagaaaccctagtctaataggatatgagactgtcattaaatggtattatgattgaggctgaaggaacaaaaagaatctagaagaatgcagaattcaactgggcaataaagaaattaactgaaagcaatcaattgtcggaaactgaatagcccagaagaagtagatagtaagccaatttcgactgaaaagagtggacatggggtccctgttgatgtagcactcaagttggatatactcatttgagtagcatgtgcccttcaagtcctatgtatgaaccttgaatctctgaagaaaaatttaccatgctgtggtcttgaattttcaagccagtaacctcggtgtacctgagccggtaaatctcacccccttccttgggtaaatatccttaagtgccaggaagatttagaatttagtataagaatgacaaaagaaaccaacttcatcatgttaaaaccaggtgttaagttcagggtaacctgtatgtttgttatttaaaatagtgattgtaatttttaagagactctgacatgctagttttatgcttttaagcaaagttgtaggataatttcattaaatgtgagaatgatattggaatgttggctagaa

SEQ ID NO: 391974 - DNA, 517 bp, Homo sapiens
ggcttgaacctgggaggcgagggttgcagtgagctgagatcgcaccactgcactccagcctgggtgacagagcgagacttcgtctcaaaaaaaaagaagaagaaagaaggaagctgaggttcagacaggctaagtccctactgcaggctgcggaatctaaaaaggtcatgaactctgagagtttgagatgagcctctaaaagctgtatcaatagcaccttgcactgttgaagcaggtaagtgttttccttgttacttcttaagttcagttggaaacccaacatagcaaatcctctagaatgcagctgaagcagtactaaggctgggtgtggtggctcatgcctataatcctgtagggaggcaaaagcgggaggattgctggagcccaggagttcaagaccagcctgggcaacacggcaagacctggttctccacaaaaaggaaaaaaaaatgctaagaggcaagtatatagcaataaactcctacatcaaaaaagtagaaacatttcaaataagaga

SEQ ID NO: 391975 - DNA, 707 bp, Homo sapiens
gggagacgaagatatctccacactcagaaataggttttactgaaaagtttttggtggtgaaaaaaataaaatacctcaaacaagctgcagaaacaaagattttcccagaaattctcaacaactatgaggatagactagaagttctgcaagggcagacacttgtacatcattaatccttgacagaattggtaggaaacctttggattttagccagtgtggcagagtaccctgagacgtgacagaaaagagtggtggtggtcaggcactgaattcagttaactgttactggtttctaagaactcatcatgcattcacatagaatctttgtcaacttcacaaaaatcctagtagagtgagatttttatccccattttaaaagtgagccatgtaggtaactcgctcccaaattactcaataaatgctgcatctgaattagaatctatcggaggctggctcccccatctggacttcagcatgacttcattaatgttccctaccctctccagccctatgctggtccactagtcactggtgtaccttcctataccataactgtatctcctgtacagaataataatgctcagatgtttggagatgtatgtgcaaagttcagaaatgactttagacaacattttaccttccttcacgatgaaatgagaaaaattaacaccaatctaataccaaaacaaaataatttaccacaaaag

SEQ ID NO: 391976 - DNA, 333 bp, Homo sapiens
atacaatggactttgggaacttggggggaaggatggaaaggggatgagagataaaagactacacattgggtacagtgtacactgcttgggtgacaggtgcaccaaaatctcagaaatcaccactaaagtacttatccatgcaaccaaacaccagccgttccccaaaagcttattgaaatacaaaaaaaatgtcagctatatcactggtgaatgtggctgggagatatgacttaagttctgaagtcacaagagcctgctgggttagactcacccacctggtcacctgaatggctgggtgactgcaggcattccccaaagagccttctgtctgca

SEQ ID NO: 391977 - DNA, 849 bp, Homo sapiens
gcagattaaaccagctgtcaagccagggtgaaggatccgtggccaggcagaggtctgtggagtggagaggcgaggcctcacggtggaactctcagatgtaagtaatttctgtgttcttcttttttaaaaagcatgtctagtctgacagtttttcagagcttcagaatttctgctgcatggcaggaactgtgacggttggaagaaccattgtcagggtcaccttcttgttgcatttgcatttcctgaacataatgtacatgtatgagtggctttcactatgaaacacttttttaggcttccaggcatatgaattcctctttactgagattctgcctttaaaatgaaagattttcagtgcattaagcaaagaatgacatggtcttctcatttaaaccctaaaaagataaactcacttaaagctaatataacagatagctccttgaaatcttgtctctattttaaaacatctggctagacttttccattagtcttcaatgctaaataacaattaaggaaaagagatatgatatctcttttccttattgtgatcacaaacaaagaaaagtgagaactcccaaaacaccggctgatactgtttctttgctctgttttatcttttaataatattatatttactgcctatttacacaccaggctttatagagtttgctgattagaaaacaaagaaaagaaagtaagctaagatgagcattaacatttggattggatagttcgtgtttttaaaaaattggtcttttattcaaaagtgaaaaagcatgataaataatgtagcaaaaggcaagatgaagaggggaatgttttaattcaaaatgagtagaacatatacag

SEQ ID NO: 391978 - DNA, 1098 bp, Homo sapiens
tggccaggcagaggtctgtggagtggagaggcgaggcctcacggtggaactctcagatgacagcatgcaggcaccaagagagtggacgcacatacagaagacagccatgcactgagctggggacatgcaacaataacaggtgagttccaacaaattggttcaaaaagaggggggataaacacgctggcccatgctgggcaagcatggcaccaccttccaggcactgtcttcttctgatcagcactctgggtgtctttgcacttaactgcttcaccaaaggtcagaagaacagcacgctcatcttcacaagggaaaacaccattcggaactgcagctgttctgcggacatccgggattgtgactacagtttggccaacctgatgtgcaactgtaaaaccgtcctgccccttgcagtagagcgaaccagctacaatggccatctgaccatctggttcacggacacatctgcgctgggccacctgctgaacttcacgctggtccaagacctgaagctttccctgtgcagcaccaacactctccccactgaatacctggctatttgtggtctgaagaggctgcgcatcaacatggaggccaagcatcccttcccagagcagagcttactcatccatagcggtggggacagtgactccagagagaagcccatgtggttacacaaaggctggcagccatgtatgtatatctcattcttagatatggctcttttcaacagggactcagccttaaatcatatagtattgaaaacgttaccagcattgccaacaactttcctgacttttcttactttagaaccttcccaatgccaagcaacaaaagctatgttgtcacatttatttactagcataataactgtgtccagctgcctggaactttggcaaatgatgaataatttgcagaaggaatctggaaataaggccgtgagataggtatccctacccacaactgtgcctctctccgcaggctccatttgcaacacagccacacataccaataaccagctctctgttctgctctgtgcccaactgcgagaacacttttgaaaaacaaaagaaaaagaaaccaaaaaaccaacttgat

SEQ ID NO: 391979 - DNA, 388 bp, Homo sapiens
tgagatggagtctcctctgtcacccaggttggagtgctgtggcgtaatctcggctcactgcaacctctgcttcccaggttcaagcgtttctcccacctcagcctcctgagtgtgtgagactacaggcacataccaccacgcctgctaatttttgtatttttagtagagacggggtgtcactgtgttggtcaggctggtcttgaactcctgacctgaagtgatccacctgccttggcctcccaaaatgctgggattacaggcgtgagccactgcacccgatgagccatggttttcaactaggactgctatacgttagaattacttgaaaaattatagagataattcaagaccctgcctgttggcttcatttgaggatttggcaggcagt

SEQ ID NO: 391980 - DNA, 211 bp, Homo sapiens
gtgccctgctgcttgcaaatgtcctgagtgaccagtctgggctccctgtccagtgcaccccgacatgttccctgggatgaattcccagcgtctccctctgctcctgtcacatgctgttttgaggaaccatccctggctccctgttgatgattcctgatgtacgggctgcccaagcacaaccccttcaggcgtgggaagccgacttccttcc

SEQ ID NO: 391981 - DNA, 393 bp, Homo sapiens
cagataaaaacaagaataaaaataaattagctaggcatggtgttgcttgcctcaggaggctgaggtgggagaactacttgagcctaggagttcgaggctgcagttagccacgactgtgccactgcactccagcctaggtgacagagtgagaccctgtctcaaaaaaaaaaataaataaataaaatcacctttataatttacagaactttacaataaattttgaaaaatcaaatgcataaagtaatttataatgtaatatctacacaattaaggtacagaacattttcatgcctccaaagggttccttcatgctttttcataataaaatttcttccatttaaacctggtaaccactgatctgatttgtcattagttttgtcgtttatagaatag

SEQ ID NO: 391982 - DNA, 399 bp, Homo sapiens
acagaatttgtttctttcagtatagtgaaatcatgaattcaggtagtaggctagaattcttgtttgagtaatctcaaaatatctttattcctttttttctccctaattggtggaagtggtaacaagtttctcttcagcacccctgacttagtaccctcatgattgcaggcttagtctaacagcagtgagttgacaaagttcaggaaaaaaaatttaagtagaatgcagactttttcgtctgcccattgttaaaaaaaaagtcagaggtttcttttatgaatgctaattcttgaggcattattgactgatattgaaacttaaaaacacatcagccaataatgaaatggtactgcttttactttcactttccttccaggtgagttgtaccttgcttcacag

SEQ ID NO: 391983 - DNA, 118 bp, Homo sapiens
caaaccctttcctgaaaaattcaaagcatttttaccaaaattttctaaatttatattgccaatattttggtacttggaatttagcaaaagttttcccacattctaaactttagagaat

SEQ ID NO: 391984 - DNA, 717 bp, Homo sapiens
aaataagtaaaaaataaaagattcagactcggaaaaccaggcttctgagcaaggagtccagcgcggggcacagaccaggaaacatgggagaagaggtctcaagtgatgcagaggagggagcgataaactttgccaggcaatcaggacagggatgtgctagcaaggttttgaaggatgagtaggagtttgccaggggaggaaagtgagctgatttgtttaggttcctctgtaaagtggggaccttgctggatggctttttgtaaagtactgagaacagggcctggcacatggtgccatttaagatgatgatagcagtaataacacactatctaagcccacagcctctctgcctcctatgggcagcaccttgaaggtgcctgaaacccagaacttcagatctccagggtcatttattctgtttaagttcagaggttcttctgcctccaggcagctcctggtctgggccctgactctgaattcccactgggtgctccagttgtgaaacccactagcagtctatatcccaagtgttttccctggagaggccagccccagctgctcacaggaagaacctgagttgggcgtggtggctcacgcctgtaatcccagcactttgggaggccgaggcatgcgaatctcttgagctcaggagttggaggtcagcctgagcaccatggcgaaaccctgtctctaccaaaaaacaaaaacttttccggg

SEQ ID NO: 391985 - DNA, 620 bp, Homo sapiens
gtttttaaaaccagttttagtttcacagcaaaattgagcagaaagtacagagagttcccaaatacaccctgtcttggtacatgcacagcctctctcatgatcaaaatccaaaacacattggtacatttgttgcagttgatgcacctatacatcatttgacaatgtgtcaatgatgtgtcactcaaagtctatagtttacattagggttcacttttggtgttgtacattctatgggtttggataaatgaatagcatgtatctgccattatagtatcatacagaacagtttcactgccctaaaagtcctctgtcctctgctatttatcccgccctccccattaaccactgatctttttactgattcttttactgtatcaataattttgccttttctagaatgtcatatatttgaaatcaaatagtatgtagctttttaagattagcttctttcacttagtaatatacctttatgtttctttcacgccttttttgtgggttgatagctcatttctttctattgccaaataatattctattataaggatgaatcataatttgtttatccatatgtctattaaaggaaatcttggctgattccaattttgggcaattatgaataa

SEQ ID NO: 391986 - DNA, 216 bp, Homo sapiens
ccagtgggaggtgatgctccagctgcatgtacaggagacatgagaagtaagccaaggggacagcagggcaaaggcatgaaggccagggaagtgtatggtatatggcacctcagtgtttcaggagcatagagcggaaccctgggatcaacaggtggtaagaccacagcaggtggggccaagtcccagcaacctcatttgacataggagcttgggcct

SEQ ID NO: 391987 - DNA, 177 bp, Homo sapiens
gccactgcactccagcctgggtgacagagcgagacttcatctcaaaaaataaaaaataaaaaggtatgtgtagtaggcattgctttttctctttgtagataatactcaggaggactgcctcttgaacaaggctaacctgctgagcctttgaagcaaggaactggagatggtcctttt

SEQ ID NO: 391988 - DNA, 335 bp, Homo sapiens
gtgagccactgtgtccagcagaaaatgtactttctagaaagaaaataattggtacttcactactttcccagggaattccttcaggtgaatgtccacccttttgatctagaagcagactcacaattttgtttgtttggcaaatcagcctctgagctcaacttccttgtctgtaaaatggggctaaggaaatgtgggttgctttttcaaaggttactgttaggatggaatgagatcatgtgtgtaacaaaggctttggaaactttctggaatttgaaggctatataaataaaagatggaccactctttccttaaatttggcacctttcctgttcttt

SEQ ID NO: 391989 - DNA, 158 bp, Homo sapiens
attctctcaaagggcagtctcttggtcccacattggattgaagccaaatatgtctccttatgatttgtagtcactggtccctgttctgcagggacctaatatcctccatggtaggccctaggatatttaagtaaagtgcttaagtgtgtcttgaggct

SEQ ID NO: 391990 - DNA, 278 bp, Homo sapiens
cccgtgagcctgggtcatttgcttcaatcagccaacatttatgaagcgtctgctggtgccaggcctgttctaggcgccggggacaggccttgccggaacctgaaggaggggaggagcagctgtgggaaagggcgttccaggcagagggaacagccagtgcagaggccctgaggccagctcagcttgagagatcactgtgcccccctgggagccacaggacttggtccctaaacagcaggagttcaaggccaggcccgggcagtttgcaattcggtctc

SEQ ID NO: 391991 - DNA, 236 bp, Homo sapiens
tctctgtgccccaactactaagcaggatttataccaggctagggaagctctgtccataagggctacctaaggggcgttaagtgtactctgtttcaggaagacctctgtgaataactgcatagaacattagaaatcatatacaggtccttagtacttacacgtacctgcttagaaaggtttcttttcccccttagagatagggtcttactatgttgcctaagctagtctgaaactac

SEQ ID NO: 391992 - DNA, 435 bp, Homo sapiens
gaagcctcagtagccgatgcgatcaactggaagaaagggtatcagtgatggaagatgaaatgaatgaaatgaagcaagaagagaagtttagagaaaaaagagtaaaaagaaatgaacaaagcctccaagaaatatgggactatgtgaaaagaccaaatctacgtctgattggtgtacctgaaagtgacggggagaatggaaccaagttggaaaacactctgcaggatttataccaggctagggaagctctgtccataagggctacctaaggggcgttaagtgtactctgtttcaggaagacctctgtgaataactgcatagaacattagaaatcatatacaggtccttagtacttacacgtacctgcttagaaaggtttcttttcccccttagagatagggtcttactatgttgcctaagctagtctgaaactac

SEQ ID NO: 391993 - DNA, 380 bp, Homo sapiens
acagagaccaagattaaaaccactgggttatatgaaggaaatacactaaactcaaaacaagtattctatgcatacaattaaaattaaagatatgaatttgtaactacgaaaaaaaaaaaacccaaccatcgcagaatatataaagtaggaacaaggacttttaaaatgaaatgattttagcatgttgcctcccacagagttttctctaactatgggatgtagatttaaaccacaccagagaaaatagaatcaagataggaattctcacccattccaacttaagtctcagatgacgattatgttaggaggtccacatatgggaataaagaacttttggggctctaagcacactgactctaaatgaagcttgtggtatccca

SEQ ID NO: 391994 - DNA, 510 bp, Homo sapiens
ttctttctttctttctctttctttcttttcttttctttctttctttctctttctttcttctttccctctttctctccttccttccgtctttccttcttttcttttcttttctttctctctttctttcctttctttctttttctttctttccctctttcttttctttcctttctctctctctctcttttctttctttcttttgacagtgtctaacgctgtcaccctagctggagtgcatggtgttcatagttcactgtagctttgaattcctgggctccagcaatcttactgcctcagcctccaaagtagctgggagtacaggcatacgctaccacacccgactaatttgaaaaaatttttttgtagagaagtagtctcttttttttcttttttgtagagatggggtcttttttttttcttttcttttctttatttttttgagacggagtgtcgctctgtcacccaggctggagtgcagtggtgcaatctcggctcactgcaagctctgcc

SEQ ID NO: 391995 - DNA, 339 bp, Homo sapiens
cccacctcctaagtctatcacattgggaattagatttcaacataggaattggggtgggggaggcacattcagaccatagcattctgccccagactctccccagttcattttcttgtcatatgcaaaatatattcattccatcccaataggctcccaaatcttaacttgttccagcatcagttcaaaagtttcaagtccagagcctcatctaatctcacctaggccaggcacagtggtcatgtctgtgatcccagcactttgggaggctaaggcaggaggattgcttgaggccaggagttcaagaccagcctgggcaacaaagtgagaccctgtctctac

SEQ ID NO: 391996 - DNA, 186 bp, Homo sapiens
tgatgtgtcatgcatattgatttgtgcatgttgaaccatccttgcatccctgggatgaatcccatctgatcatggtgaaagatctatactcacaatattgtacaaccatcaccactatctatttccaaaactttttcatcacaccaaacagaaactctgtacctaccaagcaataactcctcatac

SEQ ID NO: 391997 - DNA, 550 bp, Homo sapiens
gctgcctccaagctttcctgactgcagccttttctccagtcacttttgatagaggagttaagaagaaattacttaggcagatagtgagggtatggaagtcctcggtaaggttttccttttaatgaaaagcagccccaaatcattttcctttctaacaaacagcagcctgtaaaatcaagctgcagacatagatgccggcagttgtgccaatcatgttcagaatggtggctcccttctcccttctctgccagccatatgtacagtaaggagcagacaacatggctcgggccaagggtaaagttgatttgcataataagattagggtggggcccaccagccttcccctgcactatgtaaacatcacgcctgactgaaccaatctgtgagccctatgtaaatcagacaatgccttctcaagcctgactataaaatcctgtgagtccactgccagccagtctttcctctgggaagcccctctctctccctagagagagctggtttcctttctcctttctttttcttttgcatattaaacttccactcctaaact

SEQ ID NO: 391998 - DNA, 263 bp, Homo sapiens
tgtaggaaaaaatgtccttgttcttaggaaacacatgctgaaatatttaggggtaaagtgtcatgatgtcttcagctaactctcaaacagttcagagaatacacacgagaaagacatacagagacaccaaataaggaaatctgttcacaggccatggatgcccgggtagttaatgacatggctactggaacatccaaaggctatggttttgtatctatttataagcacactggatgcagaatatgcgattgtgcatattggcg

SEQ ID NO: 391999 - DNA, 310 bp, Homo sapiens
cagagtccactgaaatctcatcacactggaggacctatccaaaaacactcaaataaggccaggggcagtcactcacacctgtaatcccagcactttggaggctgaggcaggtggatcacctcaggtcaggagttcaagaccagcctgaccaatatggtgaaaccccatctccactaaaaatacaaaaattagctgggcatggcggcatgcacctgtaatcccagctactccagaggctgagacaggagaattgcttgaatccgggaggcagaggttgcagtgagctgagatcgcgcaaccacactccagt

SEQ ID NO: 392000 - DNA, 396 bp, Homo sapiens
cctagcacagtgcctggcatttgtagtacctaaaattgtgtgtgtgatggatgaatggtctcaaaacgtcccatctagttaaggtcttatgactgacacacatgaaacaattaaggcagtgccaggtttgtgccattcacagtgactctggtgtgtggccattcaacatcgcaggagtttagagaagacttcatagaaggtgagttaggggctgagccatcacgattgggtaggttgggattaacagaggaaaccagtactaatgagtagaggtggggtgaagagactctaatggagaaggatatatacatgggcaaataacagaaaatcaagtgtgatgggaggtatgggcctctctatacgtcattgaaagcctggaatgggtggggtgggtga

SEQ ID NO: 392001 - DNA, 443 bp, Homo sapiens
tccatgacagggaaagaatcaatgaggaggcaacttcaacccagcagaaaggtgctcagacacggagccctcaggaagaagcaacagagcagtgcttgggcttcagtgctagccagtgttggcaggggaggaggttcccgaggtgcccaaataaccaggttcaaggcaatgtaagaaaggagctaggagaggaaacataagtgaccgaaaagaaaccaaaatgctgcctgtgattgtattacagctggaagattatggcatgatttctttttcgtctgttctcccagtttttgatatgaggtcgttttgtatatacctttaaaaggagcaaatgtaatatactttatggaacactttcaataatgcaaaatatctagaaggaatcaggaacttgtcacaaaaccagtgctggctgggtgcagttggagagaattagagcctgg

SEQ ID NO: 392002 - DNA, 517 bp, Homo sapiens
gttataatgaagaatgatttttttaagggcatatgggcagtctcatacaatgtaagctattaactacctcctttatgaaaagaagccagcctttgccctgaagtccatccatttaaaactgttggaaatctttcatttcctatcaaaccacatgtacctgttcccatgtctgttcacctttgaggaagcaaagaaagtattataaatgagccacaaatggacagtgcaaacagtccctgttcttcttgctgagtgttggttcacttctttatttcgagggccgtggcccagctgcctgaagtcctgctcagcaccagcctagaagaacttggaagtaaacttcatggtcaggcaagattgttaaaaactctgatgaatacacttggtagcagcatttaatctgcgaacaggcaacattactcatgaatttaacagagatgtgttgagcacatgctatgtgcctggctctgttctaggctctgaggagtcctcaataaacaatgaccctgtttcaatt

SEQ ID NO: 392003 - DNA, 905 bp, Homo sapiens
gcttagagcagtggggtctagaaatgggattctggggtcatttggccattccatgaccttgtgcaacagatgcctctctctgggaagtaatttcccctttgatgagttgctacattaagagtttcgggctgttaagaggaatccataacctaatggtaagcacaggcctgagtcagagtaaatatctcttgaatgttaggccattcgcatttattgttgtaataatgattatgttgaatgctaaaaaaaaaaaaaaaaaaaaaaaaaaaaaaaaaaaaaaaaaaaaaaaaaaaaaaaaagggaggaaaataaatcgaggggggggacaaaaagagaaacaaaaaaaggggcaaagagagcgacaagagcggtgaccacaaaacagcatttatgtggaaacacaaaggggcgaacacacggggggaaccccctacatagggcacaccacatataaaagatccgacagcaaaagccagggagaaacacgcgcgcataaaacaacacggcaaaaaagaagcaaaaaaaaaaacaaacaaaaacagaaacaaacagcagaagagaaaaaacgagagcacagacaacaacacgacgagacgggcacaaaaaaacgagacgacaaaaaaaccgacgcgagaacaaaagacaaacacaaagcaaaaaacgcacaccacaaacaaacacacacacaccaaaaactgaaacaacatacaaataaaataaagaaacaagagaaagagacagaacagcaaaaaaacgaggagaaagagaggaaaagagggagggagagaggaaggagagggagaacaggagagggacgagagggcaggcgcggacgaggggagggaagaggaggacgggcgaggaggggagggagaaggagagcggggagggagggaggaggggag

SEQ ID NO: 392004 - DNA, 871 bp, Homo sapiens
cgatcgaggcgtgtacccgccgggttacgctccacctcaagttatgacaaaatctacaacttctttcccctttctggccatggagaacaagtccgctctcctccaaggctccttctggtaggtgagccctatctcctgtctccttcagtccctcccatatggccccagtcccttcgtgattctggctctcccaactacttttcccataggaagctcggatcaatcagtgtccaggtccacctaatgtaaacctcaaactatactgaacctggacttttaattttgtttcccagagtgcaaacatccaaagcaaaaaaggtcacatctcagaatttaactttcagcaaacagaactagaactaaaggaaggagggcaggaaccaagacccctttccgccctaatacgtgtagagcaaaacgtggagtcctgacagagctgtgtgttgcgtgggaaacctggtgcttacaagtttagcacaagtctaacaggtttctgacagcaacaaaaaaggcttcacatgaggggttctacttttttgcttttaaacgaggaagtaattaagttgattcccttgtgataagttttgccaactacatattcaaggggcaacagtcttcgaagagaattatcagtaatactccaggaagaatttcatttcagcctcagttaatgagacccgcaagtgctttaaagcaccagacaggaccgggtatggagggcaccaaaaaagcctccggctgaaacccagacttctcctcttccaaaactaaaattactcaagaccacaaaccaaagttcagaatgggaaaataaaatcctgatccactcagagatcacaagatcgaaatctaggagagaccacaggcgact

SEQ ID NO: 392005 - DNA, 550 bp, Homo sapiens
atattgacaatttggccagttcctagaaatatatcaaaagtgacacaaaaataagtagataactctagtagtcctagaaacttaaaaaaatggaaccatgaaaaccatctgctcatagcaaaagatgtaagcctggtggctctaattgctaaattatactaaatatttaggaaagaaattattctatgttcatacagattcttctactagggaacagaaaagcagatatactccccagatagtcttgtagaaacatgatatagcctagggcagtggctcatgcctgtaatcccaacactttgggaggccaaggtagaaggatcacttgagctcaggagttcgagatcatcctgggcaacatagcaaaaccctgtctctaaaaaacaattaaaaaattagctgggtgttgtagtgggtgcctgtaagtcctagctacttgggaggctgaggtgggaggactgcttgagcccaggaggttgaggttatagtgaactatgatggcaccactgcactccagctaggtcaacagattgagactcttgtctcaaaa

SEQ ID NO: 392006 - DNA, 465 bp, Homo sapiens
taaaaatgaagtgtgcaaaatgccagatgctacaaacgcaattagatacttaaaaatagcttccttggtggcactgcttgaactctgaactgggccttgtttttacaaacagggtggcgcttttctgctatgctcctgattgtgtgctccgataggaggcacggctctgcttctaaggccatcaggcaaaccatcagattgttctagaatcagactaggtgctgatgttttacgacatcattgcagttgcaggcatgaggtttttctctccaggtgcactgtgtaccctcctgcttcttgacctctgatggtttgcagtcaagctgtgtcggcaaaagccctcaaccgactgagtctgacctgcataaagaagatgaagtgcccacacccctcacccctcactttttaagttctaaatgtattccacataaacttttatttcaccagaactcaaacaaccacaaa

SEQ ID NO: 392007 - DNA, 276 bp, Homo sapiens
gtgaacttagtaaactcacttataagtttggagagtttttctgtagtttggggttttctatgttgaccattatgtcatctgtaaatagtaacagtgttctcactttttgatctgatgtcttttatttcccttctttgcattatgtcaccagcttggattttcattactatgttgaataagaattatgagaatgggcattcttgcctttttcctaatctaaggggaaaaagcattcagtctttcacctttgggtagatgttagctatcgatatttgg

SEQ ID NO: 392008 - DNA, 397 bp, Homo sapiens
caaggaaatgtcaggagttctcctaggaacaagggaaacttcagtgagcaaaacacacacacaaaaaaatccttttgcccagacagagctcactgtgtcttcccaactacaaagtggctccaagacatgggatagagtctccctgtgaccaggcagatagaaaggggtgatagaaaagcaacccttgtgatagaaaggggtcctggcagaggtttttcaataagtatcagttggataaagaaatagcacggagcagccaggcacggtggctcatgactgtaatcccagcactttgtgaggccaaggtgggcggatcgattgagccctggagttcgaggctgtagtgagctatgatctcgccactgcactccaccctggatgacgatacaagattctg

SEQ ID NO: 392009 - DNA, 248 bp, Homo sapiens
taattttttgtatttttagtagagacggggtttcaccatgttaggtggtctcgatttcctgacctcgtgatctgcctgcctcagcctcccaaagtgctgggattacaggcgtgagccaccgcgccctgctgataagtatttttttaaaagccctgagaaatgacaatgtaggatttaaaaaatgacttgtattaacagtatgagagtaatatgtgttcaaggtaaaaaaaaaataaataaataaaaat

SEQ ID NO: 392010 - DNA, 285 bp, Homo sapiens
ttatatattatggagtgactactgattatgtcaatagggggattctttgggcttaaggaaagatgttgtcagtgtgttcgtactggatgttcatgtgtatggagtgggtgagctacacaggaagaatcagagtgagagggagcacagaaatgttttctccttaatgtttttagtatctctattctgaatttttaaaaaaccagagctacataattttgataggctagatctgctacagaagtatacacaccatttcacaatgttaacatttagaagttagctttc

SEQ ID NO: 392011 - DNA, 756 bp, Homo sapiens
cccattaaatgaaactgaaggctcttgagaattgaggcagcattaggaactggctactctctccattttctctacttggcctttgtctctctcacagtgactttgcatccctctgcacatcttttgactattctaatccataacttcttctcttcctgaagaattggtgttgactttctcaagaattcccttcatgttcttgccagccacctagcctttctctacagtaggagacagcctcttttcatcccttgccccagccccagctaattagcttaagttgttcagttttgttttgttttccatttaattattgagagaggaaatctgattggcaaacctcatctttgtgcgccaggccatacatatggcagccttgagtcatggcgccacccagatattaatgactttgcttaacatttccatttgtttcaactacctgtaagtgtcttcaaacctttcttgtactgttttgtttttagctctgaattctgtaagtttgccctgaatagtattgtgtatactttggtcataaaatatactcaaagtcaccattccttatgattgaacttgaaatcccttaagatttcatactcactcatatcaaaccaggaagaaaatttcctcatataatgaatacatatactctgacaatcagagctgatgagacagattgcctgaagtggatttaagtcttacttcgcgatctttttcttcccaggatttcctgtggatacgtagcctcatagtgtggtt

SEQ ID NO: 392012 - DNA, 427 bp, Homo sapiens
agaggacgtaaatttcaccttgaatgtattaaggagacaatttgatcttgctccacaaaatgctggtagtgcataggagttgactgagagagcattttgaggtgggatgaggaaggaaagctttatgcaggagatgagtcttgaagagcaagtagatgttaggagctagagaatttgtaaaggggcattctggtctggggggggcaacatgagcaaagttgggcctagggtgagtctggcatgctggggagaaggcacacaccctcctccttgggctttctctctatgatggctgtagcagttgagtcagggtcccatggggccagttgtctccattcagttgactctgcataagcatctttgttgggaccatcccagccatctcatcagactactttgcagcagtggaggatagcacgtgataatt

SEQ ID NO: 392013 - DNA, 196 bp, Homo sapiens
ctagatcacgagttcctggactctggggacactgccctccatatttactcccttggtgcttagcatagggcttggcacagagcaggtgctcagggaaatcctgctgaacgaacaggcatggcgggcagcactttgggtgactggaatatggtataagaccttctgacaaggcctcccaaatgccaaccttgaaaac

SEQ ID NO: 392014 - DNA, 588 bp, Homo sapiens
tgtgggaggaggatgaggatcaaaactacctattgggtactatgctcattacatgggtgacaaaataatctgtacaccaaacccccatgacacacagttgtccgcggaacaaacctgtgcatgtatcccctgaacctaaaataaaagtcggacaggaaaaaataaaaagcagataccctctggaggtatggtttaaatgttgcagccattgtttactttctagcaaataggtttatcagatcttgtcttgaaataagcttccctggaggagaaaggagtttagaagtacaaggagagcctgaggggaagagtagaatttctgtgagaagataaaaggcatgataagtgtatactgaggccagtgagtaataccctcacttgtctcttggatttctccaatagtggatcctgactattcttacaagttcccctatagagtaattgacagtgagatcatcccaggcctggtttgaagcccatctttgtgactcagtaaatacattggttgtcctagtgtgtctggcatttcttgcagccctctgcatggaacttggcgtggccatttgcaaggttgctcctgtgcagtca

SEQ ID NO: 392015 - DNA, 336 bp, Homo sapiens
atatcagggaaggaaaagtagctcaaagcggctggactgtggagagcctaggaaatggggcagggctaagagtaaagccaaaaattaagacacagaagactgagcttgttctccttgttggttttgggggtcccagggaacctctaaagcaagcttgtccaacctgcgccccaggacagctttgaatgcggcccaacacagatttgtaaactttcttaaaacattataagatttttttgcaattattttatttttcttttttagctaatcagctatcgttagtgttagtgtgttttaagtgtggcccaagacaattcttccagtgtggcccaggga

SEQ ID NO: 392016 - DNA, 667 bp, Homo sapiens
atcactcaagtgatctggaatctaattctcacccagaactttaattgcatgaaaaactaagatatatagttgttagctttccagcatttgcatcttgcaagaaatgtcagaaatatattggagtggccagccgacattacgattgtgaaatcaatgaagaatcctccatctggtgttaaactagttatggctgctgtttgtgtcatgaaagatataaaaccagaaaaaatttcagatccttcagggactggaggcaagatattagattactggggacctagcaaaaaacttctgggagatatgaatttcttaagagatttgaaagaatatgacaaggacaacattccagtgactgttatgcagaagattcgtagtgaatacttaatgaaccctgaatttgatccccctaaggttgctaaagcttcttctgcagctgagggtctgtgtaagtggatcatggccatggaagtgtacgacagagttgcaaaggtagtggctcctaagaaagctcgcttatcagaagctcagaagtctttagctgagacaatggagcttttgaatcagaagagagcagaactggcagaagtagaacatcatctggaaaatttacaaatgacatttcttgagaaaacagaggaaaaggctgctttagaagaccaggtggaac

SEQ ID NO: 392017 - DNA, 555 bp, Homo sapiens
  misc_feature (16)..(16): n is a, c, g, or t
catctagacgatcccnttagacggtaccaacaccttcagcttggcattcaaggacctgtatcatgttagctgcattctcagctcccatgtcctgctgacagcatagcaagctgaacttctagctgctccctctgcaagccctactttctccaccttttggcctttaagcaatgggtttttcttctgcctagaattctcttctctctgtattcattcacaaaatcctgccagctaggctccagctagaacggcacctctctcataaggcctccctggtgcctctaattccatagatctcaacactgcctgtacctcagtgtcacctggggaacattttttaaaatgccaaggtccagacccaattcactctgaatctcagggatgagacccaggcagtggcaccttttaaaagtggtgattccactgcatggccagatttgaggaccaccagggctgggtggctccctcccacctcgtcatgtcatagcatgttgtattccctctgtgtcactcagccttgggttctaggagtatgtctcatgggccctgacagat

SEQ ID NO: 392018 - DNA, 243 bp, Homo sapiens
gttctgtacttttggaaaaatggggtcaaatctgatatgtgttcgtccgttcaccttttttctttacatgtttggttaatcacaatcagaaggtgaaaatgagaggttatttatagaactgaaccagtggtcccagctctttacagaagacacttggcatgttgcctgtcacttctcaggggtggccatggctgcttgagagtgagctccccaacacgtcatcacacacctacacctgtgcca

SEQ ID NO: 392019 - DNA, 459 bp, Homo sapiens
agactccttgctgcctcattctacatccttgacctactacttgctgtctagttttctcaatactggattgctcctactaattgcacttggatttttcacgtgaacccctaattcatctgtttcaactcaactatgaaactgctagaagaggttggtggacattccacatgaaaagatataaaattattaccttggagaatgcaaaataaacttattagagcactctcctccacacattgttcaagagctttggtgtatttctcaattcatagatcggttctgcttccaaaatccaggagaatgagaactggagaagtttttagtagatttttttttttttttttttttttaccagatcccactggtgctcaaggtagtcataaaagttacccctttatttcttagttcacaattcattcatttgggttttttgagacagcatctcactctgtcacctag

SEQ ID NO: 392020 - DNA, 760 bp, Homo sapiens
agcagggctggggaagaaatggcaaactagggatcttacctgggccttcccagttgagactacgtcaaaatgggctcccatgagactgcctggctcatgcagatggaaggctaacatctttttagaaacaactcgtgctaccctctcctgttccaaaagcctgtctggtcagaatggtggtaagtcactttaggaagggagagacgtcgtcctgtttttcaggtagagttagcaaaggttcaatttaaaagaaaaattatctaagaagttaaaaatgaaagtgtgggggagattcccatgacatccatttttatctatttttccctttctcttacatttcccatgaggcaaactttctaaaacagtcttagtcttttcaagtttacaaaaggcagcgcccagactatctgaataaaatgacgggatgcccaggagaagagtgaacctctcccacgtgctccctgcctgggctccatgctgtcgcggggtctcggctactcactcagcgggcatttctggagttccaggaacacaaaccccaacaagatccaatcgacgccttcccggagtgcacagtccaggacgtaacccggagaacaagcggcaattaccccctgaggacatggcttcatctgtgcgacagacaccaagcgccttccccacgcccctgaccataaggccggcccttctgaagcgtggagccggcttggaacagagccaagacacacggacgcgatgcacacaggcgtcctgaccgagg

SEQ ID NO: 392021 - DNA, 540 bp, Homo sapiens
agaaaaagtataaagatgaaaaaaattatctgtataattttaccatctagaaataattactattaatttattgtatatacatctaggtatttttgtatgcataaaaacacagttttaaaatgtaaaaatggaatcctactatacataccatttaatagtgtcatttttttcttctttacaatgaatcatggatatttttgaatgctcacaggtatagattacattattattttgaatagctgcataaattccattatggctgtttcatatttttttaaacaattctcgtattgatgtgatcatttaagtttctaatttttcactcttagaaatgagactttatgaacatgtttgcatatatatctttgaatacctgtccagttatttcctagaataaattcctaggagtagaaatgctggagcagccgggcgcggtggctcacgcctgtaatcccagcactttgggaggctgaggcaggcggatcacgaggtcaggagatcgagaccatcctggctaacatggcgaaaccccgtctctac

SEQ ID NO: 392022 - DNA, 561 bp, Homo sapiens
attgaccagtcactgagtgccagatgcccctgagccagggacatgaccatgggcaagacggctttcttcagtagagtacaatcactaggaggaagtcctcagccacaagctgtcatctgtcaactttgccagcagctgggggtatcagtatatcagtccggaaggaggggaatctgggtgatatattacagcatccactatacctgagctgagagccatcacattctggtcttctcgacttatctcttaatacttcctttcttgctgtctgggctctagccacactgctttaaatttctttatgttctcaagtttcttccaaccttaggatctttgcacatactattcctattggtttatggccataccaatttaaacacctccaatcttatctagaaagtgagagcattttaaaaatcagtgtttaaatcgtatttgtaaagttgcttgaaaaaggactaggctattaggctagtgttaaagctgtcatttggagggcctttttagctttattataaattccaatattgggaattgctcatttgacatgatgtataggag

SEQ ID NO: 392023 - DNA, 673 bp, Homo sapiens
ggacgcgtgggctcagactgctgtgctagcaatcagcgagactccgtgggcgtaggaccctccgagccagagatgggatcttactacattgcccaggctgaagtgcagtggctattaacagctgtaatcataatgcattgcagctttgaattcctgggcttgagcgacctccccaccttagcctcctgagtagctgagactacaggaaataaacttaaggagaaagaagaaacaaagatggggcggaaatgtaagagaggcattctaatatatgcattcttcataacaactgtgtgaaacatattaatatcctcatgttaacgatgaagaaactaaatctcaggaagaaaaactaagtgaagacaaaagaaggatttgaactgaggttgtcagactctcgggaccatgctgttgaaaccactaaaccacgctgcctctgggtcacttgattattctgggagattctgggagtcttttctccaacactccagtggcatctgactatgtgagctgataagatctatagatctccccagcagttgttgaaaagcaagagcaggaaccgagagaaagccccttcttttagtcgaaaactcttactctgcttaggaaaaccatgaacccaaacagtgtgggtcagcctttcaatatgcaaaacggacgaaggtaccca

SEQ ID NO: 392024 - DNA, 431 bp, Homo sapiens
gaaggtggagagcaggagagcatggtgagagaggaagtcagggcagaggagtgaaaaggaagggtgatttcagaaccaccagggggcaagggctggagaggccaccagggcttctggatgggaacctggatgacagatgtacactatcagccccggtggtggagaacacaggagaaggaacaggagggcctgtcctcaatcccttgactctggtgggtcggccgggcccaacaggagtcctctagccgacattagcatcccagaagggctgccccagaccctacacccaaatctgtcatttggagcaagacatgagacatctttttgccttggccgggcatggtggctcacacctgtaatcccagcactttgggaggccgaggtgggaggatcatgaggtcaggagatccagatcatcctggctaacacgg

SEQ ID NO: 392025 - DNA, 444 bp, Homo sapiens
aatctaagagaatctaagtctgtggttcttcatgtccctagcctcaggaatctaattaaagctagagagcctacacctgctctgatcccccaacacacacaacacactgatgaacaaaatgttgcaaagagtattggggtttcattcacgcagtgaggcctgtgtatggattttaggataagaacccaggcttagggcattattactcctcaagcaatgttgcagagtattacacatagactatcctatatatttatgtttgttatatcaaagaaattatttcattattctaatactattttatcaattctttttcaaattttttattaaaaagttaataactctgtcaaaacaattatcagagttaaaatctcactgatttgaaactttagtatgttcttttttcctttttcttttgttatcatggagtaactagccaggtga

SEQ ID NO: 392026 - DNA, 228 bp, Homo sapiens
cgtctagaggatccctacgtctgaaagacatccttaaatgttgctccagcccatcgctttcccccatcaaaggacagaagcaggaggaaataaaaaaaaattaccaaaacccataaatatgacagaactcttatgaaaaggttacggtaattattcaccggggagggaaatgcttttcccattcattaatgcttcatttcttgtcttttctaatgagaagtaggtaga

SEQ ID NO: 392027 - DNA, 293 bp, Homo sapiens
ctaatcctttcttcacactgcccaccaaagtgacatttttgaaagtcagatgtaatcaagtaatgtttctgcttgaagctcgccaaagtttccccaatattcttggggtaaggtcaagttttcttaacaaaaccctttgtcctctattcccttctagctcctcttcccctattcaccatctcctctgcttcctgccccactctgagctccagccatgtggactctctgttctgttattctagtcctccaggctcctctcacctctggcttctgatcacatgcacacacgcccc

SEQ ID NO: 392028 - DNA, 787 bp, Homo sapiens
aagatggagaaggagagaagtggttgcaagagaatatttttaagtgttcttttttatcctgatgccacgttaatgtatgatgttagagttagttattcttagtagtctgttttcttttttgcactcaaaatgagaaagaggagataaggattgttatttctatattttagttagagaaactaaaacagtatacttaagtgacttgctcacttaagttacaagtaaatcttggactagaactaaagtctcacatcttgcccattgcctttttattattatcctgttgaacttgattactgggttggttttgagttaaatttgattacacttcccaaaaattgcatagcgttgtccatatcaccaaatatttattagatctgtgaatttacaaaagttcagaagcactctttttctctagaagcttatatttcagtaggaaaataagttgaccattgttagtaaacaaatagcattaagttgcatatgtagagatatgaaaagaatgaacaaatatcatttcagtgtatggggtctaaaaattaaagacatggttacagtaaaagcttcatcagagtcttttcaaaaacactgtaaaggcttggcagaggcattcaaaaggatggggagggttacataggtggagatgctcctgggctaggaagcagggtcagcaaagaatgaggcgaggcacagtggctcatgcctataatcccaacacctgggaggccaaggtggtcgggtcgcttgaggccaggagttctagaccagcctgggcaacacagtgata

SEQ ID NO: 392029 - DNA, 326 bp, Homo sapiens
ctcctgcctccctctccctgctgctcctcttcatgaagaaactactgggagagaagaagacaagctggaagaggccagggaaagggggttagtacaaagcacaatggggctgggctcatacagtggctcacacctgtaatcccagcactttgggagcccaaggccggtggatcacgagatcagcagatcgagaccatcctggctaacacggtgaaaccccgtctctactaaaaatacaaaaaagttagccaggcatggaggtgggcgcctgtagtcccagctactcgggaggctgaggaaggagaatggtgtgaacccgggaggca

SEQ ID NO: 392030 - DNA, 356 bp, Homo sapiens
cagtcggcacgaggttgatgagtaccatgctgggctggaccccatcctggctgccctggaagatagagacaggtcaccttgatccctgcctgtagcatttgggctggctgagatggtggaggtgtgaacagaatattccagtccagtgtcctctgtggtagggatggggatggacccgggagaggccctcctgttcctggcaggaggtgggactcagagttaaaagtgaggtcaaggcccagtgcgatggctcacacctgcagtcctagcacttcgcggagctgaggtggatcaccagaacccagtagttcaagaccagcctgggaaaaacatggtgagaccccacctctacaaaa

SEQ ID NO: 392031 - DNA, 399 bp, Homo sapiens
aggctccccgcagattctggcatttcctgcccctgggttctgaggcaggccctgtggtagactcaaaagagcacagggtttcagtcctgggcacaggcctggcccctgctggcttggccactactcagatttgcagcttggtaagttccttgacctgtgcacctcagtttccccccataccccttcctgttactgagatgattaaatgcctggttccttgcctggtgcaccctggaagctcaagtagatgtcgttctgtggcatctcttcttcctcctgccttgtgccctcatgttcatacatgcccctgccttgctgtctcctccctggtcggctgggttaggctctgacgcctgctctccctttcaccccagcaggagcatctctgaattcccttaa

SEQ ID NO: 392032 - DNA, 702 bp, Homo sapiens
tttggtgtggagaaataatatttgatcaaaacttaatagcatttaaaattgtctattggatctttattctaactagtgatatggatcacacaaaaggtgtttaggttctttcttccatggcatgagaatatttttaaaaatatatttggctactcaaaaagtacaatgatataaacagaatatggaaaatcaggagaaaaaacaggaattataattaatgacataacataaaccaaaaatgaagtgccaatctcaaatcattttttaaaatgtgtggtctgaaataatcaaaactgactctagaagaaatcattactaaaatatttgtcatacaaataattaatgagaaggttatcaaagaacttcatcaaagaattcctctaataaagtccctgggcccagaattcatagctcagaaaggaaaagaaagaatgcataatttccttaatgtataaatggattcaaaaccaaaacatgaaaaaactagaaattactcatacaaagctagcataaactaaaaaataagtgtacctgagtatgcttatgcacacgtatgagggcatatgtgtacgtgtgcacacctcacatgtgtatgcactacacacggggaatctatttacaaacataaatgcagtttatctagtaatatgaaaatgcagaaattaaatcaaccagtacttatctcagggatgtaggattttc

SEQ ID NO: 392033 - DNA, 461 bp, Homo sapiens
gcatgagccaacaggcccagccactgtgggcttttcataaatacactttgatatgctgagtttccttctattcctagttgagtgtttttatcatgaaagtatgctggatctatcaaatgctttttctgcatgaattgagatgatgatgcagtttttgtcccttattctgttaatgtggtattctctttactttgatgtgtttgaaattttccatgataaagtttgttttaagttacaacagtctgagaaacatagtcgggtgaagaaacagttaaccaaaccatatactgagcaaacttgcggccatttaaaataaaagtagatcagaagtaatttgttacattagagaattaaggggggaagtctacttatatttactaaacacatgatgtgcttgacactgtgctattccacttaaccactctgtgaggtaaatattgttattgctattttacaaacaa

SEQ ID NO: 392034 - DNA, 781 bp, Homo sapiens
tctcataatcccataacatgtgtgcagaattagaatctaataatctcatggaaaattgttagctgaaaaaaaatctaaagaaaaaatacactgtgattacaattgtgtaaagtacatacacacataagtacaggatacatggaaaaattattcttgtgttcaaatgacaagattatttctataacactgtctttactcttattttgccattcctgttaaaatgaattttaaatatgtcacaatttatgaagatgtaagtatgagcatatgaagcaaaactcgattgcagcctcaaggggctagtgactagccaggaacaaccttatcatttagctgcccacttgaccatctaaaagtatttcctgtgtgatttcctccaaagtccatatccggttatgctataattagaaaacccactgaaatttgaatgtgatttaaaatacttttttacaacactgcataggctactcttaaatcttcattgccattcccttattccttgttttttccccaatttcctatatttcttgttattctttcaagaaaaatttagaatccttactatgttcaaggcatgtcctacaatgatatataaagtattactgctgccatcatggaattaaaagaatttatagattgtgaaaccaaaggtacataggaactgtaagacaatttcaccctattggttcaaatcattttatgcatagtaagaaacaccaccatatttcaaagtaaagaaccgttcctataataaatgaattcagcaaattttcagaataca

SEQ ID NO: 392035 - DNA, 610 bp, Homo sapiens
cagggatggaattgatagaaaatactcagaaaggatgaactgaattttcttgtttaaaagcagttagaatttttttgaaagataagaaatagtgatatgggaactagatttcaaatgaataattagtattataaatggtaaaaaatttgatattagggaggctttccttaaaattggcattagtttttaaagcttgctttgttacaaatattattgtctttgttctctttcataatcagagcaaactaccttgtgagagaaatcctcggaaaagaaaataatgcaggttagagtgggttaagctagagtagggtaattttcatatatttctatattatagatttcactgtttttgtgttctcagttaagtaattttgggccagggatgtggacaaggaaatatatagatagaatacttgaataaactagggatgactgccatctatcatatatgtgactataaaattgttgtctttgaagcagtgtcaggaaagggaacatacacacccatatatatctgtggtgagctgtttagtggttaataaaaagactcctggaatttgtgattaggggctttctaatctatgagatactattagtgtgaagaagg

SEQ ID NO: 392036 - DNA, 701 bp, Homo sapiens
  misc_feature (485)..(485): n is a, c, g, or t
gcctagattgtcaccatcatttaaaaaaaaaatatatatatatgccctttactagtccttagtgcccagcaactatttcattagtaaatgccttatgtaagggatcagtactgctttcctttccccaccatctgttctgtatagccctccataatctggtgtctgtacatgtcacactatggaaactatgctcaggagagttatgaatgtctcctgatcaacaactgtattgtgttttgcagtttaaaggtacttcaaaagcttattgatgcttctgtttattttatcccatgcttattgtttttttctattgttaatagatgtttgtgaaaatagaaggagcactagttctagttcatgcttgcttttgcttttccatagcttctaaaactaacagtgaaaatgatatattgaaacagtaaattatagatctataccagatttgtaattgtgtatttcattgctatttgaagtataaagtaatnggttctgtatcatttattgggaaggttgaatttccatagcttcaaaatattcaaatttttttgcatggatttagctacgcttttcaaaatttccttttgatgaagtcattgactaaagcgtcattaaaacaaaacaaaaaaagaattccaaaaaccctccaaaattcctttttaaagataggaaggcatacctgctgtcattttataggtagaaca

SEQ ID NO: 392037 - DNA, 660 bp, Homo sapiens
catggtggctcacacctgtaatctcagccctttaagaagctgacgcaggaagatcactagaggccaggagttccagaccagcctgggcaacaaaagaagactcccaactctacaaaaaataaaaattaataatgtgattaaaagtaaaaataaaaagaggcagccatgaacaataaactatcagtgaataaagcaagagaggactgtctgcagaataaagagtgcaattgtaagataaaggaaaacgtgctgtttgagcagaagagaccaggagaaggtcagagtagctagatcatgcttgaggagaaaagatgggacttacaaagaatgtgttcagatgccatgtcctgtttaaaattaaattcccctgacaccacaacacctctctcctgtctggaaaagttaattaccttttttctaggctgtattttagatatgtttttgctaatgcagtcatcacactgcatggtaactatttgtttaaaagtctgatcctcagtaaactaagttcttacggctcaggggccatgtgttttggcagccctagtccataactcagcccaagaatgtgagataaatgaatgaataattttgttgcttactgcaaaaaggaaaaagacggttttgaagagtcagtgaaatatacatatgtatatgcaa

SEQ ID NO: 392038 - DNA, 363 bp, Homo sapiens
gaagaattgaagaacatatacttaagaaaaacagaggtgtacagtaaaggaattattgcaaaagggtgaagtagggtgtaagttaaatttcaggaagcttgagaaaagttgatgcactgttccagtggaacagaggcctcaatcttgcatcatcatgttttctaaatgttttaagggattgctctgtctttgggatgatgtgattatggcatgatgatgatattaatcacctgtaagtcctggtttctcaagtaaaggttaaaattagcgtctgtatgttaataacattagatataaaaccatatcgtgtgtatttttaattgtggtttggaacaaaataataaagctcttcatatttattct

SEQ ID NO: 392039 - DNA, 655 bp, Homo sapiens
gcaagagaagtgcagagcaaaggaggggagaagccccttataaaaccatcagatctcgtgagaactcactcactatcacgagaacaggatgagggaaactgcccccgtgattcaattatctccacctggcccctcccatgacacatggggactatgggaaccaaaattcaagaggaaatttgggtggggacacagccagaacatatcagttagaataggcaaaattcatgagctgtatttagaataaaagcagcactcagaaagtagagtgcacatgcgtgcgtgtgtgtgtgtgtgtgtgtgttagagaaggatgaagggcctaagagatatctaatattcatgaggtatttgggagctaactagacatgagattaaacatacaaacaacactaaatatacatgagtacttaatattcatgaggtcttaatttgaccatccactggtgacacccattcaggcaccaggtatcctctgcccagtaaaacaccaataaaacccagcaaaagattccacgtctagagttgcgaaaagaatagaaacggaaacaaggccgagttcttttggggatttggcccagactatattgccaggtatcctctgcctgtcgggcacggtggctcacacctgtaatcccagcactatgggacgcca

SEQ ID NO: 392040 - DNA, 330 bp, Homo sapiens
ggtttctctatgttggtcaggctggtctcgaactccccacctcaggtgatccgcccacctcagcttcccaaagtgctgggattacaggcatgagccatgcacccagctattctatgacttttaatggtcatcatcctctatgtttgtacaaagcatcttggatacaatgagtcatgacattcttttaacacccagtgttgggcagaaccatggtgtatcattggactaggccagaaatttgtaaattctctcttcgcaaaacactgtgattgaaccaggatgcaggccaggatggagaaggccatctcatctattgtcaaaaggcccacc

SEQ ID NO: 392041 - DNA, 371 bp, Homo sapiens
tatctcagtcagctgagcgtcttctcttgtatttaagagccatttgcctttgcccttctctgggccagtttgttcatttccactgcccatttttttctggcttgtttttttcttattgatttgtaaggccctttatatgtgagaggtattcgtcttttgtgatatgagctgcatttcttttaactccagttgaatttttgagtcttagtttctccaatccgggttataagggattttcctgtgctttatctagtatcatcacggtttctctcacttgcatttttttgtttgacccatttgcagtccaccccagtgtgctgtgctatggggatccaaaggtgttttccccccgcccagtagcagaaaaatcc

SEQ ID NO: 392042 - DNA, 418 bp, Homo sapiens
cgaggagccttgcctcccacagaaagagccggccactgacgtgttcacagcccctaattccagggccgccgagaacggcgcccccgacccgccagagccggagccagataccgcgctgctccaggcccggtccaccgcggagtgctggcccgaaggcggctccgtgcctgcctgcctgcctctcttccgaggccagacggtccctgccagttcccagccatcgagccacagcttccagtggctccggaacctgccgggctgtcccaaaagcaaaggcaacaacgtgtttgttgtccacaagccctcggccgtgccctcgcgggagggctccgagtctggcccgggacccagcagcggaagcccctcggaggagtccccgcccggccccggcggtggcctggaggatgctctgcccttc

SEQ ID NO: 392043 - DNA, 460 bp, Homo sapiens
tctagagtaaggttttagccacattaggaggtaaaaaccaatgtcagtctaaatcaaagaaaaagtcaccaatgagtaatcagcttctttaaagaaagtgtgaagaaagggcaattacaggaacagctgtatgaaatggttccattgttatgtaatttaactgccaaaaatgatgtcaagtatccaggaaaaacccatctatgttcacattttagaaacttggggctgggtgaggtggctcatgcctgtaataccagcactttgggaggctgaggcagggagcagggggccacctgcggtcaggagttcaagaccagcttggccatcatcgtgaaaccccgtctctactaaaaatacaaaaaattagctgggcatggtagcaggcgcctgtaatcccagctatttgggagactgaggcaggagaatcgcttgaacccaggaggctgaggttgcagtgaac

SEQ ID NO: 392044 - DNA, 385 bp, Homo sapiens
tcctcaagaaaaagtcacatgatatctcttactaggcaattacaggaacagctgtatgaaatggttccattgttatgtaatttaactgccaaaaatgatgtcaagtatccaggaaaaacccatctatgttcacattttagaaacttggggctgggtgaggtggctcatgcctgtaataccagcactttgggaggctgaggcagggagcagggggccacctgcggtcaggagttcaagaccagcttggccatcatcgtgaaaccccgtctctactaaaaatacaaaaaattagctgggcatggtagcaggcgcctgtaatcccagctatttgggagactgaggcaggagaatcgcttgaacccaggaggctgaggttgcagtgaac

SEQ ID NO: 392045 - DNA, 346 bp, Homo sapiens
actgtttgcacctcctttagatggtcatgaatctgcattcacatcagtatcactttgctgatattcacttgcctggaccctacaaacctgtactgtgcgatacagtagacactagccacatatggccatttaactgagttaaaaatttcattcctcagatgcaccagtcacatttcaaatgctcagtagccacatgtaggggctaccttattggacagtgcagacatgaacatttttatcattgtagaaaggtctgttgtatggtgcttctttagacgtttgagtttgccacctctgttatacagaagtttttaggtagcatttattattatttttaaatttgtat

SEQ ID NO: 392046 - DNA, 634 bp, Homo sapiens
tgatgctgctggagctatgcctgatgcctctatgtatgttttattcatctactggatgacctgcaagaatgcctgataggcactcttggaacgttttacctctcggattaagaaacacctgtgttttcctaataaaaacttctgtttctttttagaaagaggcttctacctaattcagcaaaaccatacttgtatttatgggaacgtttaagacctttattgtcagaaagtagccctaaaaagacttcaccaaatatgcgcatgaaaagatgctctattagagaaatgcaaagtaaacttattacaggataccacaacagagttattagaatggcttgaattaaagactgaccatactaagtgttagcaagtttgtaagttctaatgtatagaactctcatacactgccggtgggaatgtaaaaatggtacaatcactctggaaaacattttggcagtttttaaaaaattaaaaatacttctatcatgtgatccagccattccactgctaggtatctacccaagcaaaaagaaaatgtgtatctatacaaagatttgtacatgaatgttaataacagcttttttgtaacagcagaactcagaaatacccaagtattcatcaagaggtgaatatg

SEQ ID NO: 392047 - DNA, 428 bp, Homo sapiens
ggtggtttgttgagcctctctgctctgtgtcctggcttggtcatttgttgggaaactctcaatttcaacaactgtagtaggtcttttctcttaggctggtcagatactccacaactcttccaatttccttctgagagaagttcgagggtgggcaatgaagagatggatgacaacactccatatgcgttcattcctacaatccctatcttcaacacagaaatgtggctctcgctaggcgtggtggcttacacctgtaatctcagcactttgggaggctgacttgggcagatcacctgaggtagggagtttgagaccagcctgaccaacatggagcaatcccgtctctactaaaaatacaaaatcagccgggcgaagtggcacatgcctgtaatcccagctacttaggaggctgaggcaggagaattgtt

SEQ ID NO: 392048 - DNA, 269 bp, Homo sapiens
catgttcaaattttccctttttatagggctaccagttatatttgattaggtcccattcaaatgacctcatttttatgtgcttagctctggaaagaccctaattccaaataaggtcacattctgaggtactgggggttaggatttaggcacatcttttcttcggggatacaattcaatgcataacattgctgttaaccacgtttagaacatgcagtcactcagaccctttctactgcatacagaccctttttttttttttttttttttta

SEQ ID NO: 392049 - DNA, 256 bp, Homo sapiens
acatacagatggggcagctgaggcccggaggaggaagtgacttgctcaagttcacatggccatctagtgtcagaggcagaagaaaagcccacaactgccaggccttcagcttcttcactcctttcttcagacttcaaatggaaaatcgcatcccagagaggtgcctctgctaggggtgtgaagagctgagaaggaagcaaggccaagggagtcttccctgccctcccctcaacaccttcaggggctccttccagct

SEQ ID NO: 392050 - DNA, 296 bp, Homo sapiens
taagtcacccaaatcaaatttgggaaaagtcacctacttagcttcatcctaagttggttctttctttctttctttccttcttttgagacggattcttgctctatcgcccaggctggattgcagtggcgggatcttggctccctgcaacctccgccacctgggttcaagcaattctcttgtctcagcctcccaaatagctgtgtctacagccacgcaccaccacacccagctaatttttgtatttttagtagagacggggtttcgccatgttggtcaggctggtcttgaactcctga

SEQ ID NO: 392051 - DNA, 225 bp, Homo sapiens
gctagtcaaaactcatgctctgggttgatttaagggcttcccccagaggaaaaagagcccttcagttgcaatcaaaggtatccttacagatattctacacaggaatgcagcaaatctatgaccttagcctaaaccaagctgtgctctagcttcttaagttaatttgggttgcatatctcaaaagacatccttaaaggttggcaaggaaaagaatatcaaaagaga

SEQ ID NO: 392052 - DNA, 644 bp, Homo sapiens
gaatggggaaggacaaagcatccttcttttatgcttccttaattctcttttctggtcttctcacttctaaaccaggatctgctttgtattttattggtggaaaaggaaagaaaaatataaatcagctttgtcatttcaacctctgattataattcaaccctggaatttagtaatttgtactctggtactttcagcttagctgcctgacagagcagaagggcaatccagtggtcccagggactgggaacagtcacgttcctttagtatcctgttgttacctatgccgcttcctggatggtactgtgggctcactggttcctagccaaacctttcttccttgaattgatggccccacagttaaagggctatgtaaaaccaaatactttagaaacattcagttttatatagctgttgtgccaatatataacctttccatttctccacttgcctgtctctattctgataggggcattatttttcctgccctcatcctcttcaacctcagtgctgtcctggggtataaacatgcatcatttaactatgatttaaatatgattcgttatgtaagatatgtgaaaatcagtcccaataccatagtcaagatgtatctgtgtcagtaattacaaacaccactttgttattca

SEQ ID NO: 392053 - DNA, 140 bp, Homo sapiens
tctctattacaaaacaatgttttttgtctttataccttttgataccatctaatgttatattatgcatttgtttatttttattatctgtctctcctcttttaaaatataagcaccacaaggtctttgattggttcactgct

SEQ ID NO: 392054 - DNA, 161 bp, Homo sapiens
aggtttattgctaattatacccatgaatgaattctgaaaatgtgtagataaggaatttacctggtgaacggtttacacatggcaattgtgggagggagaggggagtgagaggagatgagatcagttttagctttaagaggaccaaccgggccaagcacggt

SEQ ID NO: 392055 - DNA, 312 bp, Homo sapiens
  misc_feature (230)..(230): n is a, c, g, or t
  misc_feature (257)..(257): n is a, c, g, or t
  misc_feature (265)..(265): n is a, c, g, or t
  misc_feature (283)..(283): n is a, c, g, or t
ccctttgcctctggaaatgcaggctgcttccagggcatccccctctcctctgatggctactggagttctctcaggcaccttctcacctcgggactattccacaatgtgttcagagcccagttctccagaggagcatgccaaactctgcaagcatgtctcttgcagtggccctcatttggcctgagtatagaggaactcctccatcctcagggtgagctctgacaactctnccaaggccgttcttggtatggtcgttncttgtctnctccgccttccatggganccactgggggccgaagggcaccatttggg

SEQ ID NO: 392056 - DNA, 385 bp, Homo sapiens
tgctatactgtggagatatacacagctttgaggacaaggaatgggtaaacatgactgttgctactccttatagccagttctgcataattatttataagcatttcataacttactgattcagaagtaaatcagcaccacgtattgttttgcacccagcaagcttagctattctgtatccatccttgagaaagtagtctgatgactctaagatatgtctctgctgctgatgagcagttcaaagctttccctttaagggagaacatgtgttgacttacagaagaaccccgcttgctccaacataactgcagaggtctgtctcaaatccctcctattcatgatctcccctgatatactctctctttctcctaacgtgtgttagagagag

SEQ ID NO: 392057 - DNA, 560 bp, Homo sapiens
ttaaaactttctacttggggttgcttctaaatagcgtgcatggcaaaggccttgggagcacctttcacgaagcttaatattttcataagcaaagaaaaggacctagtccgtgactgcgtatgagtcacgttagtttggttttcttcaaaggctgactactccagttgctatctctgtgtgacacagtgtcttaggatgactatgttattttgctcatgatttcatagatcaggaattcaagaagggattagctgagtggttcttgccgggggtctcttatttgttgcagtgagatgttggctgagcctggagtcatctgcaggcttggctgggctgcacgtcccagatgatcctctcacatgactgatggtcactggttatctgctgagttctcagcagagatgccagagcacctacacgtggcaatctcagggcatctaatgtcttaaacggtggctgacttctcccagagggagtgtccctaaatacttggcagaagccgcacggccttttctgatccaacctcaaaaattaaggcatcactattgctggactgattg

SEQ ID NO: 392058 - DNA, 389 bp, Homo sapiens
cctgtcagcactacatgctaggctaatgttttgtatttgtttaagagatgcagtttccctaagtagcttaggctacttttgaactcttagactcaaataatctgcctgcattggtctccccaagtgctggaattacaggccatctaaatcttttatctcagatttgccttgtggcaaaaggtggggtacttattctgacatgatgaggcggagaaagatgaggtgggtgcatcctgtgcatattattatcttaagagtgactgggaagatgcttgaagaatattcttttgtcgactctcatttaaggagcgttgaatttagcatgcattcaaaacctaaacttctgctgactgctgggtaacaatcagatgtggtttcttggtattttc

SEQ ID NO: 392059 - DNA, 303 bp, Homo sapiens
agcagtcactggggacatgggcactatctagaatatgagggctggagaagatgcaaccttggccaggggagtgacgtggggctcttgaggtacataatgattttgactgctgttatcaacctaaaagcactttttaagctctcgctgtaggcaacctcattaaggcctgtgcaggcaggcagaagagatatatgtgacataagtccaacgagaaagccaacattctcagacaatccacgctgagaattacaggaggggttacactcagtgcagagaaaagagaggtcctgggggctacagaac

SEQ ID NO: 392060 - DNA, 440 bp, Homo sapiens
ggaggcactagcaggaggttagcaggtggaaggagagatatctttcccatttccatcctgcttcaaggacatatttctcacagtggctacatcctccatgatcacagccttcttcggatgacccatctttcctgctccggcaatgccgttctctctctttgtccctgccttcaatcccagggatagtaatagcttcccacatttgcaggtctccgagcgtcacaatgtcattccctttttgtccccaaaatcctgccctcacctctgtaagttgccccatttggggagaagaagcatttgtggagaaacctgtttgctattgctttgtttttttttttttttttttttggaaaaagagtctcacccgggggcccgggcataaagtgcaggggacggacctgggcatcagggaaatctacgggccgggggggcccacaaaa

SEQ ID NO: 392061 - DNA, 450 bp, Homo sapiens
gatgccttggcatcccaaagcactgggatgacaggcgggagccaccatgcctggcctatgactatttttaacagatgataaaacagcagaagctaaatagcgtgcttagagaagcttggggggccaccagcagtagggggctgagcctcactgagccttgtcttcctgctgcattccacaccccagcctcctccactgggtgcctcctggagctcaagggaacacaaggtgctctggccccttactcctgtgggaggtgggacactgaatgctgaagcaggagcaccaggaacattcagggatgcctggtggtctttctgacttgagagcacaggaggtagaagagcttgtaggtcagtcatcccttggtgggcaccctccactgagttacctcagggcaacctcctggcagcttctgcccaccaggccatgctcccctggggcagttgt

SEQ ID NO: 392062 - DNA, 316 bp, Homo sapiens
gggggtgagattatttcccgcatcgaggggggcctccgcctccctgcgatgtgggtcctaatatccagggggggagagggggcttatattactcaccgcatctcggtgggcaccctcgcccccctgcgatgtggatcgtaatatccagggtgggagaggggggcgatattactgcccgcatcgtggggggttattaataccttactcctgggagattttctctactgccacacttggttgacaccctgggacattattttccgtattttgggaagatgcgactgttaaaatcacaggagggatacaccctgcgatg

SEQ ID NO: 392063 - DNA, 148 bp, Homo sapiens
actagaatcaagaacttgaggcctggtttctacttgacctacctgcctgtgaatctcctttagggtcttcaggatcttcagaagtgccagcctcctcaggaagcaatctagaggggaagagattaaaaggcggcagacatatacacca

SEQ ID NO: 392064 - DNA, 390 bp, Homo sapiens
ccgcccgccctgcaacaggccctggtgggtgatgttcccctcctgtgtccatgtgttctcattgttcagctcccacttatgagcttttcttttagtcctttaaatgaaatgaattaaaacattaaatataaaatatgctattaatttgataagcgcatgggattcttagccctttaaaagacaagaataaattgcagatgaccttggctagtaagaaaaatgtcttcaaaaagtgatactgctccacaccttcaaccatcaaattaccctttacacttaacatgtgagaccccaaggatgagcaaacttccacagaggagagagtgagttataactgttttaaacatgtggtcagagcaccctcaggtatttggggaggggattcagggg

SEQ ID NO: 392065 - DNA, 335 bp, Homo sapiens
atagcctccaaaatggcctactccgcattctctctccctactacgaaagccttcatacaaattttcaagtcttcctagatcactttgagcttcataatggggatatgaagagcatgggcaagacacgatagataccatgctgtgaatacgagcaactgaatgtgactattgcacacatggggaagaaaaaaggagaactgccaggcacgatggacacagtctctcagataatgagtcagcaggatgatgaattcgcgcagcaggatgatgaagtcgcgcagcaggatgatgaaagcaggatgatgaattcgcgcagcaggatgatgaattcgcgc

SEQ ID NO: 392066 - DNA, 799 bp, Homo sapiens
ggcaatcccatcatattctagttgttagaagcaggttaataagtacagcctatacttaaggagaggagaattaggcttcacttttttgaaaagagatgaatcgaaaagttttggacatagtttaaaacaatcatcatctccaaagtattattttcctccagtctctttgtatttccattcagtctatatgttgcaagaattatccttctgaaatgcgtatcttcagtcattctctcatttaatgcatttcaccagttcagtgaagtgtgaagttcatgtttctcaaacaaagctaaagatacaagctttttaaagatctgtgtactgcctgtctaatctcgtagactcgttttcagttatatttcagttatgcccagctgcttgtccataacagttaggaccttttttcttctccccagacagtgtaactcaaattgactaccttttcaaagccactaagtctaatgcatttgaataagcgaattggatgcatcaggactgtctgtgttattaacatcacagtaggtaactgtggtagacagaattatggcctcccaaagatatctatatcctaatcaacaaaacctgtgaattttaccttagatagtgagagagactttccagatatgcttaagttaaggactttgaccctggtggacccagtgttatcacagggtccttagaagtagaacaggaaaaggctgggcacggtggctcatgcctgtaatcccagcactttgggaagccgaggtgagcgaatcccaaggtcaggagatcgagaccatcctggctaacacgg

SEQ ID NO: 392067 - DNA, 460 bp, Homo sapiens
aagggtccccatttatgcaagatgtgatgtaaaggacacccccagcacatagccctcacagaagagttgagatgggaaaggctaattgcaagttcttcattcagtcacccaacacatatgttgtcagcaaactattaaatggtgattattgtgcctgggaactggggatactgatatgaatgacacagcttgccaagggccatgaatggatacaattcctgtgctagtggactcccttaatagtgtagggaagagatcactagagcccttcagaaaccatcaggggctctgcacagcgtcagtgttccaggccctccatttgtcctctccacttcacacccccatctgtcttcatccattagcctccggaaatctgtgttactcaatgtacctataatgtacctcaggcttttcctgccctgacctttgcttcatctggaatcatagattgcaaaaatcc

SEQ ID NO: 392068 - DNA, 267 bp, Homo sapiens
acagcccagcaccagaactccagccacatttttacaaaaatgctaatgtttctattacccttacactgagaaggtgggagacacctcttttaaattaacagaacaaaatagctgtgaactttaataaagtgttcagtcatgacatctaaatagtacctatgatttcagaaactgaaagccactctaatttcagcaatttcatacatgatgactaaatcatttcattttttcaatatttaacagaaatcaataaagcctatcatctat

SEQ ID NO: 392069 - DNA, 353 bp, Homo sapiens
tgatggtacagggagaagacggccatctacaagccaaggagagaggcctcagaagaaaccaatgctgccaacaccttcatcttagacttctagcctccagaactgtgagaaaatagatttcttttgtttaagccacccagtctgtggtgctttgttatgggagccttataaactaatatacttactaagcaaacaatattagctactataactattatcattattggccaggtgtggtggctcacgtctgtaatcctagcactttgggaggccaaggtgggtggatcacctaaggtcaggagttcgagaccagactggccaacatggcgaaaccccgtctctactaaaaatac

SEQ ID NO: 392070 - DNA, 183 bp, Homo sapiens
atgtgccaggcatgatagaggcctggactgagtagcgactctttggtatgaaccagatataacttgcacgatgtttcacaagctggtttggatgttattagcttagtgtgtcatttaccccatccctactcacacccgaaacatgatattttgtggagctaaaaaaaaatacctcaaacaaat

SEQ ID NO: 392071 - DNA, 1050 bp, Homo sapiens
gtcttctgcttcaaacaactaccccaaatttgctagttttatacatattagcttaaaaacaagagaagccaaagattaagtaagtgaattgtgttaaagattgcctgaaaacatttgctaaggggagaataaaactaaaactgtggagtataaaggatgttggaattaaacatttttaagtactttttcttttgcatctgatcgactgaagttattataaagaaggaatcaagtatgtaactttaaattctaggtaaacatccaaattactttctaaattcatttccaaaattctcctgtgctggcagttagctactagagatcatcatttgattttgtagtttgccatgttctgagtgagttcagctgcttactactacccatgtcattgtgtttgtattgattgcctggctcagttatctcatgttcttcatgaactatatacacattttcattgtctttaaacaatactgagttttgaagttaagtagaatattgtaggggttatcagaaacccatattcattgtggtatgtttctgtctgatactttaatattggtaaatatagtttttgacattgcattttacaatcctattgttttttagagtgatgaaagttcaagttttaagagaagtggttgcctttctcatactgtcaaacatatttcttctttattatactctggtgctttatccttctccataattctctattattacttattttaaatgttttccctatcacattgaaaaacttaaatgtccgttctccatttgaaaatatgccaaaagtatgatcccatgtaaatatgcagaaacgattgctatgaaaatgtcagcatagtttaaatgtattactctgatgattacagagatttcttcaagttgttcgtgttaagatgcatcttaaacatgatctcagttccttaaaaaatgataaaaatttttcatgtatattacatatctacctaccagaaatcctttttacaattttatatacaatcattttaagacctttttgaaataaataatgcaaatgaactaaaataa

SEQ ID NO: 392072 - DNA, 128 bp, Homo sapiens
gagtgtggtgaacaagaggagctgatgacctcaggcagggaccttcctttctctgggtctgtcccgcaacatacacacacgcacacacgcacacggacatacctgtgcacacatgtatacacaagaca

SEQ ID NO: 392073 - DNA, 327 bp, Homo sapiens
  misc_feature (149)..(149): n is a, c, g, or t
tctgcccaccttggcatcctaaagtgctgggattacaggcgtgagctaccaagcccggctttttttgttttgacatggagtttcgctcttgtcacccaggcaggagtgcagtggcgttatcttggttcactgcaacctccgcctcctgnattcaagtgattctcctgcctgagcctcccaagtacctgggattacaggagctcccaccaagcctggctaagttttgtattgccatattgaatttttgtttagaaaagatatgtgtttatgtttccagttttattacctttcactatttataataaaggaattctttatgctttatgt

SEQ ID NO: 392074 - DNA, 335 bp, Homo sapiens
cggattttgcccctcacaaacttgttttactactagctagccttattactttagtcacttaacctttttgcgtcttagtttctcactaatccagtgactcttgcccattttatagattcagatgttggaagcatgatacaatacttgtttatcccctagtggatgttcactatattatgctttattacttttatcaatgttgtattttcttttgtaaggatatttcattttttaaaaaaaccaggcaaatataaacaaaaacaaagcatgagtttttaccatcaaattaagctgaactctagactcaaagcaataaacaagacaaaaaaataaca

SEQ ID NO: 392075 - DNA, 476 bp, Homo sapiens
aattttctccttttctgcaacctgggaaactaaagctcagagatccgcatactgtgctacccaaagaatataggaagagaacccgactttttaccttttattgattaaaaaatgagacgtgtcctcacaatttccatgtgattaaccagtcctaaaattataagacatcctttcctcacttaattacatgtagtgttgttgcgggacttttccttagttcagctgaagatggggttcttgtcacagggcattgaaaatttaggctcgcagacaatttaaagggtgactaaggcagggttttattgggtgaaaaggaagacaaggggaaagggagactatcagcaaggcgaaagagtgtgcttcttgcccctgggcttcctgccttgcagattgaatcccaggtttcacccagaaagaggaggggccaggctcctccctgcagacttctgtggctccaccccagtgtgcaggcctgt

SEQ ID NO: 392076 - DNA, 219 bp, Homo sapiens
aagggattcctgctagtttctagtgagtggtagaggcagaagtagaaaagagctctggcttttgattcaaggattaatgtccctttcactcttatcgtgttgcttcttgaactgttacttatcctcaaagtccagctcaaatgcagccttttctgtccccagcccttcacattgaaatcaattattttcttttctgtgagaggtgaatagcactatata

SEQ ID NO: 392077 - DNA, 433 bp, Homo sapiens
cccttcttgtctttagcactgtgcagatcacacgtggaatgtagaccctgcccctggatgcgtctgaggggctccccatacctcatagtctctcctctggctctcctctctctcctggggcttgtcccagcacctctgggtaacgtgttgagaccttcaaatctagagcaaaacaactttgactctgcaccattcccggttcaaatcctggtgctagcctgcttgtgggtgtctcttggccactgcttctgctgtcagagtgcctcttcctcttggcctctagcccacgtcttacctgtctgtccactcagctggcccctttgtgaaagcttcccatgtccccctggcctcaggcatcctgcccttcctcccacagtgtgtggctcgcccctcctggcacatctcacggtctcacctgtgtgggagcctctgc

SEQ ID NO: 392078 - DNA, 551 bp, Homo sapiens
agacaggttggatttggattgccagcaggaaatgcctagcagacatccggaaatgtaggcctagagttggctcaagaggtcagggttgaagatggggtttgaggagtcactgctgagggatatcaatttagtcatcatggcaagcaagactgctagagagaaagtgtagacagaggaaggcagaagcagagagattcatggggagatgctcacacgtagaagccaggaagaaatcagtggtggagaggccaggagggagcaaaacagtcgatggggaaaagtaagaggagaattttcttagaagaatagggtgagtcaacaagtagcaaacactgaataaagaagtaaaaaagttttgcttaaatctagccatgcctgactgcagaagtgagcacaatatgcttctgaaatgattaccctcccaaaggtagaggagccaggccaggtttctgcaatctcagcacagattaagcaggcaacgctgggagttctgagcttccactcaaagtcagggaaatggcaagtatgggatcgctaacccactccacccc

SEQ ID NO: 392079 - DNA, 331 bp, Homo sapiens
ggatcctcggagttcccttagtctagctcgacattttgtctgatttttagttaagatgtcgctctgtcccctaaactggagtgcaaaattcttagggtcaggattcttattggcccagctaggtcaggtgccaacccttaaatcaattgtaggcagagatgtcagcttttatgggattataggcatgagccaccacacctggcctaatttttaaattttcgtagagagaagttctcactatattgctcaggcttacctttatcttaaagtaatgagaaatcattgagggattttaagcaatgatgtggtttgattagacatatgttttaga

SEQ ID NO: 392080 - DNA, 163 bp, Homo sapiens
tctcttgggtgtagacctgcttgtggagttgctgggtcacgtgataattctgactttttaaggaactgccagactctttccacagcagctgcatgtaaccgtcctggtgggtgtgcagtggtatctcctggtggctttgaattgcatttccctgatgagtaat

SEQ ID NO: 392081 - DNA, 608 bp, Homo sapiens
tagtagtccattttcacactgctgataaaggcatacccaagactgggcaatttacaaaataaagaagattagtggacttacagttccacatggctggcgaggcctcacaatcttggaggaaggtgaaaggcacatcacaaatggtggtagacacaagaagagagcttttgcagagaaactccctttttaaaaccatcagatctcatgagatttattcactatcatgataacagcatgagaaagacctgtccccatgattcaattacctcccactgggtccctcccagaacacgtgggaattaaagatgagatttggttggggacacagccccaaaccatatccagagtgaaaaggcaacacttgggagaaaagattcacaaattacatacctgaaaagggttaatattcaaaatatataaagaactcctacaactcaacaacaacaaaaaactaatgttaaaaaataggcacaggacatgaatagatatttctccaaagaagatataccaatgtccaacaagcatatgaaaagatgctcaacatctccaatcattagagaaatgcagagcaaaactgtaatgaggcttatgcccatgagtggtcactg

SEQ ID NO: 392082 - DNA, 194 bp, Homo sapiens
cttttgcagtgacctttattctccagttaacttatatgtaaagagcaccttgtttaaaatctacagattttgtgatagcgtcagaaccgaggagacggcatacttatttaattactgacttgttgcatacttctttgtagatgattttaccatttgatgccctcattttcccattggcgaagttaggatttgtt

SEQ ID NO: 392083 - DNA, 117 bp, Homo sapiens
ggaggaagtgagatctgccagtcgttttaaatgctgtagtgagaactgtcatcacttttgacatgttcttctttttttttaaatctcccttgctcagttatagcaagtccccacttt

SEQ ID NO: 392084 - DNA, 153 bp, Homo sapiens
tgtggcccatccaacaaaccaattatactatgtatacaacctatgtatagtatactatgtatagtataaaataagtcttgtgacttttttccataaagttaaatctgaaagaaaactgagaagatatagaaatatcaaaatgcaaatgtaata

SEQ ID NO: 392085 - DNA, 399 bp, Homo sapiens
ggagggatagcattaagagaaatacctaatgtaaatgacgagttaatgggtgcagcaaaccaacacagcacatgtatacatatgtaacaaacctgaacattgtgcacatgtaccctagaacttaaagtataataaaaaaaagagtaaacattttttgatgtttcgataatgtaagtctgtgccaagcactattttaagcattttaaataatttaagtaatttaatctttttaaatttttttttttttagacggagtctcgctctgtcaccaggctggagtgcagtggcaccatctcggctcactgcaacctccgcttccccggttcaagtgattctcctgcctcagcctcccgagtagctgggactacaggagcatgccaccacaccggctaatttttt

SEQ ID NO: 392086 - DNA, 694 bp, Homo sapiens
taaccagtgttggagaatcacaaatgtgttatgcactatccattacatgttgatataagacaaccgagctcactggttgccgcacataatacccatagcagcacaagatgcaagtcttacccccaaatgcttacccggaatgagcagaattgtcttactcatcctgattttacccaaaatctcatgaatgggcttgctgttgagcgtggtcacacaaggtatagtttgtacaagtaaagaaatgtgaattagtagctatttatttccttagtagcaggtaggactacttagcttgttacaacagctttgatacacagtaagaaaactctactgacagattacaagcagccaaatgtgtttacatttcagagaagggtaagggaagcctctcgttgtcttcatactttggaatgtcttaagctaaaatgtgacactagagttcaatttcttttttattttaaatgtcactaaattgtaggtaaactgtaccaaaaagttctagtttaattttaacagtaaaaactcagcataccatgttaccacgtaaacaataatggctggtattttctgtgggttaatttaacatgacataaacataggaaagcccttggcaaaattctacatcattgaagtagaccatttctaaatgcaattaaatagtgaggttattataaaaattagaatttaaaatatg

SEQ ID NO: 392087 - DNA, 798 bp, Homo sapiens
ggtgggtgcgaggcaagaggaggctgcaatgaattgagattgtaccactgcactccagcctgggtgataaagcaagacactgtctcaaaaaagagtgtgaaataccagacatttttagttaaggaaaaactaagagaattcgttgctggttggtactgtaacaaacaccaatggaagttccttaggctgaaaggaactgataccagttattttcaggcatagaaatcacaattgaaacagaatgaagcactgcctcttaatgaaatcatcaataaattaggaaatgagtggataaacattatccacttaatgtccctttcctccaacgtcatcacttctaaatcacagaactttagaaatgaagagcatggacactacaaagaaacaaaccagaaccttacaggttggcctgacatactcaagatacaacagctggtggcagaaagcaccaccaggattggagtatagcattccttgcttctgcacctgtctttccaggtgttaggtcatttgattttaataaatggtataaaagttaatgtgaattttcttgcaacttatgttgctatgtgatggctcatcaaaagaagcataaagaaaaactaaaatggcagagaaaaacattacttataataaaatatttgtgtttttactactatatctgagacccccagcaaaagcaatagaaataagaaatgggaggtataaggaataatcaaaatagtgattatctgtagacattaaaacattaaaaaaaatcagtaagacaccaagaagaaaaagcaaccaaaattattt

SEQ ID NO: 392088 - DNA, 718 bp, Homo sapiens
ttaagctcacagaagcaggactattagagagagaatagggacctcatccagattgaaggacagaagaaactcaaaggaagaacatcttagaggatggagtcaagaattttggaaaactggacaagagaacccttccaagacataagaactgcaatttaatacgggaacattctctgtgcctaagctctagaggctgcctgtgtttcttgtcttgtggccccatttcactctgacctctgcttccattgtcacatggccttctctgccctgaccctcctctctgcttttaaggactcttgtgagtacaccgggcctgcccaagtaatgtagaggaatcctctgatctgaagatccttaactaaatcacacctgtaaagtcccttttgccatgtaaggaaacatttggaggtctgggaattaggacatggacatctttgggacaccagtattcagtctactacaagctttaagaaatgtttattttcagttatttacagtataaagtggtatgcagttatcaataagataaacaatgacatgtcattatttggattttcctctctgacatcagactaatgaccattatcttagtaacttccaacaatagggtaatttctataatagtgaatctgacttttggttaaaacaatatcataaagttgtatggtagagcaaatgattgggtgatgagattacatatgattccaggactccttgg

SEQ ID NO: 392089 - DNA, 626 bp, Homo sapiens
agcggacagagagacaaggatgtctgtctttggcagccagattgaaggacagaagaaactcaaaggaagaacatcttagaggatggagtcaagaattttggaaaactggacaagagaacccttccaagacataagaactgcaatttaatacgggaacattctctgtgcctaagagatcaaaagttgaagtgcctatagggacccaggctaagaaataagaagaaatgaaaactgggctagaccaaggagtacatacactgccccaccaagaaggttccagagctgcttagctccagccaactattgccacgggggacagtgcaaccacatgttctaggtgttcagtagaacttcaaacatcaaaaaattactggccaggtgtggtgaaaacctgcagaagactgacagtaatgaaagtggcttgagaaaaagtgaggatatttgcagattgaaaaaagaaaaacaacttcctatttgggggaaaatctcagtgatgaaaaaaattgtctcaggaggatttcccagcatcataatcttcctgaacactgaattctctagttaactacagaaatcatgtgttacataaagataagatggtcaaggaaggaaaagatcttacaatatat

SEQ ID NO: 392090 - DNA, 804 bp, Homo sapiens
aagagagaaaattcaaaaaacctcactaagaaataaaacaggagataccacaactgacaccactgaaatacaaaagattagtcaaggctactatgaacacctttatgcacttaaactagaaaacctagaagagatggatatattcctagaaaaatacaatcctcctagcttaaatcaggaaggatgagataccctgaacagaccaataacaagcagcaagattgaaatgataacttaaaaattgctaacaacaacaaaaagaagtccaggaccagacagattaacagcagaattctaccagacattcaaagaagaattggtgccaatcattttgacactattccacaagataaagagggaaccctccctaattcattctatgaagccagcatcaccctaataacaaaaccaggaaaggacaaccaaaaaaagaaaaccacattaaggtatgtcccttgtatgctgattttgctgagagtgttaatcataaagcgatgctggattttgtttaatgatttttctgcatctattgagatgatcatgtgatttttgttttgatttcttttcagtattatgttggttgtgggtttgtcataatactgaacggggaaaagttgaaagcattccctctgagaactggaacaagacaaggatgcccactcttaccactccttttcaacacagtactggatgtcctagccagaacaatcagacaagagaaagaaataaagggcatccaaatcagtaaagaggaactcagattgtcactgtttgctgatgatatgatcgtttaccttgaaaacc

SEQ ID NO: 392091 - DNA, 336 bp, Homo sapiens
aaacatactgatatggcagaatagaagagagcactgaaaatggatccacatatgtgggaacttgatgtttcttaaaggtggtatcataaactaatagaaatagggaccactgaatacatgataaattagtttatccacagggaaaaagataaaacagacactatttgaaactttaccccaaaagactaaatatgaaaagtaaaatggtaaagcttttagaaacaagttacaacaagttatagaagagtatctgtatgatatagtggtaatgaaggatatatttgttttaaaaactcacaaaaaacagatgccatcagtaaaaaattaatagaactt

SEQ ID NO: 392092 - DNA, 302 bp, Homo sapiens
attttgtataagcatgtctctaatgcatataataatttactgggaatataggcttgcttttaggaatttactttataaacaatttggaggaatgcatatctttctggtaaattcagagaaagacgaatggaataattgaagaatgatgacattccttgggtatagtttttatttcattaaactataccttcgatatagtttaataatcagtaatactagtcaaaaacactagctagaaactctgcttctgttcctttgtcaatataattattatacaaggatgagatactatgttataaata

SEQ ID NO: 392093 - DNA, 759 bp, Homo sapiens
cacattctaaaaattaacctaatattaaagctatagaacaaaagatgaacctctccttccccatgtctaggaggattaattcttttccagactttgatcatgttttttatcaatttaaacccctttcacaagctttgtattatccttaagatagtccaagcttcttaacatcatctatgaggtcctcctagcctcacttttgctttttgataattcctgttagatttctgataaagagtcacttcctcaaggaagtcctttcttgacctcctaactgggttagcataatgttttcacagcccttagtcatttaccatagtcattctccactgaggcagtgctgctctctggaggtgtcctagtgactgggaggtgctcttgtcatttactgggcagggctgagagtgctagatgttcaccatgaagaattgtcctagctttgtatgacttgtaaatgtcttgttagatagtcacaaaggtgtaagaaatctgtttatagatatcagagccaagagcctaactcaattttacatatacatgtggaactttttgcagagttttaatatatgttgaattttctaggaataaaaactatggccaggcagggtggctcacgcctgtaatcccagcactttaggaggctgaggcgggcagatcacttgaggtcaggagttccagaccagcctggacaacatggtgaaaccctgtctctgctaaaaattcaaaaattaaccgagcgtgctagcacacacctgtaat

SEQ ID NO: 392094 - DNA, 236 bp, Homo sapiens
acattgacgaaaacggaagagaatctagacattaggaaacatttttgttgaagggctaaacagtaaatatcttatgctttactggccattcaaacattacaattactctactgcttaaatgcaaaggcagtcacaggctatacacaaatgagtaagtgtggctgtattccaataaaactatctacggacattgaaaactgaatttcagttaattttctcatattacaacaaactga

SEQ ID NO: 392095 - DNA, 340 bp, Homo sapiens
tgctattatgaacatttaagattcatgagaggaagtcaaaataccaacatgaaggggagtttagaagaggttgattccaaccctcatgaactttaaaatattaattgaagttaggctgtagtgagttaaagatgcatattgtaatcttgagagcaaaaataacacaaagagatcatacacccttgagataaatgtttctaaatggacaagaattttatcagattttggttaactttggaaagtgatccatgtgtacttgggaaggattctaaagttgctgggctcagcactctacgtatgccccataatggaagagagtcagtgtgtttaatgtatatcc

SEQ ID NO: 392096 - DNA, 337 bp, Homo sapiens
tgattatatactacccccttgataactctggcacagatctgggatttccctagctccagggcagaataaaaagtccctttcaccaaaaacacttgtgtccactgaggtacttccgtcttcacacagtggagaggggttagaggcttttgagtttggttgaggtaggtggcaactagctgaacgacagaaaaggagagttgccggttatgtgactaccaggaacctaataggtgaggaaagtggtggaaccttaggtgggaatgaatgcgtagcatattagggagatcgcgtgctaggtatctgagattccaaccatgaccaagacccttatgcccaa

SEQ ID NO: 392097 - DNA, 452 bp, Homo sapiens
atgaatttatatagcttattttaatgctatatatgaatttatatagatgaatttggcttttgaaaaacaaattaagtgcattaggaattttttctttaaaagtgatatgtttttcttacactttgcaagtttagaacttgccatattatgtttttgaggcaggcttctgtggatataatgtggggaaaaccatgaggtttttgcttgggatcaagtgggatttaggtgcatgccttttgtgatttaaagctattttaaagtgtgcttttaacaccatggaattacaattgttttctgaagtcaggtcaggactctgattctgcagaattatggtgaagccagtttctctttaacaagcaaaaaccgtgtcatcaaactgtacaaccaaaggacctaaatagtccattccctagtcttcagctgtacaaagatgaatcaatctctctgtctct

SEQ ID NO: 392098 - DNA, 225 bp, Homo sapiens
tggtgtgatctccactcactgcaacctctgcgcccagctaatttttgtatttttagtagagacagggttttgccatgttggccaggctggtcttgaactcctggcctcaggtgatccatccgcctcagcctcccagagtgctgagattacaggcatgagccaccatacttggcctattttattctctagtagataatctgggggaaaaacttgccttcttgactt

SEQ ID NO: 392099 - DNA, 157 bp, Homo sapiens
ctgcgacctgctgtcctcatccccaaagcctggctcctcctgcgacacactgtcctcatccccaatccctggctcctcctgcgacctgctgtcctcatccccaaaccctggcttctcctgcgacacgctgtccttataccccatcccgggctcctcc

SEQ ID NO: 392100 - DNA, 246 bp, Homo sapiens
ggcatagccatactgcaggtgatacatcctgtgtgctgcccactttgagtcctgaccaaggaagcagaatgccttccaggagttgcatacataaagctgcagcgtgatctgataaagagaaagagagcctctgcactttcagtgcagtccagcttaaagcctggaactagtttttgcatctctttgaatctacttgagtgcaggcccccaaactgggtatcagaccttgattaaggagactaacaa

SEQ ID NO: 392101 - DNA, 723 bp, Homo sapiens
cctctggtgtgacccccagcaggtgctaccacagtgccttgatcccaactccaggcaggaaaattacagaggttaggaaatgggattcgctcaggacagctgttctgtttgagctgaacagcctttccctgctgggcacccatggcactcagctccatacccagtaagagtggttcttacctagggagggtcaccaagaggacctgctcatgtgtttgaggggctattcaagggagcctgtctctgtgactacacaaatatagtctattttccaagtaagcttgaaaaaaaaaaggggggggtcctagtgggaaaggagtgatgtaaggggtgaagagatgggaagggagtgttgaactttttagtaaggcagttgacacatgatatgaggccacttcgatttacttgaaaaacaagtttaatttgccctgactctaacctgttcttgaggaaagaatgccttgaagggagagaccacctggaattgactggaaaagggtgcagctggctttctttctttgcttatggctctttgaggagaagatgggtttgggggtcccttcagaatattgtattcttttttgtttgtgttttgtgttgtttttagtagacatagacagggctcactgtgttccccagtctggagaacgggctattcacaggtgtgatcaagtgcacaccacagcctgcaactcctgggctcaagcaatccttgcctcccag

SEQ ID NO: 392102 - DNA, 286 bp, Homo sapiens
agaccgcattgagagtgacacggctaaccaccaaacctgtcttagaagtgacaggattcacaggattcatttaaaatacgctggtggtctccaggttggacattttacagttgaaccaattgaaaaaacaagcaagcaacaacaaatcctgtaaatctccctcttcccatcataacctttgacgagtcgacctgttctcccagggcacagggtccagcagcggcacctacagcctttcccgcagcacctcacccctcagtgtctgtgaggggtgaggtgctgcggg

SEQ ID NO: 392103 - DNA, 348 bp, Homo sapiens
acccacatagcagacactctgctagtactataactacggagtcactgtccagtttttcagagtacacagcaggtcctcttattagggttgccagataaatacagagtgcccagttaaatttgaatttcagataaacaacaaataacttgcggggccggagaagaataataagtatattccaaacattgcctgagagacatcttgtatttttatttgataattttttttttttaatactgagatggagtctcgctctgtcgcccaggctggagtgcagtggtgcgatcttggctcactgcaacctctgccgcccgggttcaagtgattctcatgcctcagcctcccgat

SEQ ID NO: 392104 - DNA, 463 bp, Homo sapiens
cttcagccctctgtgcctccctttgctcgtctgtcatcagggtaataacttttcctcctcacagggttaagtgaggaagaggtgagatgactcttcagtcactgagcagtgccaggcacagggcaagactgagtacacgcccgttgtcattccccctggctggagctcttgcaatcactgttatgcccccaccctgccctctcccattaatctgttaatgtggtgaattacattgataagtttgtacatctgtcttttaaaattgagacgcaatcttgttctgtcacccaagctggagtgcagtggcacaatcacggctcactgcagcctcaacctcctgggttcaagtgatcctccgacctcagcctcccgagtagctgggactacaggcacatgccaccatgcccagctaatttttatatttttactagagacagggttttgccatgttgcccaggctggt

SEQ ID NO: 392105 - DNA, 441 bp, Homo sapiens
cagggccattctcaggtgtgcttaagcattgctgtggggtgtgtttactatgcacacgagaagggatgggcagggtcgcagtctgcagcactgcccacggacagccctttgcatatggcgtttactgctgtggggttccttttctcaccatcatcaccccagctgtgctcccaaagttaacccatggaccaccggcctggcaccaccacaactgttccagtgtctgtagcctcaccttcagttcctactgggccgagaagccttggaggcagaggctcagcacccacacacccccacctacatctccactaggcttcgggtagcaggtccaactcctgagactgtgcagactcccattttccagaggcctctgctcccactgctccccacctacaaagcttgccccagggcctctacacgtgccgttcacagtgccaggga

SEQ ID NO: 392106 - DNA, 165 bp, Homo sapiens
ttcatttaaaaacaaaacaaagtgtgctattctctaactgctatacttaagcctgcagtctaggtaataaatagtaataaccaaatcaccattatagtaccaaagtactttaatttgtaagcgaagtgttgatgaagaaatacaaatagctcatgggatctttaa

SEQ ID NO: 392107 - DNA, 336 bp, Homo sapiens
ccgtctctgatttccatgattcagcctggggagtttccagagggaaaaagaagccctgctcaagcccagggagaccggtcttggaggcagggagaaacgcagccccaggcggagagcacagggcacacatccagctatggatggacacacatacccccacacactggccactgcgagcacccagagggtggcctggggtgagacatggcctcaaccccactagagtcaccccaagactgactgccaaggacagaacaagggacagcatttctatatccccgactccacacccctgaccctcttacacccctcctgctggggtgggtgccaaccatg

SEQ ID NO: 392108 - DNA, 269 bp, Homo sapiens
ccagcctctccggtagctgggaatacagatgcatgccaccacacctggccaatttttgtatttttgtagagatgggatttcactatgttgtccaggctggtcttgaactcctggtctaactgcctcagcctcccaaagtgctgggattacaggtgtgagccactgcgtctggcctacttattttcttctttttgagccttggcgtcagacactattaacatctgaacactcatcttgagactagtccacatatatgatgaccttacgtg

SEQ ID NO: 392109 - DNA, 395 bp, Homo sapiens
acctaattcacatcatcaagaaaggcctccagcaggaaatgtctaatctatgttaagaagaatgacaggaaacagtcaaatgaaggtatcagtaaggatcaagaaagacaagagtgtggatgagagaaaggatggtggatttagggaatcaaagaatcttggtagatggtaatggtaagagtgtgaagtatagagtgccttaaaataggctgggcgcagtagctcacgcctgtaattctaacattttgggaggtcaaggcgggtggatcatttgaggtcaggaattcaagaccagcctagccaacatcaaggtaaccattacaaccaaatagtgctaacctgcataccctacccctcacatgctttgcccagcccagcctgcataccccacccct

SEQ ID NO: 392110 - DNA, 305 bp, Homo sapiens
tccctctctctttcttctcatgggatccagcgtggttatcctggttctctggtttctctggagagagccgaggctggaaacctgaatatgggaatttagatagtgtttcagagagatgctgtggaggaagcctctctctgatcaaattagatctatttttgagagagagaaactccagagggatttccagaaaccatgatcagaacagaggcaaatggtggccccatgagtctgcaacaaagcaggtcacaattgttaagacttcagctcactgttgtctggaaactgggccaagattaagccaa

SEQ ID NO: 392111 - DNA, 382 bp, Homo sapiens
ggtatgaacggcagagcctcccgggagcctgcccacccacactctcctcatgaggtcccctttcattctccatcttagccggagattctttccttgcttatgctgagtacaacctgcaatcattatatggatttgattatttgggtttctttctaataatctccctcatataagctccaggagggaaagaaccataactgccttgcatcccctttgcctgggacagtgactggcacagggtggatgctgaagacgttggggcagtaggaatgagtgacaatgggtcaagtgggtgcctggcgggagtccctctgggagggtgtgagtgatgacgggttgtaggttgactgtggtatagacagcaagaagaggctgaactcaa

SEQ ID NO: 392112 - DNA, 310 bp, Homo sapiens
ctgagggactgcccacaccgtgagttggctgtagagcccagaccccaacaggagtccaggaaaactggtttgaaatcctgcttctgcttactgctgcctgtgtggcccaggccagtcacttggcttctgtgagcctcgatttcctcttctgcaagaggggtcatcaccatctaactggtggagttattaggaggtaggcaggacactgactctgtgccaggctccaagagtttacaaatattaattatgaggactaaccctcgtaacagctttctgaagtagatgctattagagtccccatttaattaag

SEQ ID NO: 392113 - DNA, 321 bp, Homo sapiens
gaccctgtctcacggaaaaccgaaggagaagacaacccgtactgcaggctctgggagatacaagtcaggaaagaaagaaacaagacaaggagagaaattaagttaccttcccatggaggaatgtgggaaggggcttactttagtctgcatgctagatctaagcatggaacaaggatccccttgtggtcctattaagtgcttctcattcattagacttaagtctacaaaaggaaagtacaatgcacattattttagaaacatcctctcccctgcccctcccagcggaatcaactccaagtacaccctagttgattcaatgca

SEQ ID NO: 392114 - DNA, 152 bp, Homo sapiens
gggaggagaacagatttatgcccttaaaaaagatgtctgagccagtttttgtccagtctgggtcctttgtctctgaagtgtctcatccacagcacggtaagtaaggcaagaagttcagtctggagaatagagaaggaacagtgggttcgggg

SEQ ID NO: 392115 - DNA, 565 bp, Homo sapiens
agtgtgcagggagataaatgataaagataaatataatagtgaataggagtaacaatagaaggagttatagttcaggtactatgggaactcaaagaaaataacatatcaggtgggagagtctggaggaggcatttgagttagtgagttttgaataggcacaatgaataggttaaggagcattctacctcaagggaaaaacatgacccaaggcactggcacttaaacaagtgtgtgttgaatagctgaatggaattgggtagcgtttgttcttccactgatttactcactatgatatatgaatgcctcctgaatggcaagcaccatggcaggttggtgctgggaatataataagatgaccgtcatgaaactacagtctaatagagatagataaaaccgacaaattaatgaatatataaatccaaagtgagaaagactgttaggctactgagtaacttgagtgaggatagatggtatgattaggtagtcagggaaggactctttgaggaaacaaaatataagctgaaactgatctttgttaggagccagtttacctgtaggatattta

SEQ ID NO: 392116 - DNA, 1518 bp, Homo sapiens
  misc_feature (533)..(533): n is a, c, g, or t
tttttttatgtgtttgtttaaagatacatattaagcttgtagaccatagggacatacggagagtccattgctaatatctcactcagtattgtgaaattctatctcaccaccgtgaaactcttcagttttctaattgctttatcagcagggggtataaaaggtcatgaaagcaatttccacatgctgtggctccaggtctctgggtgtgaagcagagcaagcctggtttgtcctcctcctgtctccacacagacggcttctgcaggtttggtaatctacagtacactccttgcagggaaaaggtgatgagtcatcatggacttatttgaccactttttatgcatgcttagaggaaaacagaatactgttaagagattcatctgctagttattaagtaaagaaatatcacaataggccgggcgcagtggctcacacctgtaatcccagcattttgggaggccaaggtgggcggatcacctgaggtcaggagttcgagaccagcctagccaacatggtgaaaccccgtctctactnaaattataaaaaattagccgggtgtagtggtacacgcctgtagtcccagttacttgggaggctgaggcatgagaattgcttgaacccaggaagtggaggtggaggtgagccgaaattgtgccactgtactccagcctgcaacagagtgagacactgtcacacaaaaaagaaagaaatatcacaatatgtcacaataggccgggcgcagtggctcacacctgcactcccaaagtgctgggagtataggtggtgagccaccacgcctggcctaaatgaagtaccacatgaccgaccgaccgacctggggaacatagcaagaccccatctctacaaaaatgtaaaaaataaaaattagccgggtgtagtggtacatgcctgtaatcctagatactcgggaggctaaggcagaaggatcacttgagcccaggagttcgaggctacagtgagctgtgatcgtgccactgcactccatcctgggtggcagagtgaggccctgtctcaaaataaataatccagtcccccccaagaaaggaatgaagtgctataatgagaaaaatcctagtacctaacatatagtagacagtggagagtggttctctttcgtttctcaggggcagacagatggggtgctggagtcctctatcaaagagtcagagctctatcccagatgtgtaatgaacgtggtcacagacatattgtcccattaccatttaccttccctataaccactgtgcctccagccttgtagaatagacacataggagcgcagcaatacgtctaaaaataggagtgagagagggcagggcatgcccgttcttgtggtagaagaaaagaatgtcaaagaaagcagctgggagtataggtgggtgagccaccaaggcctggctaaatgaagtaccacatgaacgacggacgacctggggaaaatagaagacccatctcttcaaatgtaaaaaaaaacggggctccattcggggcggaaaag

SEQ ID NO: 392117 - DNA, 3044 bp, Homo sapiens
  misc_feature (533)..(533): n is a, c, g, or t
tttttttatgtgtttgtttaaagatacatattaagcttgtagaccatagggacatacggagagtccattgctaatatctcactcagtattgtgaaattctatctcaccaccgtgaaactcttcagttttctaattgctttatcagcagggggtataaaaggtcatgaaagcaatttccacatgctgtggctccaggtctctgggtgtgaagcagagcaagcctggtttgtcctcctcctgtctccacacagacggcttctgcaggtttggtaatctacagtacactccttgcagggaaaaggtgatgagtcatcatggacttatttgaccactttttatgcatgcttagaggaaaacagaatactgttaagagattcatctgctagttattaagtaaagaaatatcacaataggccgggcgcagtggctcacacctgtaatcccagcattttgggaggccaaggtgggcggatcacctgaggtcaggagttcgagaccagcctagccaacatggtgaaaccccgtctctactnaaattataaaaaattagccgggtgtagtggtacacgcctgtagtcccagttacttgggaggctgaggcatgagaattgcttgaacccaggaagtggaggtggaggtgagccgaaattgtgccactgtactccagcctgcaacagagtgagacactgtcacacaaaaaagaaagaaatatcacaatatgtcacaataggccgggcgcagtggctcacacctgcagtcccagcactttgggaggccaaggcagatggatcacctgaggtcaggagtttgagaccagcctggccaacgtgacaaaacccagtctactaaaaatacaaaaattagccaggcgtgatggtgggcacctgtaatcccagctactcaggaggctgagacatgagaatcgcttgaacccaggaggtggagattgcactgagctgagatcctgccactgggctccagcctgggtgacagaatgagactctgtctttaaaaaaaaaaaaaaaaaaaaaaatcacaataagtcctagggtaaagatgggggtacagaaaacaattaaatagaacaaaaacaactgtttccttttcctgtgattcaagaagggcttagatcttctactcagcatccttttactaatgccctccattggctctcaccccaacatttccttttttatagcttattttgtaatgcctccttaattatcctttaatagaagccaccgctgataagctacctacactcatacagaagcattaatataatgccccagatgtactgtttcagggcaaaaaggaaaataatttccaacaaagtggtgtgtgtttcactgtcagatgcttgcacttacacacggaatcgctgtgcatccgacagaggctgattggcacatggggcacggggattgtcagctcaaacaccgtcagcagcgttgcccttggaaatgggatttcccagaacagtaaacgtgtctgtccttgatttacagagtagctacattcctaggaaatccagggtacattaaaactcaccatgttacccaggctggtctcaaactccaggcctcaagcaatcctcccacatcagcttcccagaattttgggattacaggcatgagccaccacacccagccagaatattttatttctgttagacacagagcgttcgttgactcgtctgggcgttagtgttaatattctgtacttgaagcaagcccaccaagcggctgaactgggtggataatggaaaatgtcctgtggatttgggagtgagacaaaccggcttgagtctaacctctcagttagtctaaggctccaagcttgaaagggttaaatgaagtactatatttgttttgtttcgttttcgttttgtttgaggctttgctctgttgcccaggctggagtgtagtggcacaatctctgctcactgcaacctccatctcccaggttcaggcgattctcttgcctcagcctccagagtagctgggattacaggtgcccgccaccacacccggctaagttttttttggtatttttagtagacacagggtttcaccatgttggctagactggtctcaaactcctgacctcaagtgatccacctgccttggcctcccaaagtgctgggagtataggtggtgagccaccacgcctggcctaaatgaagtaccacatgaccgaccgaccgacctggggaacatagcaagaccccatctctacaaaaatgtaaaaaataaaaattagccgggtgtagtggtacatgcctgtaatcctagatactcgggaggctaaggcagaaggatcacttgagcccaggagttcgaggctacagtgagctgtgatcgtgccactgcactccatcctgggtggcagagtgaggccctgtctcaaaataaataatccagtcccccccaagaaaggaatgaagtgctataatgagaaaaatcctagtacctaacatatagtagacagtggagagtggttctctttcgtttctcaggggcagacagatggggtgctggagtcctctatcaaagagtcagagctctatcccagatgtgtaatgaacgtggtcacagacatattgtcccattaccatttaccttccctataaccactgtgcctccagccttgtagaatagacacataggagcgcagcaatacgtctaaaaataggagtgagagagggcagggcatgcccgttcttgtggtagaagaaaagaatgtcaaagaaagcagctgggactaatgaactttacattagccatattccattatttcagcttaagtcaaatgtcggtcctcatgaggcaactggctttgacaggagctacgctaattaccacttaccaacctttaatttctgggtaaaagcaaaagagaaaaactaatggatttttcattttccagagagacaagaataaaataatagtagtctgtagaaaaaagaaaacctgcatcaattacaagaattattaatgtatctttaataaataaccacattatttagctgtttaatttcctaa

SEQ ID NO: 392118 - DNA, 3416 bp, Homo sapiens
  misc_feature (533)..(533): n is a, c, g, or t
  misc_feature (3416)..(3416): n is a, c, g, or t
tttttttatgtgtttgtttaaagatacatattaagcttgtagaccatagggacatacggagagtccattgctaatatctcactcagtattgtgaaattctatctcaccaccgtgaaactcttcagttttctaattgctttatcagcagggggtataaaaggtcatgaaagcaatttccacatgctgtggctccaggtctctgggtgtgaagcagagcaagcctggtttgtcctcctcctgtctccacacagacggcttctgcaggtttggtaatctacagtacactccttgcagggaaaaggtgatgagtcatcatggacttatttgaccactttttatgcatgcttagaggaaaacagaatactgttaagagattcatctgctagttattaagtaaagaaatatcacaataggccgggcgcagtggctcacacctgtaatcccagcattttgggaggccaaggtgggcggatcacctgaggtcaggagttcgagaccagcctagccaacatggtgaaaccccgtctctactnaaattataaaaaattagccgggtgtagtggtacacgcctgtagtcccagttacttgggaggctgaggcatgagaattgcttgaacccaggaagtggaggtggaggtgagccgaaattgtgccactgtactccagcctgcaacagagtgagacactgtcacacaaaaaagaaagaaatatcacaatatgtcacaataggccgggcgcagtggctcacacctgcagtcccagcactttgggaggccaaggcagatggatcacctgaggtcaggagtttgagaccagcctggccaacgtgacaaaacccagtctactaaaaatacaaaaattagccaggcgtgatggtgggcacctgtaatcccagctactcaggaggctgagacatgagaatcgcttgaacccaggaggtggagattgcactgagctgagatcctgccactgggctccagcctgggtgacagaatgagactctgtctttaaaaaaaaaaaaaaaaaaaaaaatcacaataagtcctagggtaaagatgggggtacagaaaacaattaaatagaacaaaaacaactgtttccttttcctgtgattcaagaagggcttagatcttctactcagcatccttttactaatgccctccattggctctcaccccaacatttccttttttatagcttattttgtaatgcctccttaattatcctttaatagaagccaccgctgataagctacctacactcatacagaagcattaatataatgccccagatgtactgtttcagggcaaaaaggaaaataatttccaacaaagtggtgtgtgtttcactgtcagatgcttgcacttacacacggaatcgctgtgcatccgacagaggctgattggcacatggggcacggggattgtcagctcaaacaccgtcagcagcgttgcccttggaaatgggatttcccagaacagtaaacgtgtctgtccttgatttacagagtagctacattcctaggaaatccagggtacattaaaactcaccatgttacccaggctggtctcaaactccaggcctcaagcaatcctcccacatcagcttcccagaattttgggattacaggcatgagccaccacacccagccagaatattttatttctgttagacacagagcgttcgttgactcgtctgggcgttagtgttaatattctgtacttgaagcaagcccaccaagcggctgaactgggtggataatggaaaatgtcctgtggatttgggagtgagacaaaccggcttgagtctaacctctcagttagtctaaggctccaagcttgaaagggttaaatgaagtactatatttgttttgtttcgttttcgttttgtttgaggctttgctctgttgcccaggctggagtgtagtggcacaatctctgctcactgcaacctccatctcccaggttcaggcgattctcttgcctcagcctccagagtagctgggattacaggtgcccgccaccacacccggctaagttttttttggtatttttagtagacacagggtttcaccatgttggctagactggtctcaaactcctgacctcaagtgatccacctgccttggcctcccaaagtgctgggagtataggtggtgagccaccacgcctggcctaaatgaagtaccacatgaccgaccgaccgacctggggaacatagcaagaccccatctctacaaaaatgtaaaaaataaaaattagccgggtgtagtggtacatgcctgtaatcctagatactcgggaggctaaggcagaaggatcacttgagcccaggagttcgaggctacagtgagctgtgatcgtgccactgcactccatcctgggtggcagagtgaggccctgtctcaaaataaataatccagtcccccccaagaaaggaatgaagtgctataatgagaaaaatcctagtacctaacatatagtagacagtggagagtggttctctttcgtttctcaggggcagacagatggggtgctggagtcctctatcaaagagtcagagctctatcccagatgtgtaatgaacgtggtcacagacatattgtcccattaccatttaccttccctataaccactgtgcctccagccttgtagaatagacacataggagcgcagcaatacgtctaaaaataggagtgagagagggcagggcatgcccgttcttgtggtagaagaaaagaatgtcaaagaaagcagctgggactaatgaactttacattagccatattccattatttcagcttaagtcaaatgtcggtcctcatgaggcaactggctttgacaggagctacgctaattaccacttaccaacctttaatttctgggtaaaagcaaaagagaaaaactaatggatttttcattttccagagagacaagaataaaataatagtagtctgtagaaaaaagaaaacctgcatcaattacaagaattattaatgtatctttaataaataaccacattatttagctgtttaatttcctaaaaaaaaaaaaaaaaaaaaaaaaaaaaaaaaaaaaaaaaaaaaaacaaaaaaaaaaaaaaaaaaaaaaaaaaaaaaaaaaaaaaaaaaacaaaaaaaaggagggggggggggcgagaaaaagagccgaggggggagcacagagcgggccgccgcgcacatatgaaaaaagcgacccagaagaagaaacacaaaaccagcaagcgcaaacagaagaaataagaaagagaaaaagttacgagacgaatagaaaggaaataactacaggaccaacacgggacaaaccaaaagcaaataaacaaagaaaataagacagacacaagatgccaacgagctaacgcccggacaatggaaacaggtaaacaacataaagcn

SEQ ID NO: 392119 - DNA, 3004 bp, Homo sapiens
  misc_feature (533)..(533): n is a, c, g, or t
tttttttatgtgtttgtttaaagatacatattaagcttgtagaccatagggacatacggagagtccattgctaatatctcactcagtattgtgaaattctatctcaccaccgtgaaactcttcagttttctaattgctttatcagcagggggtataaaaggtcatgaaagcaatttccacatgctgtggctccaggtctctgggtgtgaagcagagcaagcctggtttgtcctcctcctgtctccacacagacggcttctgcaggtttggtaatctacagtacactccttgcagggaaaaggtgatgagtcatcatggacttatttgaccactttttatgcatgcttagaggaaaacagaatactgttaagagattcatctgctagttattaagtaaagaaatatcacaataggccgggcgcagtggctcacacctgtaatcccagcattttgggaggccaaggtgggcggatcacctgaggtcaggagttcgagaccagcctagccaacatggtgaaaccccgtctctactnaaattataaaaaattagccgggtgtagtggtacacgcctgtagtcccagttacttgggaggctgaggcatgagaattgcttgaacccaggaagtggaggtggaggtgagccgaaattgtgccactgtactccagcctgcaacagagtgagacactgtcacacaaaaaagaaagaaatatcacaatatgtcacaataggccgggcgcagtggctcacacctgcagtcccagcactttgggaggccaaggcagatggatcacctgaggtcaggagtttgagaccagcctggccaacgtgacaaaacccagtctactaaaaatacaaaaattagccaggcgtgatggtgggcacctgtaatcccagctactcaggaggctgagacatgagaatcgcttgaacccaggaggtggagattgcactgagctgagatcctgccactgggctccagcctgggtgacagaatgagactctgtctttaaaaaaaaaaaaaaaaaaaaaaatcacaataagtcctagggtaaagatgggggtacagaaaacaattaaatagaacaaaaacaactgtttccttttcctgtgattcaagaagggcttagatcttctactcagcatccttttactaatgccctccattggctctcaccccaacatttccttttttatagcttattttgtaatgcctccttaattatcctttaatagaagccaccgctgataagctacctacactcatacagaagcattaatataatgccccagatgtactgtttcagggcaaaaaggaaaataatttccaacaaagtggtgtgtgtttcactgtcagatgcttgcacttacacacggaatcgctgtgcatccgacagaggctgattggcacatggggcacggggattgtcagctcaaacaccgtcagcagcgttgcccttggaaatgggatttcccagaacagtaaacgtgtctgtccttgatttacagagtagctacattcctaggaaatccagggtacattaaaactcaccatgttacccaggctggtctcaaactccaggcctcaagcaatcctcccacatcagcttcccagaattttgggattacaggcatgagccaccacacccagccagaatattttatttctgttagacacagagcgttcgttgactcgtctgggcgttagtgttaatattctgtacttgaagcaagcccaccaagcggctgaactgggtggataatggaaaatgtcctgtggatttgggagtgagacaaaccggcttgagtctaacctctcagttagtctaaggctccaagcttgaaagggttaaatgaagtactatatttgttttgtttcgttttcgttttgtttgaggctttgctctgttgcccaggctggagtgtagtggcacaatctctgctcactgcaacctccatctcccaggttcaggcgattctcttgcctcagcctccagagtagctgggattacaggtgcccgccaccacacccggctaagttttttttggtatttttagtagacacagggtttcaccatgttggctagactggtctcaaactcctgacctcaagtgatccacctgccttggcctcccaaagtgctgggagtataggtggtgagccaccacgcctggcctaaatgaagtaccacatgaccgaccgaccgacctggggaacatagcaagaccccatctctacaaaaatgtaaaaaataaaaattagccgggtgtagtggtacatgcctgtaatcctagatactcgggaggctaaggcagaaggatcacttgagcccaggagttcgaggctacagtgagctgtgatcgtgccactgcactccatcctgggtggcagagtgaggccctgtctcaaaataaataatccagtcccccccaagaaaggaatgaagtgctataatgagaaaaatcctagtacctaacatatagtagacagtggagagtggttctctttcgtttctcaggggcagacagatggggtgctggagtcctctatcaaagagtcagagctctatcccagatgtgtaatgaacgtggtcacagacatattgtcccattaccatttaccttccctataaccactgtgcctccagccttgtagaatagacacataggagcgcagcaatacgtctaaaaataggagtgagagagggcagggcatgcccgttcttgtggtagaagaaaagaatgtcaaagaaagcagctgggactaatgaactttacattagccatattccattatttcagcttaagtcaaatgtcggtcctcatgaggcaactggctttgacaggagctacgctaattaccacttaccaacctttaatttctgggtaaaagcaaaagagaaaaactaatggatttttcattttccagagagacaagaataaaataatagtagtctgtagaaaaaagaaaacctgcgaacctatgagggatcctctgagtcgtc

SEQ ID NO: 392120 - DNA, 2586 bp, Homo sapiens
  misc_feature (533)..(533): n is a, c, g, or t
tttttttatgtgtttgtttaaagatacatattaagcttgtagaccatagggacatacggagagtccattgctaatatctcactcagtattgtgaaattctatctcaccaccgtgaaactcttcagttttctaattgctttatcagcagggggtataaaaggtcatgaaagcaatttccacatgctgtggctccaggtctctgggtgtgaagcagagcaagcctggtttgtcctcctcctgtctccacacagacggcttctgcaggtttggtaatctacagtacactccttgcagggaaaaggtgatgagtcatcatggacttatttgaccactttttatgcatgcttagaggaaaacagaatactgttaagagattcatctgctagttattaagtaaagaaatatcacaataggccgggcgcagtggctcacacctgtaatcccagcattttgggaggccaaggtgggcggatcacctgaggtcaggagttcgagaccagcctagccaacatggtgaaaccccgtctctactnaaattataaaaaattagccgggtgtagtggtacacgcctgtagtcccagttacttgggaggctgaggcatgagaattgcttgaacccaggaagtggaggtggaggtgagccgaaattgtgccactgtactccagcctgcaacagagtgagacactgtcacacaaaaaagaaagaaatatcacaatatgtcacaataggccgggcgcagtggctcacacctgcagtcccagcactttgggaggccaaggcagatggatcacctgaggtcaggagtttgagaccagcctggccaacgtgacaaaacccagtctactaaaaatacaaaaattagccaggcgtgatggtgggcacctgtaatcccagctactcaggaggctgagacatgagaatcgcttgaacccaggaggtggagattgcactgagctgagatcctgccactgggctccagcctgggtgacagaatgagactctgtctttaaaaaaaaaaaaaaaaaaaaaaatcacaataagtcctagggtaaagatgggggtacagaaaacaattaaatagaacaaaaacaactgtttccttttcctgtgattcaagaagggcttagatcttctactcagcatccttttactaatgccctccattggctctcaccccaacatttccttttttatagcttattttgtaatgcctccttaattatcctttaatagaagccaccgctgataagctacctacactcatacagaagcattaatataatgccccagatgtactgtttcagggcaaaaaggaaaataatttccaacaaagtggtgtgtgtttcactgtcagatgcttgcacttacacacggaatcgctgtgcatccgacagaggctgattggcacatggggcacggggattgtcagctcaaacaccgtcagcagcgttgcccttggaaatgggatttcccagaacagtaaacgtgtctgtccttgatttacagagtagctacattcctaggaaatccagggtacattaaaactcaccatgttacccaggctggtctcaaactccaggcctcaagcaatcctcccacatcagcttcccagaattttgggattacaggcatgagccaccacacccagccagaatattttatttctgttagacacagagcgttcgttgactcgtctgggcgttagtgttaatattctgtacttgaagcaagcccaccaagcggctgaactgggtggataatggaaaatgtcctgtggatttgggagtgagacaaaccggcttgagtctaacctctcagttagtctaaggctccaagcttgaaagggttaaatgaagtactatatttgttttgtttcgttttcgttttgtttgaggctttgtcgtgccactgcactccatcctgggtggcagagtgaggccctgtctcaaaataaataatccagtcccccccaagaaaggaatgaagtgctataatgagaaaaatcctagtacctaacatatagtagacagtggagagtggttctctttcgtttctcaggggcagacagatggggtgctggagtcctctatcaaagagtcagagctctatcccagatgtgtaatgaacgtggtcacagacatattgtcccattaccatttaccttccctataaccactgtgcctccagccttgtagaatagacacataggagcgcagcaatacgtctaaaaataggagtgagagagggcagggcatgcccgttcttgtggtagaagaaaagaatgtcaaagaaagcagctgggactaatgaactttacattagccatattccattatttcagcttaagtcaaatgtcggtcctcatgaggcaactggctttgacaggagctacgctaattaccacttaccaacctttaatttctgggtaaaagcaaaagagaaaaactaatggatttttcattttccagagagacaagaataaaataatagtagtctgtagaaaaaagaaaacctgcatcaattacaagaattattaatgtatctttaataaataaccacattatttagctgtttaatttcctaa

SEQ ID NO: 392121 - DNA, 1640 bp, Homo sapiens
  misc_feature (533)..(533): n is a, c, g, or t
tttttttatgtgtttgtttaaagatacatattaagcttgtagaccatagggacatacggagagtccattgctaatatctcactcagtattgtgaaattctatctcaccaccgtgaaactcttcagttttctaattgctttatcagcagggggtataaaaggtcatgaaagcaatttccacatgctgtggctccaggtctctgggtgtgaagcagagcaagcctggtttgtcctcctcctgtctccacacagacggcttctgcaggtttggtaatctacagtacactccttgcagggaaaaggtgatgagtcatcatggacttatttgaccactttttatgcatgcttagaggaaaacagaatactgttaagagattcatctgctagttattaagtaaagaaatatcacaataggccgggcgcagtggctcacacctgtaatcccagcattttgggaggccaaggtgggcggatcacctgaggtcaggagttcgagaccagcctagccaacatggtgaaaccccgtctctactnaaattataaaaaattagccgggtgtagtggtacacgcctgtagtcccagttacttgggaggctgaggcatgagaattgcttgaacccaggaagtggaggtggaggtgagccgaaattgtgccactgtactccagcctgcaacagagtgagacactgtcacacaaaaaagaaagaaatatcacaatatgtcacaataggccgggcgcagtggctcacacctgcagtcccagcactttgggaggccaaggcagatggatcacctgaggtcaggagtttgagaccagcctggccaacgtgacaaaacccagtctactaaaaatacaaaaattagccaggcgtgatggtgggcacctgtaatcccagctactcaggaggctgagacatgagaatcgcttgaacccaggaggtggagattgcactgagtcgtgccactgcactccatcctgggtggcagagtgaggccctgtctcaaaataaataatccagtcccccccaagaaaggaatgaagtgctataatgagaaaaatcctagtacctaacatatagtagacagtggagagtggttctctttcgtttctcaggggcagacagatggggtgctggagtcctctatcaaagagtcagagctctatcccagatgtgtaatgaacgtggtcacagacatattgtcccattaccatttaccttccctataaccactgtgcctccagccttgtagaatagacacataggagcgcagcaatacgtctaaaaataggagtgagagagggcagggcatgcccgttcttgtggtagaagaaaagaatgtcaaagaaagcagctgggactaatgaactttacattagccatattccattatttcagcttaagtcaaatgtcggtcctcatgaggcaactggctttgacaggagctacgctaattaccacttaccaacctttaatttctgggtaaaagcaaaagagaaaaactaatggatttttcattttccagagagacaagaataaaataatagtagtctgtagaaaaaagaaaacctgcatcaattacaagaattattaatgtatctttaataaataaccacattatttagctgtttaatttcctaa

SEQ ID NO: 392122 - DNA, 317 bp, Homo sapiens
gcaagatcagcccggggattccatccaccccttcccccggaccctccactctggttaattccccctcagctggaagaacccacccccagttcacccgggagagtcccacgtgccctggtcctgcccaggtctcatcctgtggagcattcaacccagatggaagcagccccggttctataacacacagtgcagtcttcccgccctaagacccctgcggtggcacacaggaagcgcagattctgatgtctgctggcacatgttacacataacacataacacataacataggtatgtctgcctcgtagctgatagactct

SEQ ID NO: 392123 - DNA, 384 bp, Homo sapiens
tgggggtgtgaggagggggaggaacacatgtgagatccatgggaagaggcggaatggactgcagcacagggactctgctgcgtggcttctctcttggcagcagagggaaactaagagcctcttacgaactggctcctgcaccttagtgggactgggggacatttaaactacctaaagacctggccatcgccttaatggagtttaggaatccactcagtattctgtggcaggcttcggctgctggctggtccttttcattcttgcctaagaaaattcttgaaatgggagtctcaaaatatctgcaaagtagctacaccaatagaggtaggtagctatttttttttttgagatggggtcttgctctgttgcccaggctggcacgcg

SEQ ID NO: 392124 - DNA, 492 bp, Homo sapiens
gaacaaattccaagctcttccctgcagccttgaaagtgctatagccttggcccctgctcactgctcctacctcaccccagggccctcctctgctgctccagccacactgtccttcctggactgcatctgacacatcaggttcttctctgctcctggctttggcctggcagttcctactacctggcgtgctcctccccagccaccttccctcagccttccggtctcagctgggccctctgcaaaggcctcctgatgctccagcctaggtttgagcaatttttcattgccacagatcccaaaacttctctccagcacttcatcttcccaatttaatgactcggttattcagtatttattctattataatgatctctttcctgtgctagactgtgggctctgtgaagacagggaatgtgtctggcttgtcatctgcatagtccctagcatagtaccccacatggtacctgacatataacatgtgcttgataaata

SEQ ID NO: 392125 - DNA, 517 bp, Homo sapiens
tagcgtgagacagagaaacaggtggagattttgtggattttattctcattcgataatcccatggtaaaccctaaatgatcctctttctagtgacaggaccatctaggactcacagaggatacaatttgtatggaataacctgtcaagataagcagagtatcagatactgacagtccttcattgtgacctcttatgggacgccattacctggcttggttttggcctagtaatttcctggctagatggatggaatttgggtctgttatttcaggggcatatggatagaaccaataatgtaaatttttgtttgcttttcataggcaatttgtggttattaaataattacgtaagatgtaaagtcctcagaagaagtggtgcttaacttgatatatgcatccaaataacttagtggctttttcaaaaaatatatgattgctactcacttctagagattatgactcagttaactcaggatggaagtcagtgtatgtgagtttttaaaatgcttccctgtgaa

SEQ ID NO: 392126 - DNA, 827 bp, Homo sapiens
aaactcattgtatagtcttttatatctttgacaagatcagaataatatattggactcagcatatacatttacatacaaattggttcatgctggacaattctactaaaagtatacacttgaaagcattatatcatataaatgttagttatcattattttataacctgtgtcaaactgagtaaattccttcaacaaatagagaacagaccttcatttattcaattttgttcactcgttcatcaatactggagatttaggaacaaactttttcctgttctcatggaaattactgtctagcatgagagacaagttaatataggtataaaattgtacaatgaaacagagtacagagcacagtaggcatacacagtagagggaacctaacatagtccagggaatcagggaatgtatctctaagaacataagtctctgagtaagctgagacctgaaggatgttctagaacagatactagatccagaggactgagaggtctaggagtcaggcaaggtgatttgggtgtaagggaagagtaggctgcagccattacatatggtatattagatacttcaaacaactctaacctgttctacttctagaaaactcttaagggcacagtgcatccatgtgagatatgcaactgaaaattaggtcactttattacaacaaatgaaaagcaaaatacacaacactaaaataaaatatcaaaaaacaggtatataagtaatatgaccaacagctacaaaataaaggttatattttaacactttgttttatttatttatctttttttttgttgagaatgagctcactctgtcgcctagcctgga

SEQ ID NO: 392127 - DNA, 360 bp, Homo sapiens
aacagaaatcatttatgacacaataggagagatttgaacactgagtggacagttgagacatgaataaattattctttaatttttggtgtaattatggtattttcttatgtttgtgaaatattaatgactagaaatacatactaaaacaattacatataaaatgatatgatgtctgagatatgcttcaagacaatctaagttggaattggagggtgggtggtgtaaaagaaaataagagtggccatgagttcacaaacaatgggggtgcactgttccccctacctttatatgtctttaaaaaattataattaaaagtctttttaaaagccatcgtcccatattaatctgtgatactggaag

SEQ ID NO: 392128 - DNA, 369 bp, Homo sapiens
tgtgtaatcccagactacctcccccttcatgagtttttgttcatagttttctggttagctcctgtattttttcacagctctaaattttggagtttccccgggtttgggcctgacctttcttctttatatccatatttaatccctgtgttctcatctagttccagagctttaacatcctgtattagtgaaggactctaacactgaacctccatcactgacctctcttctgaagtccaggcttatgagtcatcagaattcgtatttgacattttcacttacatatccacttggcatctcactcttaacatgtcaaaacagaaatgattcaccttcctttagcacctgcccactgctcccccaccccacccg

SEQ ID NO: 392129 - DNA, 426 bp, Homo sapiens
aaccaggtctctagcttcatggccctcataccggaacatcagcttcccgctgggtctcaaactgcatggccctcaaactggaacatcttctcccccgcacaggtctccagttgcatgaccttcaaactgttacatcagctacccggccctcaaactggaacatcagctcctgccagatctccagctgcatgaccctcaaattggaacatcagctcctcctggagtattcagctacgcgaccctcaaaccagaacagctcctccccgagtcttcagctgaacgaccctcaagctagaacatcagctcctcctcaagtcttcagttgcaagaccctcaacttagaacatcagctcctccccgagtcttcagctgcaagatcctcaatccagaacatcagctcctctcccggtctgcagctgcaagacc

SEQ ID NO: 392130 - DNA, 280 bp, Homo sapiens
taaggcagggtactcttgtaatggacagaaactgacaaaaagcaaaatatattaagttacataatatattagaagataaatctgttaagaaataaggtaacggctgggcacggtggctcacgcctgtaatcctagcactttgggaggccgaggcaggtggattgcctgagctcaggagttcaagaccagcctgggcaacatagaccttatctctatagaattaaaaaaaaaaaaggaaatcagcagcccagccaaagactaattatttgtaatttctgtg

SEQ ID NO: 392131 - DNA, 474 bp, Homo sapiens
ctgctagtgctgctgcttcaaaaagttgagaggaaggcatgtatcaaaaggtctctcaggacatgttgttctatcctgtttctctgctgtgggatcaggaatggaatttccaggaacctccagttctctgcacccaagggtatataaaaggaaaaaaatcagctgataaggaacacttcctaactcattctatgagaccagtattaccctgataccaaatctagacaaacataccacaaaaaactagaaaccaatatccgttacaaatacagatgcaaaaatcttcaacaaaatactaatggtgctttatgaatgtggcttcaagcctaaacaacttgccttcccaaaccccttttatatggaaatccaattctgccactacattgttctttgtgaataatacctaaaatcatataactcctctgcttaaaaacctacagctcttctttacctaaagaaagaagtctagatagc

SEQ ID NO: 392132 - DNA, 825 bp, Homo sapiens
tgcatcagtctccctttgaggccctccacaattgctgccaccactctttaagtggggttaaatcagagccagtaagtgacaatcataaaaaagcagttagtgggccaccccacggcttgcccgatatggcacattagggctctttcttttcttttcccagcagtcttcggccgcacttcatcctgagcctagcatctgcaggaggccaaggctggtggaccgggggtccgggatttccaaccacctgccaaggaaaaaggaagtcagtgctggaggagggaggaggaggaatctacatattctgcagaccttcttgtttatcatgagcgagggcaggagaatcgttattaatggtatcaggccattgtctttcttatgtgcctccgagggcagcggacataattaaagtccaagctgagttcatttttccccctggtggcttaaatggcctggagtcatttcccatttctcccttcccactagcgccagtcctccctcgctgctgaaaaattcaacattcctataaactacagtacttcgtaaaggtcacgcgccagttaatctgaacctggggtctggcgccagccccgctcacggtggctgcgaggatggccatgcagcccggtcacgtggggcccgcctgtggagaacggagaggggcacgaggcaggcacgcagagctctttaaatattgctgagcatttcctggatcagcatgatatttaaagatttttgttccacctgcctgcgaaatatagagtccagccgagaggcaagaaaatgaatatggatttcttgccctttcagtgtattcactccagaaaa

SEQ ID NO: 392133 - DNA, 867 bp, Homo sapiens
ctagcaaggaggccagtgcagctggagtgtggaaatggaggaagttggaggtagacaaattatgtgaggccacagtaaggttttgggactttattctgaggatgacgagaaaccagttgaggattttcagcagaaatgtgaagtaacccccgccccccggcctggtgttttaaaagaactactctggctgctttgtagagaactgcgtggtttgaaaggagcacccaaggtgagcaaaaagacctgcactttatgctactctcacttaactcactctagggctgtgtgcctcaattctttgcctataaaatggaggtgagagtggccgggcatgttggctcacgcctgtaatcccagcaatttgggaggccgaggcaggcagatcacctgaggtcaggagtttgagaccagcctgaccaatatgatgaaacccccatctccactaaaaatacaaaaattagccgggcgtggtggcatgtgcctgtaatcccagctacttgggcggctgagacaggagagtcgcttgaacccgggaggcggaggtttcagtgagctgagtttgcaccattgcactccagcctgggcaacaagagcgaaactccgtctgaaaaaaaaaaatggaggtgtcccttcccaaagaacttccttcagaatctgcaagaaagatcctgtgccgcctttccggggtcattgtccacgtctatatccacagttcgaccgggtcatggtgaatgggtgcaaaaggccatgttaaaccttgtaaaaaaattctatactttgtcacagagatgaacctcataaaccgaaggagctaaagctttgaagaaatgacaagaggatgtttaaaatgtccaaccaccttggaga

SEQ ID NO: 392134 - DNA, 177 bp, Homo sapiens
ccactgtcttctagaagtgtattagcaagtctcagtctcaagggttagagagccaggaagagtaagttaggacggactctgttacagaactctagaggccagagcattggggctcctttctgtccttccgcctcagttaaacagagacaagtccgaggccttccaggaggaagatgc

SEQ ID NO: 392135 - DNA, 826 bp, Homo sapiens
ggaaaaggaaaggcaaatagctctatctaaccaaaattctattcatgtgagggagcaaaagatgatacaagaggagagtttcttctgacccccaaatcagctttttaatggatgaagctctttttgtccagagttactgaagcttctggatgttgttaggaatttaagttcccagacagattcagtaaaatactatagcagtccagagaaaaccaaataaacttgcagggagagggagggaagggaaattctaagtataaaagataaatctacagctaaggttgaatggctgttacaattaaatttttttaaaactaggagaaactgactaaggatttcaaatggaatagaaactgtcttacactttagggtctaaatgaaaggcatatacatttaaaatgtaaaagaaagaaatatatcatatgactttcttcttctttcttacttttttgagacagggtctcactctgtcacctaggctggaatgcaatggcgccatcatggctcactacagcctcaacctcacaggctcaagtgatcctcccacctcagccaccaccaccaaagagctaggactacagccgcttgccgccacacccagctaattttttttatcttttgtagaaacagggtttcaccatattgcccaggcttgtcttgaactcctgggatcaagcaacctgcccgcctcggcttcccaaagtgccatgattacagtgtgagctactgcacccggcctcatatgattttgaataaggcatttgctttatgctttacaaggtactagtagtaaaaactgtttagagtgatgtacataaagaacagt

SEQ ID NO: 392136 - DNA, 355 bp, Homo sapiens
attaagcgccatgggagacacgtacacaaatgcagcaccttctggaacccagaaggaagcatcacgatcttggcctgagtagggaaaggaatgcttcacggagcagacgacatttggtttgggtctggcttttcattctcttatcagaaaggtgatataaattcctaacgatacagtcacttagtggtttgctagttgtactctgctgctgactggctctgtatgggcatggccatgtttggtagttgttcaggattcctatctcccaagaaatgtggcaatgctaagtaactttcatttatgaccttgtgcagtaccttgagcaattaggggctaaataaacacaacatctgaa

SEQ ID NO: 392137 - DNA, 535 bp, Homo sapiens
ttctgggctgtagtgtgatggacgagcctcctcagtaggtccagttactggcctgcagtctagtctctacatggacttagggatcaggtgtcctaaaaagtcctgtgaggtttagaagatgacagcccagagagacaggcttggactctgagatccttgttcttttccagctgtcggtgtctatgaacagtcctttccaggggctgctgtgggattgttaaccctgtagcatctgacaggcctttgttctcagagttgaaacagaccttagaggaatttagtgtgacctttcttctggtatagggactcccacaacaggcttgtcaggaagccgttcagccttctcttgaacttgagtagaagtgcctagtttgccaccaccatccaaatacctgccccattgttgggcatcttcatggtagtctagcgtgcacatagatgaaagccacacatattatatgcgcgtagcttaagaaaactttttccaagtaagcacacctgtgtaagcagcacacagctccagaaatagagcatt

SEQ ID NO: 392138 - DNA, 662 bp, Homo sapiens
cttgttgaactggcaggcgggtgggtgggggctgcagctttccttaatgtggttgcacaggggtcctctgagaccacctggcgtgaggtggacaccctgggccttcctggaagcctgcagttgggggcctgccctgagtctgctggggagtgggcattctctgccagggacccatgagcaggctgcatggtctagaggttgtgggcagcatggacagtcccccactcagaagtgcaagagttccaaagagcctctggcccaggcccctccgtgggacagccccgccgcccctccccaccagggctttgcagatgtccttgaaagacccaccctagagccctttggagtgctggcccctcctgtgcccgctgcccacagatccaggtgttggaagggcagcgggtaaggttcccaagccagccccaacacccttcccacttggcacccagagggggctgtgggtggaggcctgactccaggcctctcctgcccacaccctctgggctgagttccttctttcccttggacgcccagtgctggccttggaggacggtcagctggaggatggcggtgggggaggctgtctttgtaccactgcagatcccccacttctccacggaagccccatcccaaagctgctgctggccttgctgtaaaatgtg

SEQ ID NO: 392139 - DNA, 729 bp, Homo sapiens
cttgttgaactggcaggcgggtgggtgggggctgcagctttccttaatgtggttgcacaggggtcctctgagaccacctggcgtgaggtggacaccctgggccttcctggaagcctgcagttgggggcctgccctgagtctgctggggagtgggcattctctgccagggacccatgagcaggctgcatggtctagaggttgtgggcagcatggacagtcccccactcagaagtgcaagagttccaaagagcctctggcccaggcccctccgtgggacagccccgccgcccctccccaccagggctttgcagatgtccttgaaagacccaccctagagccctttggagtgctggcccctcctgtgccctctgccctggtggaagtggcagccacaagtcctcctcagggagccccaagggggattttgtgggaccgctgcccacagatccaggtgttggaagggcagcgggtaaggttcccaagccagccccaacacccttcccacttggcacccagagggggctgtgggtggaggcctgactccaggcctctcctgcccacaccctctgggctgagttccttctttcccttggacgcccagtgctggccttggaggacggtcagctggaggatggcggtgggggaggctgtctttgtaccactgcagatcccccacttctccacggaagccccatcccaaagctgctgctggccttgctgtaaaatgtg

SEQ ID NO: 392140 - DNA, 807 bp, Homo sapiens
atccaggaggttcagaagaaatagcacagagtgaggacagcagaggtaaacatgcctgcagaaacctttctcttggcatgcagagcaaatactataatccaggtgtctcagccaatgaggcatttaaacagatacagaaaaatcattaaagaggatttcagaagggtatgctcacctggacagattgcactccatccttccagtgtctcctgaactgctctccaggaatcattttcatcagaatcactggggcatttatgattcaaaaatgctttgaatgtggcagtgcctgaatctacagttttccatgtgatttttagatatactaatgtttgagaaccactgctgtcaacagcataattctgtaagattcaaaatactagttgtaaagagttaatttagctgaaatgcaaattttgatttgacctgctcccaattccagacctctgaaatcagtaatgacaagaacctttgggcattttcaggctcagtcttcagaggcttatcctatagagaagaggaataatttctgtagccacatcccaaagtaggggagatgggccactaggtacacagctgcctttgtgaagaagcagagtaggaaatatctaccctgcaatgattggggcacaggaaagctggaatccaccttattacaacagctggttaatgtcatactgtgaactcattgagcacctgctttgtgagtattcattttctatttttaaattttgcatcaaccttgtgaggtttttggtatgtttatctccattatacagatgaggctgctgaggctaagagaagtca

SEQ ID NO: 392141 - DNA, 363 bp, Homo sapiens
  misc_feature (12)..(12): n is a, c, g, or t
ggtatctttagnatcaataacgagtaaatttaacacacgttcttgaacgacatgctaacagcagtaaaacagaactgtaggtgtggaaggttttcaaatattttaagaggattagttctaggacaataggtataaaatgcttaaatcaaactaccttaaccactgggcgaccaggtctttactatggacagtgctcagaaatttgtgaatctaaccagttttatacctattgtcctagaactaatcctcttaaaatatttcaaaacctgatccacatctacactaaaatatcactgtaaagctattcagcatttaccttttaagttaaagattgacggagtctacacctctctgcagtgaatg

SEQ ID NO: 392142 - DNA, 400 bp, Homo sapiens
tcccagatcacagctctcaccacaaaatacttctgccatcctccaatggctcaatctcccccacctataccaacaggagatttggacagacaccctctaaaatgacccttcaagcatgctatgggaagccatgtgggcaaatgagaagaacaagcattagaatcaaacaaaccaggttcaaatcctagctccaatctaccaaatatcaaattaggtcacttcagacaagttatgtaacccacttgggtcacatttcatcatcaatgaagtggtcccaccatcacccacttgataaggctgctgtgaagatgatgtagagtaattaaagtgcctcaaaccctgcctggtgctgagcagaagctcagaagtgttggctcttgttccctccatggcacagcaa

SEQ ID NO: 392143 - DNA, 395 bp, Homo sapiens
tagatgatctaaaatgcaatcagctatcaaatatcaatgacattttatcacagaaatagaacaagcaatcctaaaattcgtatgggaggacaaaaactcccaaatagccaaagcaagtgtttagccaaattcacattagacctcaatctctgcttatgtgtccgagtctctgagtctaaaggaaggtcaaggaggaaactcagatggaatgcgttccccttcctatcctccaaacatggattaaattagaacagagaaagcagggagactggccccagcatctctagctggaactaaggccgtggcaggttatacaccacgcacaagaaacaccagccaagcaccacgactgacaagctgggtgccactgccacctttgtttcctgcctgtgtct

SEQ ID NO: 392144 - DNA, 147 bp, Homo sapiens
gttgctgtcttatttctcccttcctttagaatcccttctttttcaaaacactagaaacctcccattatggtaagtaacctttagcatgaaaactgttgcaacgaagtgttaacatttcacagattaattggcatataagaaaactag

SEQ ID NO: 392145 - DNA, 226 bp, Homo sapiens
gtgctgttttgcaccatgtcctgcatgcacaaattcacaaaagagcttttctattttctggcaatagcctcagtctttccactcttctgatgctaagggctgagttaagggattatgtaaacatgtacaggtgacatcaagggagacaaagagttcatgaactagaatcctactgcaggaggcctcacggagtctacagcaagagtcagtgacggattcaaagaag

SEQ ID NO: 392146 - DNA, 470 bp, Homo sapiens
tagcaggatcctgatcagagcatacccctaacaaaagagccagcctgtcctgtgaaggctttcaagccaggcattgacttctcctctctaatcttagctggcatcttccagtagaaggcttttgtctacattgaaaatgtgttgcttggtgtatctaccctcatcaactattttagccagatcttctgggtaacttcctacagctcctccatcagcacttgctgcttcacctggctcttttatgttatgcagatggcttcttcactgaaacctcatgaaccaacctcggctagtttcaagctttccctatacttaaaagagatgtgtgtgcaacatttttctccgtccttttagccccccacttcctgttcccctcaccctgagtgatattacagctcctaatcagaactctcctctaagaaaaactgcaagacgtcaagccactaagcctgtttacatttgctaatggg

SEQ ID NO: 392147 - DNA, 282 bp, Homo sapiens
ggctgtaagtttatttaatgcaaaataatcctctccaactttactgaggtggctgaccacctccacaaccaaatctgcctctaaactggaattccgtctctgacccagccccagcctcagcctcagccttcctgtcggcatcagggggcacagcaatctgcctgtaggtatctctgtcggcttcccctcttgtgagtcttgcaggtcgctcacccttcagacctttaggctgaggcctgccagtctcagaatggctgcggcgtagggtggcaggcacaatct

SEQ ID NO: 392148 - DNA, 529 bp, Homo sapiens
tggcctggaaattctctttcttgagtttattaatgccttaatttcttagtgctaagtgtatgtgttttcagcatgtatcatgttaaacgtgctgtgattttatgttctatttcttccatcatttcgtattttgattaagtcctgtagattctattgctgaaaattcatttgaatccatttccttttttcaatttcctctgatattaaaccttagttgaaactctcatgaccactcttctgggatatttttgaaggtcacagatgagaaagtctacttgcttttatcatagtgaagatacagatacttagctttatggaattgacattaataaactgtgaaaataatgttcactttaaagaaaagatgtaattgtgtctaaattgaacctgaacttatctaagctgtcattgaggtggcagaagttgctctattctttcttggctgtgaatataaaagtaatgacatttatttagtaaatatgggctcatttctctgaagtgcactgcgatttggacacatcttctctga

SEQ ID NO: 392149 - DNA, 408 bp, Homo sapiens
cccccgcccccaactcaaagcaactcaacgacgagaagcacctctggaactgaggcaggagccctgccgtctggatggagaatgccacacagcatgtacacaggcaggcatcagctgttcaatcactcctgccgacctggcccctatttttacagcatgaggtgggaacacagaaaatgtcactatttagaaatcccatctccagccacatggtagctcattttgggaggctgaggcgggcagatcacaaggtcaagagatcgagactatcctggccaacatggtgaaaccccgtctctactaaaaatacaaaaaattagctgagcgtgatggcatgcgcctgtagtcctagctactcaggaggctgaggtgggagaatggcttgaacccaggaggtggaggttgcag

SEQ ID NO: 392150 - DNA, 536 bp, Homo sapiens
tctcaaaatttaaaaaaattaataaatctttaaaaatcagccaggtgtggtggtgcacacctgtggttccagctacttaggaggctgaggtgggaggattgcttgagcccaggaggttgaggctgcagtgagccatgattgtgccactgcactccagcctgggcaacagagcaagaccatgcctaaaaataaataaaaaataatttaaaaaattgagaaagatgggaggagggtgattgcatcttgattttctctaaactttaattgaaattgagcttttccttccatggcgaatgttgctaggaacaaacctcattagtgttagcagcacctgttactttgttaccaacagaaatcacagatattttcatattacactgcagctgttgcagacatctcgggatagcatttttgctcatcattacctcaaaattatagtaattagacctaactttggatcttgttatttaatgtgccaataaagcatatcatgtaatatcacaaatattttcataaactttattttgatataattt

SEQ ID NO: 392151 - DNA, 291 bp, Homo sapiens
gtcactgcttttgaaaataggccactgagaataatcataagggaagttaccttgaataggaaaccaaattcttaatagcattagcaatagtaatcttgccaattcagatctatgcttttcactgtctaaacaagctcatgcttcttccagtgtctgttaaaattgtgagttataattcagggatgatggtaaactacatgataaagctgtctgtttgctttgaaagtattaagagtatttttctttgcaaaatggttgatacaggaactggtttcaagaagcaggaactgg

SEQ ID NO: 392152 - DNA, 372 bp, Homo sapiens
tagtcatacatatctgtagtcccagctactcgggagactgagtcaggagaatggctcgagcctgggaggtcatagctgcagtaaaagatgactgtgcaacagcactctagcatgaacaacatagagagacccccgtatcaaagaataataataataaataaaagtatttagacccaggggagtataaaacaccaaactaagaattattatttctccttctagaattgaatataagagaatattaaatcatagagacaaacagtagaatggtggtgacagtgatgggagaaggacaaatggggaattactgtttaacaggtaaaagagtatcagatttgcaagatgaaaataattatgagatgtttgcacacc

SEQ ID NO: 392153 - DNA, 521 bp, Homo sapiens
ggaaagggaggaggagaatgagggatggtagaagcctgctcggtcaatctgaaccccctctcttcgccagtcccctgctgcgggcagcaggcaattcagacctgagtgcaacagctaattaaatcaatatgagataatgaacggcaattagaggtccggctaggcacatcttctcttgtaaatactgtttctctcccaacggggagctcttttttaataatctgtttgtgtttcatttccaggagccgtaattcccccaagaagcactttgggaaagtgatttgtttgtctgtataatcgtcaaagcattccgttagacttgtttgttttgctgagtgcctgctactactggagggaaacaatttttcttctctcttttattttttttttaaacgtctgcttccttcctaaacatcctaatgttcgaccagtccagggccatgcatttcagaggtgtaatgagctgcactctgcccctagctccctcgttgacattctgggggatgaacaaatctaaaatc

SEQ ID NO: 392154 - DNA, 397 bp, Homo sapiens
ctagtcaatattaataaacattaccgaatgcttttacaacacaatttattttttaatacagctctttatgtatgccataaagtaaatataccaataaaagccaaggatttcaaacaacagattaagaaaaacaaccaagaactaactgagtgctagttaacaccttccatgctgcaggttttgggagcacacagcaggtgcctctctgctggggatccagaccaggagagttagggaagacagtggccatttggttgttttggaaccgtttaaagggagagagagaaaataccaaaccagctgtgttttcttaagaatcacctttaaaacagtggtatattgaccatgtatatatgtgtacatatatatacatcgggctgagtgcaggggacctggc

SEQ ID NO: 392155 - DNA, 745 bp, Homo sapiens
atgctatgtatacctgcatgtaaacaccacactgtaccctataaatatgtacaatgattatgtgtcaattataaataaaaaaatatcagcccttggataaaacaaaaacaaaaaagaagaaggatacagaggttgctttttgaattagaatgtctgaaacaagatctgggtggtaggaagaaaccaaaagttgtttgggtctccctctgttgcaaggttggagtacagtggtgcagttgtagcttactgcagcctcacactcctgggctcaagtgatcctcccatcttagcctcctgagtagctggaactacagataggtgccaccatgcctggctaattttaaaaaattgtttgtagagagggatcttgctttgttgcccaggctggtctcaaactcctgacctcaagtgaccctcctgccttagcctcccaaagcactgggattataggcatgagtcactgtgtctggcctgaaccaacatttgtattgtgtggacgtgtgcacgtgcatacacacacacacacacaccctgcagagatatcagcctatgagtaaatagtggcccatgatattgcatatgttctttgacctatcattcaacaagaaggtttatgaatttagaactggtagtcaactgtggacttgttgattgcctttgttttcacagctatcctatgcactcacttgagagcattttctgtgatgaattcaagcactagcccattagtgagcatttaccttaa

SEQ ID NO: 392156 - DNA, 399 bp, Homo sapiens
tgtctatgaatattattatgtccctctgtgaaatacaattaatttagctattaattcatcaactaaaaagcacgtgactacctctaatatctagtaaaggtaaatcatttcctagcttgggagtagacttccaattctaaaatgagagacaaaaaccacccagaaaggtaaatcttcccacacggtcagctcagtcttcaaggttaattatgtccgaacaataaagatttaacaaccctagagacaagctgactgtaacaggtgagtaatctcccagctcagactggctcagtggatcctttagtttcattgaagaaagcaattagctttcagtgtgctaggaagtgggaaacagtttcacagattagtagagctgagggctctgtctgctggtgaagt

SEQ ID NO: 392157 - DNA, 561 bp, Homo sapiens
cagctacctccagcagcaacctgcctttgttgggcgccagggctcaagctggggagcctggccaggtggctgcccacacctgtgttcaaggcccatttcggtccagcccagcagaggcacagagcagatcagagcccctgctgcctgcctggggacttcaggggagcccatcctgaggcctcatgtcctcacctgtgaaatggccaggtgtaaccaggagcctttaagcactccatgactctgtgcagagtttcatgcacatcattcatttgttaattcagtcattcaacaaacatttattgggcacctactgtgtgccaagtactgtcttgtctctgagagtacaaaggtgataaatcagataaaccatcccttcccttcttggtgttggggagtcaagcaatatatgactaacgcaatgcatgcatgataggtcatggggatgacatgttctgtgaaggagagtagggcagaggaaggagatgggcgcaaggaggggtaagcggttggttgtattttattttaatggacacatgtcacctattagaaaacacctgtagg

SEQ ID NO: 392158 - DNA, 235 bp, Homo sapiens
ggctgattgcgtctcatctaatatgctgagtgaaagaagctagagaaaaaaagagacatacgtatcattcccattacatagaactctaaaaacgtaaactaatctatagtgacggaaagagatgatgaagacttttactggagagtaggagtggaaagggacagttttaagtcatttgctgttagaatttgagctatgaagaaaggaagaagttataaaaatttcaagattttaa

SEQ ID NO: 392159 - DNA, 285 bp, Homo sapiens
ggacagctgcctcaagtattcattcatcaaataattattaagcacctactgagttccagacaggacaggaagttcctgcatgctgttgctgtctggtggggggaagtaaaaggagtcagctcttgtgtcctatctggggaaagcagaccgttacacaggtcataacacgattatttaatcatagtcttgggaaagcatcgggatgctgagagcataaatggcagaagagactcagtctagggtggtcaaggcgtccctgaagaaatgatgtttcagctgagacgg

SEQ ID NO: 392160 - DNA, 151 bp, Homo sapiens
agagaatcatagagaaagatgtgggaatatcttcattttgccgagaaagaggtggcatctgtatctatagcctctcctgtcttagagggaagtaagtgaggagtagtcaaatgagacatgatgaaatgagcatcaggattctgtaatacag

SEQ ID NO: 392161 - DNA, 623 bp, Homo sapiens
cgggtggccaggtggactgaagtaacaggtttccccccaggtttctcagagactaaggaatacacacacacacacacacacacacacacacataggcagacctgcaaattatcggtccaaaaatatttatatcactaagccagagcagtggatttagacatttgacttaacaaaatttgtttttcaacacgttctagcaactaccctgtaaatgatcgtcatttcacctacaacaatgaaaagataaagtcctcagccgcatagcttctagaggctaaagaggcacgttaagttgcttgtcaaagactccacaccttcagatgccagggtcaacacaagttttcaaaccctagacccaatcccttctaggccacagaaggtctgcctcttgtaaggaaggaattttccaatgcactaagcacagctaatcacactaaggaaagaaaccaagcagccaaactaatatgaggaagtgaaagtttatacttgcatcttatagcagatggcctttgttagagccacttttaaaatatcaacttcaccgagcatgatttaggtacaaaaaccggcatccaattaaagcctccaatttgatgagtttagacagatgtatatacccatga

SEQ ID NO: 392162 - DNA, 232 bp, Homo sapiens
ctgtccaccggtaatttacgctaaacgttgcgatgaaacaccattcagcagtaaaaaggggcacactttttgtgtgtatctaacacaccacaatattaatgaatcttaaaagcataaagccaattgaaagaagtcagatacaaaagagtatgttctatatgattcaatttatgtgaagttctaaaacatgcaaaacttataatggtgaaaaccagctcaggccacctggggt

SEQ ID NO: 392163 - DNA, 422 bp, Homo sapiens
aaaccaggctgacctgtttctgccattatccagcaagctgctccttggcttggggaaggaaagctggctcgctgccccctgcactttttccttaccccacccaccttgcagtgtgacttcttccacttcatcctgtccccgctttcctcctccagtggaaacctgtaagtgcttcagtgctcacctctgaggcccacactgagaatcctcagggtggaggacggaccttctccactccccaacccttgtggttcctgcagacctgtccagctgtgtatggggtggaactgtctgagtcacatctgagcagcaagtttgtctaggcgtgaccagcagccaactcagtccatctccatcctgccacttgccagggacaacctgcagaggtatctttacctggggacaaatccctgttccttggc

SEQ ID NO: 392164 - DNA, 672 bp, Homo sapiens
agcaattagattttgtaggtgccacagttggaaacatgaaactccaaggatgatggtgagacagagcagttgttgtagaagaaaaaactcaggaaggactgagtgtctaatgtgttctctcaaaggcctgttgctgaaggagggtggcagcaaatgaagtcggagaggggaagagggatacagtgttcaagacaagatttcaaaggagaagcaagttgatgatggagagttgcaaaaggccacgtccagatggctggcactctgccacgtgccgtggctttgatgctttacaggtgttctctaaggcgtcgaaggcggaagctccagggacctgctgtctgtcattgaaacagccagaggactcaggacccagagaaagagcaaactccctctcctttcattcccttccgctcttgtaggaatgtgggaactttcacagttttgctgttttcaagaaaacggcaccttgacaacatgacctttgagacctacaagctgagggagctgtagggagaaggatgatctgagatgggcaacaaaaaccttccaagaggaggcaatgggtgaggacccttcatgttgccaataggagcgatctgggaatattttgaaatggacttttaaaaaagctgagtctgttttttggaggttctttgtcaaatacacaagaga

SEQ ID NO: 392165 - DNA, 793 bp, Homo sapiens
catggcacttagtaggcctgagcacatttgctcccacctcagtgacctccttgttaacacgacatctcctgactttggggctgcagagtgatgcagagcactggccagtgttgccatgcacccagggctgggcgagacctgtcttgcaggtgttcaaacaacttttgtcagcctcagtgtcagggacttttgttgcgtagagcagtcaccgaatcctatggtgagaagagaaatcgttggagatgggggtgcaggggtggaagctcttatttcagaagacctgttgtgaggtaagactcagaccctcagcttctatccggccacagagtttgggaccagcctttcgatgtcttttggaagatgcacatggaatgcttagcctttgctcttccctggaacctggcttaggctttgcacctatcccaccatgtggttggggtgagtgaggacaacttcttttcctccagaacatggtttctccatctcagccctattgacattttgggctggataactcgctgttttgggaggctgtcctgtgtgccccgtaggatgtcctgcagcctcccgtgcctctgcctgctaggagccagtagcgccccctcccccacagacaaaaatgtctccagatattggcagatgcttcctaaagggcaaactacccttgctgtaggtaatacttgctttgaagtactggtgtggatggcctatgccctggcagtcttactaggtgggactggctgtcctctcattctcatgggattggcctcatgctggtagctgacttcctccc

SEQ ID NO: 392166 - DNA, 376 bp, Homo sapiens
gaaagtccacatggccaccaagtgcccaggggtgtgcctaggcatggagtggggtaaacctttgctccgagttctatgcatggtagtggggagtggcctaaactaatccaagagagtgggcactctggatgactggagacctgcgtgggcgtggagtgtggagactgcactagatctctgcatagaaagggtgggacatctcaggataagaagtgctccaaatgcctgaagatatgcctgggggtggagtggagagggccctattacaccaaggtctctgctcaggaaaggaggactcaggctgttaatccaggtgagtggatgctatgaaattactggagatatgcctgggggtgagcaaagagggccccctgca

SEQ ID NO: 392167 - DNA, 339 bp, Homo sapiens
gatcgctcttgtgtttttgcactattaattaacttcaagtgcaattttggcaggcaggccaagggtctcaacaggctatttggaatgagttctcttttaaggccttcaacgtagtgagacattttcaaatcaaaaagtacagcaggagccagcctttattttgtctgtgtacacaataaaatattccgcttctataggcagatcagctggtcttagtcacaaataaattgtgcatattattactgtgcttaataggcaaaaccctaaactatagaaatttttgctattcccactgctttcttatgcactagaaaaaggcatgaatttgatgtctttttt

SEQ ID NO: 392168 - DNA, 264 bp, Homo sapiens
tgggaaattgaggctgcagtgagtggtgttcatgccactgcactccagcctgggcaacagagcaagaccatgtctcaaaaaaaaaaaaaagtgttatatgggctgagggcctgggacctaggaaagctgagtgctggccctggggtgctgttctttcttgcctgaagggatgtccaccctcaggtctcacctccttctctgctagtgtaggggtagcccccagagtttctctcaactgtcttctctgatcactttgagatcttc

SEQ ID NO: 392169 - DNA, 486 bp, Homo sapiens
atctcaacatgacaccaccaataacatgtaaatgacacaggctttgattgtgttgtctcccatatgctttaaaatttttttaatataattcctctgatagtatttaggatttaaacaaggactagggtgaagcaaaaattatttctagacactaaacttataaccatactcattaggatcctggcctctatggcacttcccacactgtgctacaaagaaccacgaatatttccaggtgctcgttccaagagaaaaaaatgaacacatcaattcactccatatcaaatctctactgtaaagacctaattttccacattcgatgattttaaaatcagtatgtgttctacaaaacatgttaatatggtaggggagttttcttccttcaaaggtaatttcttattaaattaggagtggaccttttaatatatatgaatgtaggtatgtatacatatatacataccctataagatatatctccctgtaaca

SEQ ID NO: 392170 - DNA, 478 bp, Homo sapiens
ataagttatacatgtttacatatcacattagccattgaatactaagttgtttcatgtaaagaccagtggtcactatacacagagcgaaagatttcatttataggtttttatatggtccttcttgtagtgcccaccttgtaccttattttcctggattaaaaaacatacatatcacattattcttttctctgttcctgtttagagaccctgttgtattttcattttttccccctctctgggatttgctgctggcactcaagttcctgaaagaagcattctctcatagtctcaaaagagtcagaaagaacctcatttttcaggtgtagaaactgaggcccaaaaaggtcaagcagctggtcacggctagttaatagcagccagcgtctcttgcctttttcgtccgcttgctgctttctggtttttatcttcttacccatgtgagttccagcaccacctgctccccccaccaccaaaaaaa

SEQ ID NO: 392171 - DNA, 356 bp, Homo sapiens
taaaaaagaacctgacaaaattcaacaaccttgaataatacaataaaataactcaataaactaaggatagagggtaactaccctaacataataaaagccatatatgaaaaattcacagctcacgtcatattcaatggtgaaagactgaaagctctgtctccaatatcagaaacaagacaattatgcccacttttgccatttctattcaacacagtcctggaagcttaagccagcactattaggcaagaaaaatcagtaaaaggctacacactgaaagaaagaggtaaaattatctccgtctgcagacataatcttaagtgtagaatgctttaaagatttcaccaattattattttt

SEQ ID NO: 392172 - DNA, 1063 bp, Homo sapiens
ggattcatttatttgagcacaggacagaggaagttgccctgaagcaactgattgtcattgatattcagggctcgctgtcaaccaggaccttccaggaactggctctgggccaagagcagtagaaatcactgggtggtccgcacagctcgcgggcatctaacctgcttcaaggctcagggctaaaagggagccagggcccttcctggaggcgggaacccaagtgggaggcagagcgcctgggcccgctcctcgatctgctgagtgacgaccctgtacaagtcatttctcttccgagagcttcagtttcctcacgtgccaagcggacgggttggaagttggtctttgccagctctgacaccttgtaagttttgagtcttgctgggaatccagggcggggctcacgaggaaaatcttggaaggggatttcatggctggatctcttccactcaagctcagtgccctaatttgacgccttaatagtagacgcaggcttttccattttccaggagccccctgacgcggccgcttcctcctacgtctccttcctcttcctctagcaggggcaaagtctccacatctccctctttctcttcctcctttgcaagctccctgcattcccgcgtctcctcctcttcctcccaggaaatgcaatgccctcagtgcgcccaccttttggcaaagccactgccggctgcgggtttcccctcccccgccaggcgagctctgcgcggcggcttcgcgggcacacgccttcccataccttacatggacaaatgcgtgcaggcaaagtcaggaattcaggcccctgacgtcagcctccagcgctcagggcaccgcacgggagaccaaggggagggggtggggacggtggggaggaaggagggggaaaggcaccaaccagcagccgctccagccctgccgaagtttcactttttgtctgtgggttcgttcccgggtcccgcgcgagctttcccgggataagtagctttagcgatcgggagacagccgggcgctgcaaggtaagggctggctgcacggcccggggcgcggggcgtggggcgct

SEQ ID NO: 392173 - DNA, 304 bp, Homo sapiens
aaacttgagctctctctgtggggggcaggggatagtcctgttttgcaaacctcccttagtgtgagatctcccctaaatagtggcattcctggaccctgtcatttatttactatattccaaaataagacaaccatttatctggaggcaatctccaacttaatcacttataatatctctggactggctcttttccctgactccagactagagcattcagccacctttcttgtcatccctgcttggaagtttactttgaacatgccaaagctaaaatgtcctgtcttcccccacagagaaacctgct

SEQ ID NO: 392174 - DNA, 786 bp, Homo sapiens
gaagtctgacattttggtgtgctctaggcatagggtgtctacctgaagagtccccagtaaaaatcttgggcactgaggctctgaggctcttcccttgcaaacagcacttcatgtgtgctggcaggatgtgtagctggggaagcaagtgcattctgtgtgactttcctgggtgggggcttgcatctgggttcctctggacttcacccccatgcaccttttccctctgctatttgtgcttcatatccttttgctgaaataaatcatagccatgagcatgactgtacgctgtgtcctgtgagtcctcctagtgactcactgggggtggtcttggtgacccctcacataccttccaaagctgttctgcctcttgaattttcctgcctcctcaggtctttctcttcaccccagtacaacccagtatccaaagtcagcaactcagaattgtctttgattcttcccttgactcaggtaccaacatcctattgattttgtctcagaagtgtcctcttgggcccaggcccctggtggcctttcctgttggcccagtctgggccctcagcacctcatcttcacactccctgcaatagcttctctgtctggtgtttctgcctccgttctccattccagcccgtctttgatgtaaccattgtttagtccaaaacctaggttgagttgacattgcccatgaaatagaatacagatgcatcgggtcggcggcttcatctggccacggtgcaggaaggcagggagaacccggatttgagtggtcagctccaccagtcactg

SEQ ID NO: 392175 - DNA, 615 bp, Homo sapiens
aaaaagatattaagttatagttgcagattacgttaaactaagtgaggtttcaagatataacatatacaggatagtgttagagcttttaagatagttttgggaagactgggagagaggattgaggtcactctgacagtcaattgtgaaagttactgacatacaaaattgtatgtaacagtcttaaatcaatacaggtttgatagactcatattttctttgtgcagagatggtgtaattcctaggctcatacctggattgtaccactcatggttttcaggatctgccagatagttcgatttgttttcctgttaagaattagaattaggccaagtatggtggctcacacctgtaatcctagcaatttgggaggctgaggtgggtggatcctttgagcctaggagtttgagaccagcctgggcaacacgctgtagaaaccccatctctataaaataaaaaaacaaaaactagctgggtgtggtggcacatgcctgtagtcccagctacttgggaggctcagatgggaagatcacttgagcccgcggaggtcaaggctgcagtgagctatgattgtgtcattgcactccagcctgggggatagaacaagaccctgtctcc

SEQ ID NO: 392176 - DNA, 203 bp, Homo sapiens
ggaaaggggcagtgagggcagacagagctgtgtctactacatgccaaggccagtgcatcccccaactctatggcatttctcccatcgagacacgaggtctttgtcccttcctctgcaatccaggctgacctagtgactcatttgagaacaagagaatgcagtggaaatgatggtgtgcgactccagagctgggttagaaaagg

SEQ ID NO: 392177 - DNA, 929 bp, Homo sapiens
acggagtctcgctctgtcgcccaggctggagtgcagtggcgggatctcggctcactgcaagctccgcctcccgggttcacgccattctcctgcctcagcctcccaagtagctgggactacaggcgcccgccactacgcccggctaattttttgtatttttagtagagacggggtttcaccgttttagccgggatggtcgcgatctcctgacctcgtgatccgcccgcctcggcctcccaaagtgctgggattacaggcgtgagccaccgcgcccggccgaaagcccctcttatgctcagtcacccagaggaagggtaggcattgatgggcagttcaggtaggaactggtcttgagataggttaagatgtgatagtgagaggagggccctgccaatgtataggaaggagaaaactaacttcctgatttgcacctcccagtctgtaggccactggcctccaatttttggcaaattggagatcttccccattcatagagatattcgtaaatccatcctgcacatcttcgctccagccaaccactagcccctgtacacacagttgctctgtattccccacccttttggcagctacatttcagagtgatgactggagctaggcctactcttaacattgtcattatttttcacaagcaagtcagcccaggtcaccagcttcttaaaaatgtatgcttgtcattgctaggaacagtcctcatgtgatttttcagtctgtccctctgccttcagggaggttatgtaaactccagtctagcacagctgccttcatatcatgactggctataaatggacttccatagtaagttgtgtctttatattcagatacactaaatttatgaatgtcatctctgctgttttacttcagcttgtcattcttaacattttcttgattcaggtgttttcccactatac

SEQ ID NO: 392178 - DNA, 535 bp, Homo sapiens
gcgaagtccctgctagactaacttatctcgtaatgtgctttctatagaaaagcacattttcagtaactaaatcagaaatgttgctttgcatgaaattgacaatttcttaatccaccctgatagcccagtcttcgggcctggaaggtactgtggccttgaatattcatcccttgcaatgaaaacattgctaaccagcatgcttaggttatggtttaggctttaacatggcttatgtcataaccataaaaagacttgaagaaaaggaataaacaggatcacaggtggttcccatatggcctgtggctcaattgattgttcccacggtatctggtaaggcagtaatcggagatttaggagcacatgttagacttcagggacatttctttgccttctaaaatggctgctttcaaaatcaccctcaggtttagtactaccccaagcaactagaatccagataaaaggacccttctatgaaatgattcttcatttgttttgtagggcatccatatttcacaggactaatcacaatgtggat

SEQ ID NO: 392179 - DNA, 113 bp, Homo sapiens
cttagcctcttagagtgctaggattataggtgtgaaccaccatgatggaccataattttttaatggacaacaaaccagtgaagaaaaattttgaaagaaatatcatccataat

SEQ ID NO: 392180 - DNA, 425 bp, Homo sapiens
ccttcttccctggatgtgggtgaagagaaaaaagaggagagctatgttattctctgctccactccatctcttctgacaatacgatgaagatatgttaaacaatctattaagttagtttataactggcttaacgtgaccttgttaactatctcaaagctatacagttttgtacgactcattgagttgtctgtgtatacattattttgtatagtcacaaaaacaaatttaggacttttcccaagtttattcatatgctggtcttgaactcctgagtttaggtaatccgtccatctcggcatcctaaagtgctacgattataggcatgagccaccacacctggtgtctggggtctttttaataagggcactaatcctgttcacaagggtgtcaccctcatgacctcatcacctctcagaggttccacc

SEQ ID NO: 392181 - DNA, 331 bp, Homo sapiens
cagacttgtaaatgaatgtttgtaggactttctttgtaatagacaaaatagtcaaaaactggaagcaatccacgcagccatcaaccggtaaatagatagaacagacggtggcatatccatgcagtggagtactactgggtgaaaaaaagaacagtgatacacactacagcatagagaaatctcaaaataattacgcagagtgaaagaagccagatgaaaaagaggaattaccatacagtcccatttgtatatatctcgggagaatgcagactaagctgcagtggcagaaagcaggtcagttattgcctagtggggacagaacgagatgtaa

SEQ ID NO: 392182 - DNA, 344 bp, Homo sapiens
ttttattttttaaaagaggaagaaatatcaatgaactgtttggtctaggaacaaactttttatcaggctcttaccggaaatgacgggtgggtcatgctcagttggaacctcagtccctcctaccctgaggcaaaacctctcaaggcacctgttctagcccctgcagggtgcctggccctcaatgattggtggaaggatagagggacaggaggtccaccctgtccaacagcttcattttgcagctaggcaaactgagttccagagaaaggaatcacggtcccatgtttggaaatggtcaaaatggggcttaaaccccagaaagtagtgctacttccactgtgctg

SEQ ID NO: 392183 - DNA, 241 bp, Homo sapiens
actgtggagcatggaaagaccattggccttggagtcacaccctcctgggccacactcacttgccacaggcccttaagaggtgctgcctcctctccaagcctctgtggttactgagcaaagtgctgtgcactgcagtgtatcttcccgtttaatcctcgcaacagccctatggtatagctaccatcattatgattcccattttgcagatgagaaaactgaagggtaaagaggtgaagaaatt

SEQ ID NO: 392184 - DNA, 406 bp, Homo sapiens
acatcagtctcttgatcaaaatctttcgtggcgtcctgttgcttactactgagctgtgtgaagaggtgacctagctgccccagtctctcattgttgcctccgggcgtgggcctgtgtgttgctgtccttgttcctgagtgggtcctgggctttcctctctcagtgcttttctttcttttttagggggatcggggagacagaatctcactctgtcacccacccaggctggagtacagtgacgtgatctccgttcactgcaaactctgcctcacgggcttaagcagccctcctgccttagcctcttgagtagctgggaccacagaaatgcgccaccacgccctgctaatttttgtatttttagtagagacatggtttcaccatgttgcccaggctagtcttgaactcc

SEQ ID NO: 392185 - DNA, 422 bp, Homo sapiens
ggggcaacacagtctcctgcctaagcactgtgggggggtgtgagccccgtgagatccctgctctgtccatctccaggctgtggttggcctcagcagcctctgcatcccttctgctttgcctagagggagactgcagggaaaaagagggaaagaggaagtgggaaagaagtccagaccatgttagatttccaggtgcgtgggcttgtgttcacaatggggaccctggctctttcattcacagcctctgaaggcctgacatatattcaccacatggctatgggatccacctagaaaggggaagtcaggtgatgtcttagaaaggggaggcactgagaagaaaggtgagacagctggagcaggtcagagcacttaggcactgcctttctggacatgtggccagggatcgaccaggacccttgtga

SEQ ID NO: 392186 - DNA, 156 bp, Homo sapiens
tggagcaggggctggaaagcaagtttgagatgagatcatgaaagatcattcattcaaatacaaaaaaatctgaacctggtctgtggatactgttgtgaaaaagaaatcgagtaagatttgtttagaattacacaacaggaagataataatctccag

SEQ ID NO: 392187 - DNA, 441 bp, Homo sapiens
aaccacagagagagagagtcaggcagggggaagagacagacagaggaaaagaaagagagagagagagacagaggcagagacaaagaaaggagcagagagagaaacaaaaggagagagagggagagaaagacacaaaagaaaaacaaaaagagaagcacacagagaccaaagaagaaacaaagacacgaaaacaggaggagaaatggagagagtgggagaaaatgcagaatataagagacagcccaggtggcagaggcccaaagttcctgggaaaggcagtgctgttctagaccaaactctgaccaggctggtgagtgggtgggaggccagttggacctgggactaaacacaggcaggcccactgcaccccacagccacgctatgtcacttcctctcctccgggccctgcagactccatgccagggcaggctcatgagataa

SEQ ID NO: 392188 - DNA, 420 bp, Homo sapiens
ggggaggaaggtatagataaagtaagagtcagtctggggctttgtcaaggcaaataaatgttaggttattgctggcttgacataattttcttctggagatcatgtcttaaaagtagactgctgtaagccattttctttaatgaccatgtcctatattctggatacatgtgtatgcttgtcttttgctagttagttactagtggaaactagtgaataggtaaaagcaacatgaaatatagcacggttttttgttagacacaaagaaatagagcaaaaaagtggaaacattgaaaattacttaaaacttactgtttttttgttggcagtattatagtcttttttcttattaattttattttctgtgttttataaattttctactgtagtcttctctaattcctccatttctagagtgacaat

SEQ ID NO: 392189 - DNA, 673 bp, Homo sapiens
tgagccacctcgcccagcctgttctatgtgtttttaatacttaggaagtgttgatacatataattttctggccttaacagagatggttagtagctattcataggtctgactgtaaattaaataatttttatttatttatttactcttttgagatagttttgctcttgttgcccaggctggagtgcagtggcacaatctcggcttactgcagcctccacctcctgggttcaagcgattctcctacttcagcctctcaagtagctggaattaacaggcatgtgccaccacacctggctaatttttgtattttagtagagactgggtttgaactcctgaccacaggtgatccgcccacctcagcctcccaaagtgcaaggattacaggtgtgagccaccgtgcctggcctaataatttttatttctttaatattgccactaggaacaattttctgtgacatttttgtagctctgtagttaaactaacttggaatttctttacagagcttagaatttacaatactgttagtctctttgagttgtattagtagaaaggaaaggtgacattaaatactgacaagcaaaaaatataaagtaattgctctttggcagctttagtcatgcctcctatatctgtctcattttgccttggttcatgccctcgtcttttctttct

SEQ ID NO: 392190 - DNA, 685 bp, Homo sapiens
gtagctgggactacaggtgtgcaccatctcacccagctaattgttttttttgtttgttttgtagagatggggtctcgctatgttgtctaggctggtcttgaactcctgagctgaagcagtgttcctgccttggcctcgcaaagtgctgggattgtaggcatgagccacgatacccatccccagtattccttttgatataaattaactgttacagaaccatagcattttaaagttggaagtttcctcagggaccattttttccaacaacctcattttatacaggaggaggacacaggcccaaagataagaatttgcaagctcaaagtgtcatggccagagaatgccagaactgggactagaattcaacctgtcatatgggatgtaagacatgccatttgccctcagaatcatgcagttcatttaatgagttttgagccttggtacatgcatagaactgtgagagatgctgagacagaggaagcaaattcaggtcctctttggggtggtttggtctaagagagtttacacttggacataaacacatgtggttcagggtggagattggaagagagaatgatggcatccccaaccaggggtactcaggaagggctgcagtaggaggcagtgttggtctttttgatagagatgtcagagaaggctttgggaagagctcccaaagatctca

SEQ ID NO: 392191 - DNA, 703 bp, Homo sapiens
ctctaatttgaaactaaaacatcttatttaattttaaaaaatgtcagttttggctagtctttaaaaacattcagcatgtaccaatatggtataagcagtatttttgtttctccatcagtttcaactaaagataatgcagttaaaaagccatattattgtcttccagtgtatgcatgaaattaagttaaaagaagtagttctaaagcaagactcagaacttgataggtaaaatgagatgtccctatctaacatcctatttcaagaggaaagaaatattttaaatcaaatatctcattctatttgtagaaaagtacatttagctatgtattctgctactaactcaattctaaaagttttcatcaaaacagtctttaaacataacatttgcttaaaatttggttctcccgtcaaagagacagtaggtggctgttacctttacttcaaattttactaaattttataaaaacctactatttttattaatataattcacacagcattcgaatgtttgactttttttcagacttcttaggaaaggcagcattttacttcattcattaattgcaccatttacgtcctgattgctgtgcatgtggaatatattgaaagataatattaaagtgtaagttttattaaatgttaatttgttttttatttcaataacaaatgagcaatttataataaaaacagttttccacctttt

SEQ ID NO: 392192 - DNA, 163 bp, Homo sapiens
gctttttccatgtgtcactctgctaaatgcattatgggcttcatttcatttaatctcccaaaaccccgtgacgcagttactactattattatctccatttaatagctgaaaaaaactgggacactgagaggttaaaatactggcccaaggttaccaagcaagt

SEQ ID NO: 392193 - DNA, 500 bp, Homo sapiens
ggacggcgactaaacgaggaaatcagaatatgacagagagtagttctaaaacatcatactttagtaacttgtgacgttaactacttcatagttgaattctttggaacattgatttttaaactttaatttctccctttgtaatgagatttatattcaaatatagaactgtttatagtattttcatttcacttctgcaacagatgggctgtcatttcagcttggtacagaacctctgaagttggaaatgtggttacaggtaaatggggatgggaaatagaatacagattgactttagatgcagagtagctttggtattaatttcataattgtgtatttctgtcctgtttggagctttcagaggataaaataaacacagccaagggaggatgcccaaagcagcagtagtgggctctgagggagcggcctcatggagttggaggtagtcctgccctgacagatgttaatctcctcgcactccaggtggcagccatacagaggga

SEQ ID NO: 392194 - DNA, 615 bp, Homo sapiens
catctcagctcggacccacaccacctgagtccccctttgtcctcctttctagcccaaagttttcctgtcccaactctgtctttaatgagaaaaaatgttccgtgcaactttgccccaaactgactcctacttctgaaaacaaaacaaaacaattagctaggaaaattgagacgcataccacttttcttctaactggccagtgtttcttgttcccgggtgaatccagagcagagtatgtctgctcctaggcacatagttgcaaagagtgaccaacatgcagcaaagattgacagtggtttcaaacgtagtgactcgtccacagtttctctttttcttgacttttcagcgtgtaatcaaaactactcagaaaacatatttcagtattttactgcatttgttaaaggatttgggacactacaacaggaaggcactctcatggcaagcaatgatggctggcagtttaactagatcgttactgctgctgtttctgtgatgacaacctccacttctgtgttcttagcagttgtgtagaaatagtcattacagcgtattgagctctttactatatgctcagcccttttatggatggtcttactaatcctcacaaaactccaa

SEQ ID NO: 392195 - DNA, 449 bp, Homo sapiens
atgctgcggaaaaaggtgctgtgtgggtctccctaggctcaactctaacagcatttgcgctttggccactaaagcacaaaatgcaaaccactagcctctcagcgcgggaaatggagcaagggcttaaaaatccggagatctcagatcaagttgaggcatccctgactcactggatgacctggggcaagtcaattcacctgtctgagcctcaggctcctgtgcacgtggagtgtgatgagtcgtggagtgtggtgagtcagggtttctctaaactctctgcctctgacatccagggctcctgtgcccacatactggaggagatacacatcatgaattggtttgagcttccctctgcacattgaatttcaggcctacatgactggaacccaaatgaggagggaatcttcagaaaccaagaacagtgctttacaggagaatctacaaaagtc

SEQ ID NO: 392196 - DNA, 725 bp, Homo sapiens
gagcaagtagaatgagtttacaaccatcacgtagactaacctcttatacaggtggaaaaatctaagaccttgagagcctgggtgacttccagtagcagagtcaggattaaaatcctggtctccttgtttgttccttcagctaagatgaatgaacaatattatgcagtttgcacactgcctcccaataaccaggctgtctcaaataaccaactaacacggtttctctgagaagcttgtatatttaccccttttgtgcttagatacatttgagaagtgatggttactaccttaatagtcatgtatgcaaaaccctatgcctgtagtcaattcattcctacctcattcaccatatatttactgagcgcccaatgcttgttctggataccgtggtaagcaaagacagtccctgttctcgtggagcttccactgtattctaatgtacctgactgcagagggccttggagatctttctcagccaaatatagtatttttctttccttggctggaccaaaggtgaaggtagataatagaatgatgggtgttactcccagcactaagagtacctaacatttatcttactgtgtatgactaatttcacatgactctgtgagatgaggcaggcctattagcctgatttatagatgaagaaacaggattagagagcaaacatagtgttatggttgagagcatggactctggcatcaggcagcctagatttgaatacc

SEQ ID NO: 392197 - DNA, 541 bp, Homo sapiens
catgcagtctcagaaagggccattgcagcacctggcgatttttttttccaggatggagaaaagttttcttgtcaggctacttcctgataggttcctgcagctgctttgatctaacttcctcttttccccactggacaaaaccaaaacaaagcaaaacaagtccaaaaacaaaagagaagtggggataggaccagccacgtgtgtacccttgggcggttggtacatgctcagggcatgagcccaaacttgctgtgacaagtatggtcccaggctgtgccttttagaacagtgtcctccaaagtactagtgaagtggtactgagatttccaaagactgtctttgcagtgcaggatttctgattctgacagaaaccaaggggagaactcactttttctatttaaaaaattatcagtaataaagcactcaggtcttcgaccactcttgcaaatactgttgtttttctctagctgagtctaggaaggaatacgagtttatagtgcagtgccagtaaggttggaattttctgtgataggggagtaat

SEQ ID NO: 392198 - DNA, 441 bp, Homo sapiens
aactctgggaaaatgcatgttataatggttgtcttatgcctgggagtccctgttctcagacatgacacacaaaacgtacaacaacctgccactggctggtatctgtccctagctattagaaatccagccgcaacaaacctccagccttgccagtctctggatgagctttacaagctaagttctgagccaattacagtatccttagtttattttttgtaggacccaccaaatatttatgggcttcccaggaaagttcagtcaacaattttagggtagctataatctatgtgtaacaactactcttcaacatgatttgtttcctctcttagtctataaagaggattttttgaaaggagaaaagttttgtttgaattttctcagaaactccaagttctttaaattggatatttggcaaatctttttccccagagttatccatgt

SEQ ID NO: 392199 - DNA, 379 bp, Homo sapiens
tagaatgaacagaatgaatacacagttcttaaaggggacatcctattttgtctttaaatttttttccttgctctacccctttgttagaatgtttgatcagattcagtttgggatttacatcttttaggaaattttgttttttaatatagattctcgctctgtcacccaggctggagtgtggtgtcatgatcctggcttacagcatccttgaactcctgtgctcaggggattccccccgcttctgcctcttgagtggcttgaattacaggttcatgacaccatgtccgtttattttttgtttgtttgttttaaacttttcttgaagagatggagcctcactttgctcaggctggcctttttttttttttttttttttttt

SEQ ID NO: 392200 - DNA, 332 bp, Homo sapiens
agagacgccccaactcagaatcaacctatggaaagaactatgaggacaagcagctaacaattatttaggtggtttcttacttcttacttcctcctgataccactttcctttatacttgtcccacctactcctggcagaaaaaaaaaaaaaaaaagcagccaacaaaaacttctgaatattctccctgtatcttcattacatacttcgtactttagaaaattgctctcagtaatatcttattataatggacaatttcaggatcaaaggtaccaactgtggctccatacccacccaacaggtccattaaccaattttttttttttttttttttt

SEQ ID NO: 392201 - DNA, 738 bp, Homo sapiens
atttatgtctgctttttctctgtttttaaatgtatattaaaataacagatatatagttttacaagccaaataatagtaaaaggctcattacaaagtataccaatttccttctttacccctccttactcttcaaaatccttctcccaaaaaaggagaaaccctttagcgtctcttctgctacttgcacatttccatatttcatattaatagttactatattgctgttattttttaattaaacaaaatgaggcattatttgttgacttcttcttatctttttataataaatgagaactgtcataccggcacttccactacttctctttctcatcatcctaatatatctattttaacaattttggttaaacaaatacactaaatgcctatgcaaaggatattgaaaattagtattataggatactatgattatggggggtttctcttcattttttgtgatgttaataatcgtcttggtttttatgttttttctttctttttaagcctcttgtctgaaatcatgatctctcctgccttccttgttctggctttggttctggattatggtcactcacccttaatgattgccaaatccaggtgaatcttccattcctgatcctttgtagatcgactttccttgtaactttctccttccttggtttccatgacatcactttcttacctttctggccactccttttcagttcgatgagtgagttctctacttgccctctttttttt

SEQ ID NO: 392202 - DNA, 446 bp, Homo sapiens
aaaaatattattgctccattggtaaatgtatttacccaaatctgttatttcagacaatagcccaacttagcactggcattaaatggaataaatctgttcttttactgatacggtgtctaatttagaaactttgctgtttttggcaatcacactgccttgatttaggtgggacagggatcagggattaaaatggctcttcccaagaggaaagtagacaagtttgacagcactgaaaacccaagacattgctgcatccggaaaatttatggttaagactggagaagtctggaaagttggacagctctgtcatttattaatttattggcctatgtaagatgtttttattttagaagactgatctacgacctctgaaaggatatgttttcaaactctgtattttttttctacgtgtaaaataaagatattctacatacaattttctaaaa

SEQ ID NO: 392203 - DNA, 832 bp, Homo sapiens
ggaaagaaagaaatcattgttcttgttttcagacaatatgatcttacatttaaaacaaaaatcctaaagactctgcaaaaaagctgttagaactgataaaagaattcagtcaagttgcaggatacaaaatcaccatacaaaaatcatttctatatgccaacattgaacaatctaaaaaacaatctcatttacaataactacaaataaaggaataaacttaaccaaagaactgaaagatctctacaatgaaaactataaaacgctgatgatagaaagtgaagaggacataaacaaatggaaaggttgcccatgctcatggattggaagaattagtattgtttaaatacccatactacacaaagtgatctatagaatcaatgcaatacctattataatatcaatgaaattcttcacagaaatagaaaaacaacctaaaatgaagatggaaccacaaaagacccagaatagccaaatgaatcctgagcaaaaaagagcaaagctgaagtcatcacatcacctgacttcaaaatatactacaaagcagcagtaactaaaataacatggtactggcatgaaaacagacacatagaccaatggaacaggatagaaaactcagaaataaatccacatttacagccagctcattttcaacaaatgtgccaagaatatacaatggggaaaggatccctcttcaatggatggtgctgggaaaactgaatatccatatgcagaagaatgaaagtagacccctatctctcaccatatacaaaaatcaaatcaaagtggattaaagacttaaatctaagacttcaaactatgaaactactagaag

SEQ ID NO: 392204 - DNA, 458 bp, Homo sapiens
ttggtagctatggaaagaaaattcagttagtagctgaatagcaaaggatcccattgaacaagtctcttatttctgggaataggccagtccaattgaacagttgtgtctcattttagaagatggcattgcagatgggctctcaaagctacgtctgtatatatgatgcaggcaaacagatctttaatatgaggcatttctatgtaaacagaagaaaaactaaggtcagtgtctggagcagtctacaaaccagtcctaggatctggagggcagtcagctaagaaggctaaaggcaaactgacagattttattggatcatagtttgtgtgtaaagtttgtccaaatataagttgttacaatgattgttttttaaagccaagttgactagcttcaacttgtaaagcttcaggaaaaaggcagttttaatttcaatgcatccaagtcagaaaaatgggaggaaa

SEQ ID NO: 392205 - DNA, 399 bp, Homo sapiens
cataattgccccaaagtggaaacaaaccaaatgtcctaaattatgttaaacccatcccgcagccttgtgctccgcccctggcggaggaagtgacatcacgggccccatgtgagcgcactgcaacacatgcagttgcctggtcagaaagagccggtgtcctaccagccgctgctgcccagaactgggcccttagggaagaggaggcaagaagatggtggacgaccccagtgctgtggacaggaacgtggagttctggaagatcaagaagctcattaagagcttggaggcgggctgggcgccgtggctcacgcctgtaatcccagcactttgaggccgaggcgggcagatcacctgaggtcaggagttcaagacctgcctggccaatatggtgaaaccctg

SEQ ID NO: 392206 - DNA, 321 bp, Homo sapiens
tgacccaattcagtcctcctccagcggccacaggtctttcctgtctctgcccttcaccttggggcttttcccaccccacatctgaaagccccctccaacttcacggacctggtgaaaacacaacctctgcgacctcagctgatctgcagacatacccccagctagtggggctgccaataggaataaacaccccattctccctactcctcaggtaaaacccaattttcaagtcatattttaaggtcacggtattggtaatttaagtttcaagtggcaaaccaaattgaaaacagtattaacaaaagggaatttatgaccccc

SEQ ID NO: 392207 - DNA, 325 bp, Homo sapiens
tgaattagcttttttaagtcaacaattaaagtgagactgccaacaaaagtaaacaggagctacatttaatttctgtttttcctttgagagccaaggaggccagcacttcaagtccaatgaaactgctaactagctaatggaaaatttttcttttcaaacataaatattaaggtttacaagtaaagataagggtttttttgttgacatagagcaccaaataagacttagccccttttagaaaatttgtggacattcaatatcatattgtctggacctcagtaggagtaaatcatcaaaggaagtcatttgcatttcaggaacccca

SEQ ID NO: 392208 - DNA, 491 bp, Homo sapiens
atttaaaacacattaaaaacatattgatgtgtaaggtaaatactgaccaaggaaactgtcaggccagtgtttttccaaatggcaatcaatctaaatgatgtcgagaatatgaagtcaaaactagcttagatatgaatgaggcatacagccttaaccatggacttgagaatcttgttttaatcactgttctcaataatattcttgctgatctgaagtcacatacccctttttatctattgtatggttttaagtaatgttgcaaattgactgaagttaacatgggacaccaaaacatttctactagctgacagaaattttgcaaaccattctcatttttatggctttagcaatagtgttcaaagatatgaactgagcattgaagcagtgctagagattgcattttctatttcaccacacagtctaacaagcagggtctgtcttgggaaaaatggacttaaagtattataagaaagacattttttcacagactc

SEQ ID NO: 392209 - DNA, 278 bp, Homo sapiens
gcagcttcaacatctctgcagacaccatcactgcagccacattccagttccacagaggaatgcagacaatcctcacaatccccagggcagggcaggaggtagagaggattatgaaatgcctgcttgttgaccaaaacctacctagggaatctcaccgaatccctcaacaacccagaacagtactattctgtttactccctttggctccatagggcccaacagaagattactgttctggattgctgaggcattcggagaggtgaccctctagaggcgac

SEQ ID NO: 392210 - DNA, 271 bp, Homo sapiens
caatgtgtgtgtagggatagcaatgtgtgtgtagggatggcagtgttgtgtcgtgttcctcacacttccctgctagctctgagcagggagtacggtgagagcaggaggagtgaacttgaagcccccagggcctgggtgtgagcccccagctctgctgctcactctaggcttcagtcaggacatttaaccccggtctcccatcagtagaacaagtgatttgttaccccaccaggcagctgtgggcttgacaggcagatggaagaggtcctca

SEQ ID NO: 392211 - DNA, 203 bp, Homo sapiens
gcccagctgacttctaggttcatgctgctgcaccctgtcagcaggtccatgccatctgacacagccagaactgtcatggtcctgctgttccacatctatgacgagctgcaggagtggggcaggactgaggatttagatttaccttgtgacagtgccaaaggggcaaatgtggtccttctgaggccctccacctgccaggacca

SEQ ID NO: 392212 - DNA, 353 bp, Homo sapiens
cccaggggaaggtgtctgtgctacagccatcctgtggagcaggcttatgggtcatcgtaactttcccaagctaaaaaaaaacacctaggacctgtgttcctaggacatctggaatgttctgggttttcatattagtaaaatcccatttgctcacagacttttcccaaatcagaagtgacgaggtctcaggacgtcctgaatgttgctgggtaagtaattaaaactccactttctccaagcgcacgtgaggacacacctgtgctccccaggactggaacagcatctacacagccaaagcagaagggcgtggcatagctggtttggtaagaaagagtttaagttaaactagggta

SEQ ID NO: 392213 - DNA, 461 bp, Homo sapiens
tctccccaatcaccaagaacaggttcttaggtgttgacatcaaccaggactccagtagcacacttcaagagtccccatccatgccaatgttagaagtaatcctaggattgtcagaatgttccagggctggagacaaatccttcgtgtgtgtttttggaaaacatgcagaggtttagttgaatgaagtcaattttactgggacactggaatttttccagaggaagcagggatcttcctggacatttggggcagctactgggaatgatgcttgcaggacagctaagcttatccagagatcaccatgtatttcagtctgacaaaagataaattgtcaccaaattttagttgctatgtgtagctatgttcctccaaattcataagacttgtgatctttgatcataaaaatcgtttatattggttagtttcagtaactcaaaggaaataaacaccttaaatcttgt

SEQ ID NO: 392214 - DNA, 273 bp, Homo sapiens
agcgatctgtgaggccaaagcacggtgcttcttccagagaagacatctaatgctcagttttctgttgtgctctgagatcagctgcaggagaggggactgtagtctgccccaccaatcctactctgttgaagttcacccaggaaaactgatcattcagaatcctggaggaaatggaaccagcagcatgagtggtggactgtgatgagacccaccttctcccagaggctgggggtgttaggtatgaactgtccttaactcaaaggagtccactta

SEQ ID NO: 392215 - DNA, 498 bp, Homo sapiens
ccatcaggggctcatggctgatagaacacagatgccaaggaacctaactcaggatgagatgctgccttgggacagagaacacttgtgattcaaccaaggtctttggggctggggtgagtcactaaagaaactgcggtaataggacaggtggcagttgggtttcctaggagaaggggtcctcagggagtagaagaggcaggaagtgagcctgcaaggatggaataatgaacagggctgtgggtaaaaaaggaagcaaaccatggtggactatggtagtgactcagagcctggaaaagagggtcaaatacctgctcatagggaccttgggcaaaaggaaatgagaactgactccagggcaggccaaatgcaaggaccaagatttctcaaaggaaactaggaagccgctaggccatgtcctttgggcctgcctgaaaacccaccaccaggcctcctcccactcactgcctgtggccgacaccataattaccaaggcaggta

SEQ ID NO: 392216 - DNA, 240 bp, Homo sapiens
cttcctccctcctcctctaccctaccccatttcccttcaacaaatatgaattaggcatctaggcactggggaagcaaaagcgactagaaacagataaaatccctccacgatgacatcatggagctcattgtctgatgaggtagaggtatgttcatcaaataaataaatgcaagactgcagccctcaggacactttatctgataggttcatggtgccagtgcatgtctcatggtgcaattt

SEQ ID NO: 392217 - DNA, 445 bp, Homo sapiens
gggcacgagggagggccctgggcagcaatgatccgatgcagtccatattaaacagcctagaacaacagcatgaagaagaaaaacgatctgcactgggaggccagaggcttatgtatgagcacgaattggagcagctccggagaaggctgtctcctgagaagcagaactgccggagcatggacaggttttctttccactcgcccagcgctcagcaacgcttaagacagtgggctgaggagagagaagcaacgttgaataacagcctgatgaggctgagggaacaaattgttaaggccaatctattggtgagagaagctaattacattgctgaggagctggataaaagaacagaatacaaagttaccctacagattccagcctccagcctggatgccaacaggaagcgaggctctcttcttagtgagcctgcaatccaggtgagaag

SEQ ID NO: 392218 - DNA, 241 bp, Homo sapiens
cttattcttgctgttcttcctgtctgcaatacacccacccacgtctctgcctcttgaaattctagtaatcctccaagtcctctctgaaccagcatctctgtcatgaaggcttttctttgtttctacaaccaaattttctccttgaatcttctttttcctatgcgcctctcctttggcatgtaatcttttcatgccttctagcaactgtgtacctgatgtattcccttatgacaatatatac

SEQ ID NO: 392219 - DNA, 221 bp, Homo sapiens
tcatgactaacactagcatgggtgacagagcaagatcctttctcaaaaaaagagagaaaaaaaaaaaaaagaccaggagatttgttcacatgtccaaatttgataataattctctagagctccagcccaaagctgtgcatagaaatataattcaagccacgtgggtaattaaaaaatgtctaaggctgggcgtggcagttcacacctgtaatcccagcact

SEQ ID NO: 392220 - DNA, 224 bp, Homo sapiens
tcaagagaaagacttgattgttcttcctctctttccttttcacatgcaacacgtggattgagtgagtgctgaaagcctcattacaatgctaccctatccttctccattttttcttttcacctctcccctcctgcccactttttccctttaaatattgaagccctttaaatcctctttggaaaaagtgctgactccagatcctcttgtggcttctgtctatttcc

SEQ ID NO: 392221 - DNA, 353 bp, Homo sapiens
gtagctaggattacaggtgccaaccaccacatccggctaattttttgtgtttttagtagagatggggtttcactatgttggccaggctggtcagctcctgacctcatgatccacctgccttggcctcccaaagtgttgggattgcaggtgtaagccaccgcgtccggccctgaagaactttttatgggctggtcatctacttgaaatcaatgaccaaatatagtcagtactttcatagtggcatttttctgcaagtcaaaatatgtaatgattcttcagtaatttaaataggaatttatagacagcacctattaagtatcagggcttgtgctcagttgctaatcaccaaacaa

SEQ ID NO: 392222 - DNA, 417 bp, Homo sapiens
tgtgcatgcactgcatgtgtgtgtggcacatagtcaaaaggccaagtcagaatattcacagtggccttctgtctgatagattgtggatgattttacttttcttcatatgtccttatatttatgtttccaacagtttctctgatttataatcaaataattaaagaaaatttattggatttagtgatagaaattattggtaaagaaagaggagctttggtaggtagaggatttcatggttgagaatgaatatcaggtgagtaggtagaagctgcagtgtgtggaatgccttttgcacaagttttgcattgaaattaaaaggaaagagaaggccaggcatggtggttcatgcctgtaatcccagctgtaatcccagcactttgagatatcagggaacctgctcccgatagtcatgtaggt

SEQ ID NO: 392223 - DNA, 296 bp, Homo sapiens
ttaaattttttttcttacctttcatcgttttcttgatatccactgggttttagcatctacaaatgattcttgcctgaatcagttattatggtagttgatggttttctaattccattattccttctatgtttgttaattttggcattcttctataaggaagagcttaccctttttccctattaattaattcatatattaatgcagacctatgcattcttacttcattaaatcataatcctttactatcattatgtattctgatgttcagactatcccagatttagccaataagatcc

SEQ ID NO: 392224 - DNA, 955 bp, Homo sapiens
aggagcaatgggacatgagtgtccctgtatctgcgccactgccgcaagggaagcctcaggaaccagcacctggaggccaggatagccaagccctgggtgagcgagaggctggagaacacaggagctcacccagggctgctgcccaaccatgggccactgtgaacagacttcagtcctctgtttttgtttcataagccgttgagacatctgatggacttggcttaggccctgctgggacatcccacgtgtgatccctttcactccatcaggacaccaggactgtccttaggaaaatgtccttgagatggcagcaggagtcatattttctgtgtgatgtgtttcggaaagccgctgtgtcctgcctcagcacaaagacccagtgtcatttgctcctcctgttcctgtgccactccagaacctcagcagatctgagccaccgcctgccagtgtgagaggcggccactttcatggcagcttatcaggcgcagggccccagacagcttcccagccggccctagagcccggcctgggccaatgatggagggcggccaccagcccagggcctgcccatccagaagggactccccagggcctgggggaggagacccttggaaaagtcctctcttcccagctcctgattctggatctgagattctcagatcacaggcccctgtgctccaggccgaggctgggccaccctcagggagatccagagactcatgcccatggccatccatgcgtggacgctgtgtggagagtccaggatgacgggatcccgcacaagctcccttcagtccttcagggctgggccatgtggttgatttttctaaagctggagaaaggaagaattgtgccttgcatattacttgagcttaaactgacaacctggatgtaaataggagcctttctactggtttatttaataaagttctatgtgattttttaaaaaaaaaaa

SEQ ID NO: 392225 - DNA, 229 bp, Homo sapiens
ctttagaataaaaaaggcttcagtattctcaaaaatcatttcctctcccgaggaaatacaccacagtaaaacagccttttccagtactgtaattgctggctttctgcttcaaaagaaaatcctcgaatatgattcaggttacaatttccatcagacttttctgagtagactataataattttgtgtttgattaataaaataattccagaaatgaaaagaaatagaattt

SEQ ID NO: 392226 - DNA, 375 bp, Homo sapiens
ccgccatatcctttatcttccatacttttttgttcttttctggatagtgtaggtaaatgtcccagaggctgaccaatggatggctttaagctgcctgcttgaccaaggcatcctatgtcaaataataaaaataataaaaatgaatagaaatttttgtcagtggtggaaggaataatgaaaactgcattggttttgaaagacaggtgagcactatgaatgccccagactctaccagtctgggagtacacgtaaggttgccttagtagatgaacttccagtccactgattgtgtggctcttatgtgcctgatgggaaacatttggcatcttctccaaggtccttctcccctgtgcctctcccctgtgctcgcagact

SEQ ID NO: 392227 - DNA, 357 bp, Homo sapiens
caagcgatccccctgcctcaaagtagctgggcgcgccaccatgcctagctgatttttgtgtttttggtagagacagagtttcaccatgttggccaggctggtctcgaactcctaacctcagatgatccacctgcctccgcctcccagagtgctgggattacaggtgtgagccactgtgccccgccaagatcaaaatttgaagcagggcttctactgaatgtatatcgcattaccaccattgtaaagtcacagagtttaagttggactgtcataggtctgtttcccagcttgtacatacaggggaaagaaggtgattaatgaaaaaccttaaacagcaggttttcgatggataggtgc

SEQ ID NO: 392228 - DNA, 384 bp, Homo sapiens
aagggcaatccatttcacacacacacacatacacacgccacacacacacacacacacacagacgtaaacaaatttgagacttgcaagattaagtaggggctagttaggcaagagtaagagtggagagagggtgtttcagagagaggaaatctaatatgcaaagacctgaggagcaagagagtttgcctcttaagctaaaaggacagtggcagcaggctggtcagtcgggggcacatgggtcaaaatgagttttgagaggcaggtggggctggcatcataccattgtctctcacctctgtgcctttatgcatactgttccttctccctggaatgccagcatcttacctgcctgatgcacaactcttcttgcagagaggagttctg

SEQ ID NO: 392229 - DNA, 271 bp, Homo sapiens
aatattgtgacctccactctatgactctgccacatctgtttctcctaaagaaccctggtaacctcctcctttgtgtagaaatgagcaagaaagcagagcaagacatgcaaagccctttgaggaacagcagggaaaccagaaggaccttcagtcacatcctagaggtgcaagaaacacaacttccactctcaaaattagattgaatttctatttcaagtccccatttggctggtagaaagacatctagccataattaatcagggcctcccta

SEQ ID NO: 392230 - DNA, 168 bp, Homo sapiens
ctgtttctgttttttcctcctcccagtttgttgaagcccatggttaactgagaaatgcaagtggtgcctaggtttttcagggttatgcctgtcacatccacactgccgcagtgaacaaagcctagaagcctgcggcaagggaagcgcctccattcaatggtggctggc

SEQ ID NO: 392231 - DNA, 357 bp, Homo sapiens
tccaagtagcgtgcatcagcaagatagcagaagcaggaagagatatggccaagagacacattccacctgaagactgagagggaggctgtccggtaccatgtaacagttgcgtcagactgggacacttcctttttacagaggactataaaacccctgccctgtccttacttggggctgatgccatttcaggcctcagcccacctgcaccgagatgctcattaaaacagtgtgttgctccacattgcctcatcttgtctgttggcacgctctcagggttcgaaccaatataagagccttgcaatccgcacctgcccaagctgatctgtcaacaaagaaaatactttcatgccgggcacg

SEQ ID NO: 392232 - DNA, 298 bp, Homo sapiens
  misc_feature (81)..(81): n is a, c, g, or t
  misc_feature (86)..(86): n is a, c, g, or t
  misc_feature (196)..(196): n is a, c, g, or t
  misc_feature (204)..(204): n is a, c, g, or t
  misc_feature (217)..(217): n is a, c, g, or t
aatttttcatcaagtcattttaagcgcgtattatttgcaagcgctgatccagcgggggtacagtagtgacggagacaaaanttccntgtccttacggggtttaaattacagcgggagagacagagaataacaaaaccttgaagctctgtaataaaaatgtcaggccgggcgcggtggctcacggttgtaatcccangcactttngggaggcccaggncggggggatcacctgaggtcaggagttcgagaccagcctggccaacacagtgaaacctcgtctctacgaaaaatacaaaaa

SEQ ID NO: 392233 - DNA, 259 bp, Homo sapiens
gtcgctgctgctgcagtcgacttaagatcccccttctgacctcaggtgatccgcctgcctcggcctcccaaagtgctgggattacaggcatgagccaccgcgcctggccaattgctgtagctttttagtgagttttgaaatcaggaagtgtgagaccttcagtctttcaagactgttttagctatgtggtgtcccttgatatggatttttctatttctttagaaaatgtcattgggattttgttaggcattgcattgaa

SEQ ID NO: 392234 - DNA, 626 bp, Homo sapiens
caccgtgcctggctgaaatattttaacctatctgagcttcagtttcctgcctataaaatgaaaataacaaaacacacctattaaacattgagataatgcatgtaagctacttggcacagtactgagcacatagtaaaagctcaaaaatcagtagtcaccatcatcgttactttttgacttgttctcatgtgttctttttgaaattcaaaatatccagctggcttgaagatagttgtcacgttttatagtcagctatcatagactgagctatgtcatatgtaatagtacagtgtgttgaaagagtaattattcagaagcattttcaggtaaccagtgacattgattttcagaactagtacggaggcttgagaggctcaggtgtaaaaggtaatttagtacttagagggggttgagtagtaacagaaagtagttgtcagaccacaggtataaacataggtgagggcacagaatcattgatttgccttgattttcacatattcaagaagaaagtaactttgtgaataaataatgcgttcataaaggtataaaactcaggaggttcaagtgtcccatccatcttaaccctcagcctcccacgactccatctgtagaggcaaccagtgttg

SEQ ID NO: 392235 - DNA, 368 bp, Homo sapiens
gacaagggacaggtgtggctaggacctcctaggattctgcatccaagatccagtctctaaagaggttttggatcattcatttcttcatttgattccttcatttgttatgtgagagctcctgagtatgtgtctctggctgggcctgtgctggtgcagggtgtgagtggggaaagaaaacaaggtcctctccttgatcctctcatgacagtaacatggacactttgggaaacacaggatttcaggttcagtgatgggggttaagatctgagggggaggcctggacattttttttgcactgactctgatggttgaggcaggtgatttagttctggagtacagactaatcagctgaccatttgctctcactc

SEQ ID NO: 392236 - DNA, 533 bp, Homo sapiens
aaatgataaataaaacagaaaccaacaaagaaaacaaataataaaacggcttatttaagccctagtaaatttaaatgtacataatctaaatacaccaattaaaaaacaataattggcagagagaataaaaaaataaaagctgcaaatatgaagtggcccttaaaaggagaaggggcctttagtggggagattataaaggcaggttaaaaacaaacacacacgaatctaatccagtctttgctctaacgtctaccttctattgtctctctggaaccaagctgagtatgcctgagtatctaaaattgttatttcaaataaggactcagactaaaacttgaacaacttatactctgctgcatcaattggtagttgctctaataaataaagattgaatgctccggctgttcaaataagacattaaagcactccactcaaaaacaattgattggttgacttgatatttgtgatggttaattttgccaacttgactgggttaagagaaacctggattcctaataaaatgttatatctga

SEQ ID NO: 392237 - DNA, 754 bp, Homo sapiens
ctcacaaatgccctgaatgtgggaaaagattccttcgtagttcagacctttatagacaccaacgacttcatacaggggagagaccctatgaatgcactgtatgtaaaaagcgattcactcggcggtcacatcttatagggcaccagagaacccattctgaagaagaaacatataaatgtcttgagtgtgggaaaagtttttgtcatggatcaagtcttaaaagacatctgaaaactcatacaggtgaaaaacctcatagatgtcataattgtgggaaaagttttagtcgactgacagctcttactttgcaccagagaacgcatactgaagagagaccttttaaatgtaattattgtgggaaaagttttagacagagaccaagcctcgttattcatttaagaatccacacaggggagaagccatacaagtgtactcattgttctaaaagcttcagacagagagccggccttattatgcaccaggtcactcactttagaggacttatttaagaattgctaagggaaacaggtcttacacaaattgacactaactcaaaaaaaatcttaacctgcagcaggctgtttgtcttggaagcttttgtttgagcttataagaacatagacagctttttttttactagttttaaaacccatcttccaaggtatatgaattctagagtatttatctactcctgtgattttcttagatttgatttcttctgtctgcacaactcttctttttttaattacaatga

SEQ ID NO: 392238 - DNA, 700 bp, Homo sapiens
tggagttttgctcttgtgtcccaggctggagtgcagtggcgcgatctcagctcactgcaatctccacctcctgggttcaagtgattctcctgcctcagcctccctagtagctgggattacaggtgcctgccaccacgcctggctaatgttcatatttttattagagaaggggtttcaccatgttggctgggctggtcttgaactcctgaccttatgtgatccacccacttcagcctcccaaagtgctgggattacaggcatgagccaccacacccagcttctcttctagttttatgtttttaggtaactatttttcaattgataataaaaaactatgatgcatgaatagataagagaatgaaggtattgttattaaaaataaagtatctgtttttctgaattctgggcttattcagcttcttagagtacagactgctagagctaagtccaaattttattttcttttatgtatttcatatatgagaaaagattttcattcatgttcttatatttgacattcttaatggtcagtaaactttctgtaaagggccagatagtaaatattttatgctttgtgggccatatggtctctcttgcagctactcaactacgccatcatggcgtggaagctgccatagagactacggaagtgaattaacttgtctctgcttccgtaaaactttagaggaacagaaatttg

SEQ ID NO: 392239 - DNA, 211 bp, Homo sapiens
aattattcagtgaaggatgattttgctcctagttttggagtttgaacttctgccaggattgaattattttgaaatctgtctttttaaactttttcaaaataggtctctaaggaaaaccagcagaacattagcctgtgcagaaccatctgtctggggagcacactcttcattatgcttggcacatagatctccctgtggtgggatctttttc

SEQ ID NO: 392240 - DNA, 317 bp, Homo sapiens
gctgaggtgggtggatcacctgaggttgggagtttgagaccagcctggccaacatggagaaaccccatctctactaaaaatactaaaaaaaaaaaaaaaaaaggatctatcttctcctgccaataacggtgcccagagctatcctactaggtattgccacttgcccgcggcaagcgtgaagacaggctgtagggaagcatgtgactaagcaacacggcttcacacctacgttctcctccgggccagtaaagcaaagtgtgtgagtgtgcggtggtagcctgaccttaaacttcccacggcaaagatgcggaccctga

SEQ ID NO: 392241 - DNA, 498 bp, Homo sapiens
gagaacccctcacaagaggcatatgcatagtgaaaggagtgagggctgcaagttcatggatgcattattttctcgttttcgtttgtagggaaatacatgctctgtcattgacttgcaaggattttctttttattcttaattgcctccctaatcctttctccactcagctgtggtactcaatgcactcagattaaatgtgtgtgttcttctgggccaggaaggaatagatagcattgatgtggaccctcaactgtattacagaatagggtggtaaacactcaggagaaacattctccctggtaaagtgctaagcaattgttaaacagcattttaaagcatgaatgaacgtcttgcttgtacattccaaagttccacaaacaaaagaaaagttcttattctaaaggagcaggagatgaatcctgccgataatgttttttataatgtggctgtgaatattttttcccagagttggtaatcctaaatcacctcttacaagta

SEQ ID NO: 392242 - DNA, 306 bp, Homo sapiens
ttttcattaaattgtcttaatctctgatttgtttatttccgtattattacctaggaggcgccaagcaagaaatacattattacaaacaaaccttgcaaattgaggtttgcttaataaagggactatttacaaaagtggggacagagtgtggagaaaccatagggatggtgcagtaaccagggcctaggaacagcgagggacattagcacccctaagcctagaggggtaaggggaaaagcagatgctggcacatgaagatgaaaagggttttgtattccaaagaccacctggcagactctgtgacct

SEQ ID NO: 392243 - DNA, 189 bp, Homo sapiens
ccaaatctccaacttacttatgtacaaacttacataaagtattagcacaatcacatagtgatgttccttgagatgtttttaatgaacgtgcatcgcaacagcctgtaattccttcccatgaagtgcctcctcaaaggggacagtgatgacagctttactgttatcactgtgggttggactgtagcatta

SEQ ID NO: 392244 - DNA, 590 bp, Homo sapiens
ttaataaatgaagaaccacaaatacatcctatgaacagaatttcaattttagaatgaatcaataacacctttagactaccatcaagattgtgaaagtgataatttttggtacatgaatttaaagatcatctaaattaaaccaaaagtgtaaaagtaccttcattaaaatggagactacaacctataatagagaaattaactctagatccctaatgcttattactcctttcggatacatcattccatgacactggaaaatattagatctgatagggattttgcaggtagcggtaaaaccttatgtaagtatttttttaatccacccacgaaggattatgttgaattcccagacaagtataattttcatctgcatgtctaacatacctatagcaacattacttaatatatgagtatgtgaagtatattttattatagtagtagacaagcaaactgaatgtgtcccaggaaggggtcttttccattaacttttataaaggctttcatttcaaagtttcattaacatctgacaagcaagctgaaaaagctttgcttagagcttaggttaggggcaaaatgcattttggtagaac

SEQ ID NO: 392245 - DNA, 252 bp, Homo sapiens
cctgtaggggtgtgtgtggggggacctgaggaggggccccacagagctgcctgaccaggtgctgccctgggccctgcataatggcaggaggagggcccgcggtgctctcagcccccgagcagaagtcaccactggaaggaaacttgcctgccgtttccagcatcttgtccccgccgctgcgtgaccttggccgggcagtgtggtggcacttaaaattggaaagtgtgagcttcttccccacagccccaccct

SEQ ID NO: 392246 - DNA, 372 bp, Homo sapiens
tgccgtcatcacgtatatgatccgggtgtgtgtgtgggttggcacatatgtacatatttcacagattatcccattcaaagatgggaaggtggaagtgtctgtcctcaacaagtactgtggtttgcctggctgaaatgcaaggaaacccccaaaagcaccagagccctgcatttattcagctgaaaaaatgtgttttcttttttaaatcagagtctcctaagatagaagaacttagatggctcatccagtgctgggttgaatgataaaacccagacctttttggtgctgcgttttgattcatccctgaatgtgacaccctggtacttgggttcctgggtctggctttacaggatgtgacttcagtcaaggaaa

SEQ ID NO: 392247 - DNA, 295 bp, Homo sapiens
aaacaaaaacaaaaacaaacaaaaaaggtcacccagccaggagggaatcggagagagagcagaacctcaggtgtgaagagatcaattttcttccaagatagctaaggagggagtagaaaattgtgggatgatgggtagagaagaggaaggaacctctgaggaatcatttttgtctcaggcagcaaaactataagccttagacatcatctgcctcatctctctccattcctcaaatccagactccaatctgcctccagatcaggtagcccccaaaaagctgccaattttctccctt

SEQ ID NO: 392248 - DNA, 362 bp, Homo sapiens
gattactccagctcccaggtttagaacgggctgcaggcaggcagggcggcagatgcaaaggtcatccaggtgagagatgctttagactcacgcagcagcagcataggtaggcggagagcctgattcaagatgtattttaaaggtaaagtctctgggacttcctgaaggactggacacgaggcgtgaaaagcactgaggaatcaaggatgacttggaggtttccggcctgagcaaccagaaggctcaagttgccatgacgggaggctgaaagagcaagtggatctaggacgtgtcgagtctgagacgtctgatcgacatgaaagaggtgacattgagagggcaagtgcagccagcgctcaagc

SEQ ID NO: 392249 - DNA, 143 bp, Homo sapiens
tgtgtgtgtgtgtgtgtgtatctagattttacatagatacatattcatattttacataactataaaatcaggatatgagatttttattggacataatgactgcaaatatcttctctgtagcttttcttttcattctcttagtg

SEQ ID NO: 392250 - DNA, 371 bp, Homo sapiens
aaccctgggtgcatgcatgtggcaggaaagaggccctgcccctctcaggctccagcacccaagccctctcactgtctacctcccctgccatgcaacacacaaggccgtgcacagacgccaggacatacaccaggcagcaaccacggcctctcctcacagacccaacacacagcagcgagcgaagccatcccgcaacacatgcatgctcacacatgcgcgcacacacatgcacacacacgcacacccacacatgcacatacatgcacgctcacacacatgcacactcacaaacatgcacacatgtgcacacacgcacgctcacacatgcacgcacgcactcacacaatgctcacatgcatgcacacacatgc

SEQ ID NO: 392251 - DNA, 405 bp, Homo sapiens
agtcagcagtcaggttgaagattatggagtaggtctccctgcagctcccactcctgatgagctgggataacaaggttctaaatgtgttaaaggaaaaacacagaacaggctctgttgggtgctgtgggtagcagggccctctgtctccttggggataggccagacccttcctggcagactgcaggcctaggcgctcctgagtgtggcaagccaggcaccagggtcacctgcacagggagagctagcagcactgccaccaggagtcactgtcatgcagacaagcagttcctgagtaggtgaggtttctgaccgggttcctgagactcatggtcaggaaactgacctacccaatctgcctgtttgagtgctgccactagaaacaaaaaggtcctctctccttccttt

SEQ ID NO: 392252 - DNA, 680 bp, Homo sapiens
ttcgtctcggtcctgaaagaaggggttagatttgctataatagctaggtgttaagaaaggagaggtgttatctagatgaaaacaattaacagaaataaataaggcaggaggatgaactggcttgagggaaaaaggttttgttacttgcttcgttgatcacatgcaatgcttagcatgttgctgccacttagtaggtcctcagtaaatatttgcagtttgactatatatttgagtttattattaaatcagtcattgaactcccagatctacatggcctacttttagattagattagacaaattaaatagattataaacttcctaaaagggaaggacaatgatttctgtctttgattctgaccctacatgttcttcccaactgctttagtttgacgattttcacagctacaggagatgttaaaagaatgatacagcaagcgcccacccttcaccgtgattcctcagcaaaattacaccatgtttgctctgtctctctcttatctctatatgataattttgtggagtcatttgaaagtgagcattttgatgcttccgtgtgtttagctttgcacacattgaatctgaggtggcctgacggtggagctgaggctggaactggttttggtagtccacattagatttgaaagtttgggtgatgttaaagtgcacaagattgctgag

SEQ ID NO: 392253 - DNA, 362 bp, Homo sapiens
gcggccgcctactactactaaattcgcggccgcgtcgacaaaaagggcactattgggcagaagtgagtaaaagctgtgtctagagaggaagaaacattagtgggagaataaatagtaatagataaagcttgtgttcttcagtgtcaggctaagtctttaaattttattatgtagatgctggagaatcattaaaaaccttttgagtaggggctgtcattcagatagagttggctatctggatagagacagagtaaggattgagtggagcttggtaggaaccaggagaaatcgcttgaacccgggagacaggggttgcagtgaaccaagattgcgccactgcactccagcctgggtgacagagc

SEQ ID NO: 392254 - DNA, 352 bp, Homo sapiens
ggagcttggtaggaaccaggagacttggagattgctacagtagttaaggtggaaggtcaagagggtctggggtgtaagtggtggccttcaaagtggagaggaaagagaggtagaagacagtagaatccatagaacttagccactgatttcgatatggaggacttgaaaaggagtcgggttcttctgggtgttggggaagttggtggtgcattaacagaaataaataaggcaggaggatgaactggcttgagggaaaaaggttttgttacttgcttcgttgatcacatgcaatgcttagcatgttgctgccacttagtaggtcctcagtaaatatttgcagtttgactatata

SEQ ID NO: 392255 - DNA, 373 bp, Homo sapiens
cagcctcatagttcccaggagtgtgcagaggggctaaacacccgtctgtgttccagccagctgaagcacctgtctggtgcgagttctagacaggacagtggtgggatctcactcagttgctcctgtatggagtaatttgttggccatctgcctgttaagggcactgggaaaaagcagtgcagtgatccaaaggtctgctcacgtagcaaacatttgtgcacctgctgggtgctggggtcagatagtgtggccctcatgaggcagatgacacagacaggtgagctgtacagttaccttatggtgaggtgagagctgagatgggagaagtgcagggtgctggggcacacagagaaggggtccggggtcctgactc

SEQ ID NO: 392256 - DNA, 1687 bp, Homo sapiens
  misc_feature (156)..(156): n is a, c, g, or t
  misc_feature (158)..(158): n is a, c, g, or t
  misc_feature (209)..(209): n is a, c, g, or t
  misc_feature (549)..(549): n is a, c, g, or t
  misc_feature (1100)..(1101): n is a, c, g, or t
  misc_feature (1103)..(1103): n is a, c, g, or t
caggtgtcccaccgtgccagatacgctgcctaaactgcttccagcttctttttttttttttccccccttctgcaataagtctgtgatcagccacgggacagaggcgccagcagcctgcctgtgacaggcatcaggttagctggctcccactcgggntnggcgcgcccaggatataaatccgggcgcgggcccctgctgtggctcctctnccctgcacactcaggagagggagcttccttctaaagacctttcttttatctgaagccgcacagcccggcaggctgtgctgacttggtggaggcagcagcggcagagcagcctgagcagcagcctgagcaggaaacctgctggggtggggagggcaggtgtctgcagcccctgagaagaaggccctggtgggccccagaccctggcatcgtttcaggggaggtctctagccgccccagcctgcaccatgtgggccccaaggtgtcgccggttctggtctcgctgggagcaggtggcagcgctgctgctgctgctgctactgctcggggtgcccccgcgaanctggcgctgccgcccatccgctattcccacgccggcatctgccccaacgacatgaatcccaacctctgggtggacgcacagagcacctgcaggcgggagtgtgagacggaccaggagtgtgagacctatgagaagtgctgccccaacgtatgtgggaccaagagctgcgtggcggcccgctacatggacgtgaaagggaagaagggcccagtgggcatgcccaaggaggccacatgtgaccacttcatgtgtctgcagcagggctctgagtgtgacatctgggatggccagcccgtgtgtaagtgcaaagaccgctgtgagaaggagcccagctttacctgcgcctcggacggcctcacctactataaccgctgctacatggatgccgaggcctgctccaaaggcatcacactggccgttgtaacctgccgctatcacttcacctggcccaacaccagccccccaccacctgagaccaccatgcaccccaccacagcctccccagagacccctgagctggacatggcggcccctgcgctgctcaacaaccnncntgtgcaccagtcggtcaccatgggtgagacagtgagcttcctctgtgatgtggtgggccggccccggcctgagatcacctgggagaagcagttggaggatcgggagaatgtggtcatgcggcccaaccatgtgcgtggcaacgtggtggtcaccaacattgcccagctggtcatctataacgcccagctgcaggatgctgggatctacacctgcacggcccggaacgtggctggggtcctgagggctgatttcccgctgtcggtggtcaggggtcatcaggctgcagccacctcagagagcagccccaatggcacggctttcccggcggccgagtgcctgaagcccccagacagtgaggactgtggcgaagagcagacccgctggcacttcgatgcccaggccaacaactgcctgaccttcaccttcggccactgccaccgtaacctcaaccactttgagacctatgaggcctgcatgctggcctgcatgagcgggccgctggccgcgtgcagcctgcccgccctgcaggggccctgcaaagcctacgcgcctcgctgggcttacaacagccagacgggccagt

SEQ ID NO: 392257 - DNA, 327 bp, Homo sapiens
ctggctgtcctctaattcagttcccacactgtcttcccgacgctgtctcccacagcttgagggcttagtccgcaagactgccccctgtcacaccagtcacaagcccaagcctctggaacttctgatcaactggcttcaagttggggttcccatgaccccctctttgggttcgactaatttgctgaagcagctcacagaactcagggaacttacttatgtttataggtttattataaaggatattgcagaggatacaggtgaagagatgcacagggtgaagtatgggaaaacgggcatggagcttccatgccctccccgggggcatca

SEQ ID NO: 392258 - DNA, 205 bp, Homo sapiens
acccaaagttagtataataaaaacccagcctgtcttcttgttcataggctaaaacaaaatacgggacttataaaataaaattaaaatggaaaattgcaaatttggacaatctccaacatgtagctaaaagcattcaaagaacctgagaaaactgacaaaatacgaactaaaacaaacatacaatccttcgaataaatctagctat

SEQ ID NO: 392259 - DNA, 1537 bp, Homo sapiens
gacacaggaaactcccctgaaacctgtttctcagcttcccggcccagctggggcacccactggaaggagaggccaggcggaagaccctggctccgtcatggcctctgccctgaggccaccccgtgtccccaagcctaagggtgtcctgccttcacactactatgagagctttctagagaagaaggggccctgtgaccgggattacaagaagttctgggcaggcctgcagggtctcaccatttatttctacaatagcaatcgggacttccagcacgtggagaagctcaacttgggagcatttgagaaactcacagatgagattccctggggaagctcacgtgaccctggcacccacttcagcctgattctccggaatcaggagatcaagttcaaggtagagaccttggagtgtcgggaaatgtggaaaggcttcatcttaacggtggtggagctccgtgtcccgaccgacttgaccctgcttcctgggcacctatacatgatgtctgaagtcttggccaaagaggaggcgcgccgtgcactggagacaccctcgtgcttcctgaaggtgagccggctggaggcacaactgctcctggagcgctaccccgagtgcgggaacctgctgctgcggcccagcggggacggcgccgacggcgtgtcggtcaccacgcggcagatgcacaacgggacgcacgtggtccggcattacaaggtgaagcgggagggccccaagtacgtgatcgatgtggaacagccgttctcttgcacctccctggacgccgtggtcaactatttcgtgtcgcataccaaaaaggcgctggtgccattcctgttagacgaggactacgagaaggtgctaggctacgtggaagccgataaggagaatggcgagaatgtgtgggtggcgccctccgctccgggcccaggtcctgcaccctgcacaggtggccccaagccgctgtcacctgcgtctagccaggacaagctgcccccactgcccccactaccgaaccaggaagagaactacgtgacccccattggagatggcccagctgttgactatgagaaccaagatgtggcttcctctagttggccagtcatcctgaagccaaagaagttgccaaagcctcctgccaagcttccaaagccacccgttggacccaagccagtagagaaggggtttcaccatgttgcccaggctggtctcgaactcctgacctcaagtgatccacccacctcagcctcccaaagtgctgggattaccggcgtgagccaccacacctggcctcatctgtcttctcttccagagcccaaagtctttaatggtggcttgggcaggaagctgccagtcagttcagcccagcctctcttccccacagccgggctggcagacatgacggcagagctacagaagaagctggagaagaggcgggcactggagcactgattcggacacaccagggaccagcgggctagtcccagggcatggcccagcggccagattctttttcccaggattaaaactctgaccccagga

SEQ ID NO: 392260 - DNA, 179 bp, Homo sapiens
ggatttgctggtgcagtacaactaggctggcagacatgacggcagagctacagaagaagctggagaagaggcgggcactggagcactgattcggacacaccagggaccagcgggctagtcccagggcatggcccagcggccagattctttttcccaggattaaaactctgaccccagga

SEQ ID NO: 392261 - DNA, 1156 bp, Homo sapiens
gacacaggaaactcccctgaaacctgtttctcagcttcccggcccagctggggcacccactggaaggagaggccaggcggaagaccctggctccgtcatggcctctgccctgaggccaccccgtgtccccaagcctaagggtgtcctgccttcacactactatgagagctttctagagaagaaggggccctgtgaccgggattacaagaagttctgggcaggcctgcagggtctcaccatttatttctacaatagcaatcgggacttccagcacgtggagaagctcaacttgggagcatttgagaaactcacagatgagattccctggggaagctcacgtgaccctggcacccacttcagcctgattctccggaatcaggagatcaagttcaaggtagagaccttggagtgtcgggaaatgtggaaaggcttcatcttaacggtggtggagctccgtgtcccgaccgacttgaccctgcttcctgggcacctatacatgatgtctgaagtcttggccaaagaggaggcgcgccgtgcactggagacaccctcgtgcttcctgaaggtgagccggctggaggcacaactgctcctggagcgctaccccgagtgcgggaacctgctgctgcggcccagcggggacggcgccgacggcgtgtcggtcaccacgcggcagatgcacaacgggacgcacgtggtccggcattacaaggtgaagcgggagggccccaagtacgtgatcgatgtggaacagccgttctcttgcacctccctggacgccgtggtcaactatttcgtgtcgcataccaaaaaggcgctggtgccattcctgttagacgaggactacgagaaggtgctaggctacgtggaagccgataaggagaatggcgagaatgtgtgggtggcgccctccgctccgggcccagagcccaaagtctttaatggtggcttgggcaggaagctgccagtcagttcagcccagcctctcttccccacagccgggctggcagacatgacggcagagctacagaagaagctggagaagaggcgggcactggagcactgattcggacacaccagggaccagcgggctagtcccagggcatggcccagcggccagattctttttcccaggattaaaactctgaccccagga

SEQ ID NO: 392262 - DNA, 1264 bp, Homo sapiens
gacacaggaaactcccctgaaacctgtttctcagcttcccggcccagctggggcacccactggaaggagaggccaggcggaagaccctggctccgtcatggcctctgccctgaggccaccccgtgtccccaagcctaagggtgtcctgccttcacactactatgagagctttctagagaagaaggggccctgtgaccgggattacaagaagttctgggcaggcctgcagggtctcaccatttatttctacaatagcaatcgggacttccagcacgtggagaagctcaacttgggagcatttgagaaactcacagatgagattccctggggaagctcacgtgaccctggcacccacttcagcctgattctccggaatcaggagatcaagttcaaggtagagaccttggagtgtcgggaaatgtggaaaggcttcatcttaacggtggtggagctccgtgtcccgaccgacttgaccctgcttcctgggcacctatacatgatgtctgaagtcttggccaaagaggaggcgcgccgtgcactggagacaccctcgacgcacgtggtccggcattacaaggtgaagcgggagggccccaagtacgtgatcgatgtggaacagccgttctcttgcacctccctggacgccgtggtcaactatttcgtgtcgcataccaaaaaggcgctggtgccattcctgttagacgaggactacgagaaggtgctaggctacgtggaagccgataaggagaatggcgagaatgtgtgggtggcgccctccgctccgggcccaggtcctgcaccctgcacaggtggccccaagccgctgtcacctgcgtctagccaggacaagctgcccccactgcccccactaccgaaccaggaagagaactacgtgacccccattggagatggcccagctgttgactatgagaaccaagatgtggcttcctctagttggccagtcatcctgaagccaaagaagttgccaaagcctcctgccaagcttccaaagccacccgttggacccaagccagagcccaaagtctttaatggtggcttgggcaggaagctgccagtcagttcagcccagcctctcttccccacagccgggctggcagacatgacggcagagctacagaagaagctggagaagaggcgggcactggagcactgattcggacacaccagggaccagcgggctagtcccagggcatggcccagcggccagattctttttcccaggattaaaactctgaccccagga

SEQ ID NO: 392263 - DNA, 1399 bp, Homo sapiens
gacacaggaaactcccctgaaacctgtttctcagcttcccggcccagctggggcacccactggaaggagaggccaggcggaagaccctggctccgtcatggcctctgccctgaggccaccccgtgtccccaagcctaagggtgtcctgccttcacactactatgagagctttctagagaagaaggggccctgtgaccgggattacaagaagttctgggcaggcctgcagggtctcaccatttatttctacaatagcaatcgggacttccagcacgtggagaagctcaacttgggagcatttgagaaactcacagatgagattccctggggaagctcacgtgaccctggcacccacttcagcctgattctccggaatcaggagatcaagttcaaggtagagaccttggagtgtcgggaaatgtggaaaggcttcatcttaacggtggtggagctccgtgtcccgaccgacttgaccctgcttcctgggcacctatacatgatgtctgaagtcttggccaaagaggaggcgcgccgtgcactggagacaccctcgtgcttcctgaaggtgagccggctggaggcacaactgctcctggagcgctaccccgagtgcgggaacctgctgctgcggcccagcggggacggcgccgacggcgtgtcggtcaccacgcggcagatgcacaacgggacgcacgtggtccggcattacaaggtgaagcgggagggccccaagtacgtgatcgatgtggaacagccgttctcttgcacctccctggacgccgtggtcaactatttcgtgtcgcataccaaaaaggcgctggtgccattcctgttagacgaggactacgagaaggtgctaggctacgtggaagccgataaggagaatggcgagaatgtgtgggtggcgccctccgctccgggcccaggtcctgcaccctgcacaggtggccccaagccgctgtcacctgcgtctagccaggacaagctgcccccactgcccccactaccgaaccaggaagagaactacgtgacccccattggagatggcccagctgttgactatgagaaccaagatgtggcttcctctagttggccagtcatcctgaagccaaagaagttgccaaagcctcctgccaagcttccaaagccacccgttggacccaagccagagcccaaagtctttaatggtggcttgggcaggaagctgccagtcagttcagcccagcctctcttccccacagccgggctggcagacatgacggcagagctacagaagaagctggagaagaggcgggcactggagcactgattcggacacaccagggaccagcgggctagtcccagggcatggcccagcggccagattctttttcccaggattaaaactctgaccccagga

SEQ ID NO: 392264 - DNA, 1696 bp, Homo sapiens
gacacaggaaactcccctgaaacctgtttctcagcttcccggcccagctggggcacccactggaaggagaggccaggcggaagaccctggctccgtcatggcctctgccctgaggccaccccgtgtccccaagcctaagggtgtcctgccttcacactactatgagagctttctagagaagaaggggccctgtgaccgggattacaagaagttctgggcaggcctgcagggtctcaccatttatttctacaatagcaatcgggacttccagcacgtggagaagctcaacttgggagcatttgagaaactcacagatgagattccctggggaagctcacgtgaccctggcacccacttcagcctgattctccggaatcaggagatcaagttcaaggtagagaccttggagtgtcgggaaatgtggaaaggcttcatcttaacggtggtggagctccgtgtcccgaccgacttgaccctgcttcctgggcacctatacatgatgtctgaagtcttggccaaagaggaggcgcgccgtgcactggagacaccctcgtgcttcctgaaggtgagccggctggaggcacaactgctcctggagcgctaccccgagtgcgggaacctgctgctgcggcccagcggggacggcgccgacggcgtgtcggtcaccacgcggcagatgcacaacgggacgcacgtggtccggcattacaaggtgaagcgggagggccccaagtacgtgatcgatgtggaacagccgttctcttgcacctccctggacgccgtggtcaactatttcgtgtcgcataccaaaaaggcgctggtgccattcctgttagacgaggactacgagaaggtgctaggctacgtggaagccgataaggagaatggcgagaatgtgtgggtggcgccctccgctccgggcccaggtcctgcaccctgcacaggtggccccaagccgctgtcacctgcgtctagccaggacaagctgcccccactgcccccactaccgaaccaggaagagaactacgtgacccccattggagatggcccagctgttgactatgagaaccaagatgtggcttcctctagttggccagtcatcctgaagccaaagaagttgccaaagcctcctgccaagcttccaaagccacccgttggacccaagccagagcccaaagtctttaatggtggcttgggcaggaagctgccagtcagttcagcccagcctctcttccccacagccgggctggcagacatgacggcagagctacagaagaagctggagaagaggcgggcactggagcactgattcggacacaccagggaccagcgggctagtcccagggcatggcccagcggccagattctttttcccaggattaaaactctgaccccaggaaaaacccaatgccgcgccatcacctcctccactctcctcctctcatccccatatctcgacactccccgtcgaggcgcattttctcgggcgtgtcacagacaaagcgggcgagacacgtacgccacgggcccattactgactcactccagtgcgctcgccgtagagccggagtatttgtgtacacaagcgcgggggctaacatatgctacgcgcggctcctccagatggtggggccagcatatcacctctcgcaagacgccgggtgtatcccgcggcttatcacggtaagtggtgaat

SEQ ID NO: 392265 - DNA, 1324 bp, Homo sapiens
gacacaggaaactcccctgaaacctgtttctcagcttcccggcccagctggggcacccactggaaggagaggccaggcggaagaccctggctccgtcatggcctctgccctgaggccaccccgtgtccccaagcctaagggtgtcctgccttcacactactatgagagctttctagagaagaaggggccctgtgaccgggattacaagaagttctgggcaggcctgcagggtctcaccatttatttctacaatagcaatcgggacttccagcacgtggagaagctcaacttgggagcatttgagaaactcacagatgagattccctggggaagctcacgtgaccctggcacccacttcagcctgattctccggaatcaggagatcaagttcaaggtagagaccttggagtgtcgggaaatgtggaaaggcttcatcttaacggtggtggagctccgtgtcccgaccgacttgaccctgcttcctgggcacctatacatgatgtctgaagtcttggccaaagaggaggcgcgccgtgcactggagacaccctcgtgcttcctgaaggtgagccggctggaggcacaactgctcctggagcgctaccccgagtgcgggaacctgctgctgcggcccagcggggacggcgccgacggcgtgtcggtcaccacgcggcagatgcacaacgggacgcacgtggtccggcattacaaggtgaagcgggagggccccaagtacgtgatcgatgtggaacagccgttctcttgcacctccctggacgccgtggtcaactatttcgtgtcgcataccaaaaaggcgctggtgccattcctgttagacgaggactacgagaaggtgctaggctacgtggaagccgataaggagaatggcgagaatgtgtgggtggcgccctccgctccgggcccaggtcctgcaccctgcacaggtggccccaagccgctgtcacctgcgtctagccaggacaagctgcccccactgcccccactaccgaaccaggaagagaactacgtgacccccattggagatggcccagctgttgactatgagaaccaagatgtggcttcctctagttggccagtcatcctgaagccaaagaagttgccaaagcctcctgccaagcttccaaagccacccgttggacccaagccagggctggcagacatgacggcagagctacagaagaagctggagaagaggcgggcactggagcactgattcggacacaccagggaccagcgggctagtcccagggcatggcccagcggccagattctttttcccaggattaaaactctgaccccagga

SEQ ID NO: 392266 - DNA, 584 bp, Homo sapiens
aatgtgagcccagctaagacagcagagccatgtcgccaacccttagtgacctcagaagtgagcccatctcagatcagcagagccactcagtgggcctggaggctcacgggaaagaattaatggttgtgtttgaagctattacatttgggggagttttgttacacagcaatagataactgatacagacatcccatggactatctctgagcatcacatactaaaaatgtgactgcaggagcagttaatcagagaagcagggtctcactgtaactcaaacagagacccccagctgtggctatggcctctccagaggagaagagtcatagtggttaagacacatagacagagcctgaaggcaaggttcactgtgtggcagccaatctccaaaggtggccccagggaaccatgcctcctggtgtttccacccttgtttagtcccctcccacacggaatctggattggccctaaccctcacattaaccaacagaatgcagtgaagtgccactgtgccagttccgggcctgagacttaacaagacccagcagctttggcctgtgcgttctcaggagactgctgccacctaa

SEQ ID NO: 392267 - DNA, 729 bp, Homo sapiens
atgagctcctacttcgtcaaccccctgttctccaaatacaaagccggcgagtccctggaaccggcctattacgactgccggttccctcagagcgtgggcaggagccatgcgctggtgtacgggcccggcggctcggcgcccggcttccagcacgcttcgcaccacgttcaagacttcttccaccacggcacctccggcatctccaactcaggctaccagcagaacccgtgctcgcttagctgccacggagacgcctccaaattctatggctacgaggcgctccccagacagtccctttatggggctcagcaagaggcgagcgtggtgcaatatcccgactgtaaatcctccgccaacactaacagtagcgaaggacaaggccacttaaatcaaaactcgtctcccagcctcatgtttccatggatgagaccccacgctccggggaggcgcagtggacggcaaacttacagccggtatcagaccttggaactagaaaaggagtttctctttaatccttatttgacacgaaaacgtcggattgaagtctctcatgccctgggactgaccgagagacaagtgaagatctggttccagaaccgaaggatgaagtggaaaaaggagaacaacaaggataaactgccgggagcccgagatgaggagaaggtggaggaagaaggaaatgaggaagaggagaaagaagaggaggaaaaggaagaaaacaaggactaa

SEQ ID NO: 392268 - DNA, 303 bp, Homo sapiens
gacctgggtcttttgttgggggcagggcaccttgcccttgaacagtcccttccaccccagctagccacacagcatgtccccgggctcagtggaccggtttgttttcccctggcactggacacttgccctccaatcaggtcacaatggccagataagatagaggatctggcaccagcccagcctgcccctgggaattctgcaccccactggctataggcagaaagagtaaagccaagtcctcacattccaaacccagctccatcctgggacacactttccacgcttctggaattaaaggaacct

SEQ ID NO: 392269 - DNA, 509 bp, Homo sapiens
actggttgccaggttggcatgaacgatgacatcagagattccgaccttcctgattggagggaccggactccgtggtgcctggagatcagttggacaacagtatcttctcagagctgttctccactcctgacttctcctaggcttgagaattgccaaccggccatcttcgatggccggttgttggaggagatggacaacgagaagaggatccggctgctggcagtttgtcactggtacctgacgtgtgcctgtcgggggatgtgcggaactcatcggtagcaagggaccatagaagttttgcattgacaaagttggtatgggaaatctgtctgtgcagaagccatagttgcttgaagcgtctggatcttccagccttacaagagctaggaacagtggagagagaagctgctgtatgccattgaggagaccgagggctttggacaggagtaaccgaggacgcgctcccaggccctccagcgcacatgtagtcctgagtcctccctgcctga

SEQ ID NO: 392270 - DNA, 248 bp, Homo sapiens
cagatcacccatgtcctgggttcaagtggggcccagaaatacccccatggttggctcagccttcgcaggatcacacccagcagcagtgctcaccggagtggaggctgagggacaggcactgactgtggacactcacgcactgtgtgaccaacaggtggactggccagcagactgcctgacgcagatgaccgacagacagacagactgacggctgggtagaaggggggcatgttgatggcatgccggct

SEQ ID NO: 392271 - DNA, 278 bp, Homo sapiens
gctgggactacaagtgtacgacaacactgtgcctggattgttgagagttttagttattttcaaattgacacagttttattagttatcctttaataaacatggtattctaattgatgtaggacttcagccctaggggcattgccagagcgtttcaaagaggttgctaccggtactacaacaagtacatcaacgtgaagaaggggagcatctctgggtttaccatggtgctggcaggctagatgctcttcagctactgactttcctacaaggagctcaag

SEQ ID NO: 392272 - DNA, 323 bp, Homo sapiens
cagcttcactccttctctagagaccctgcctttgggtctcaggcctcgtctttttgctgcttctgcagaccttccctatcttctcgtcacccaggacactggacctgctttcctgctttgggtcttgcctgtcagacagcatcatgtatatgtatgtttcctatttatagattcatcgtatgtcaggtcttccccattagaatgtcaatttcaaaagtacaaaaatttttaatctgttttcttcatataatcattctaggcacctagaatattgcctaacacagagtaggaattcaataattatttgctgaatgtatgccatg

SEQ ID NO: 392273 - DNA, 499 bp, Homo sapiens
agcaaattccctcagtaactgggaaatttacagtatttttgtttccccaattttttaatatttagattacctgaaaaaagtaaaaacaagtctcaaacaaaaaaaggataccaatccatatatagcaatgattaaacattgattgtttgcaatattaagaaagtgcttcaaattataacatttaacaaaatgtctgttcttacatatttacctactatcttccttacacctaaaggtttatcttcatcttttatcaggatgagacagagaaatttgctaaacttgttccctaaaaaaatcaaacttttcctgagcctaagacacaccctcactgctcggactttagcaaaaaactctcactccttaagggctttcacctgcaggctttatcgtgggttgaaaaaggcattataatgctgttacttcattttatttatttatttatttattttgagatggagtctcgctttgtcgccgaggctggagtgcagtggtgcaa

SEQ ID NO: 392274 - DNA, 537 bp, Homo sapiens
cccacaaaccgatatcagaggctacctattaaaactctcccatatacctaacacatacacatgcacacacatacaaaatatatacatatcacacacttagagaatgacagatttcaggcaatggccaatagtcagtattgagtttttctaaccccagaatctggttgggctttatgatctaaaaaaatgtggtttagaaaagaggataattggtagagctgtagtttgaaaatatcaggtcaaagttgcaaacatacttatgatggaatcatttcatttttagttcctttcccagaaaagctgagagagcacactgttccagctgacttttttttccattaatagccgttctattcaacaaagagctgcccacatgccaggaaagtgctacagtccttctaagcttttaaaaatggggatcaagctacatgcagccagttggaatacttaagatctttatgccaagacacaataacctgacctgcagctgttgtatgcctccatagtatatctagcctctgatacgggaggcggctc

SEQ ID NO: 392275 - DNA, 498 bp, Homo sapiens
cccacaaaccgatatcagaggctacctattaaaactctcccatatacctaacacatacacatgcacacacatacaaaatatatacatatcacacacttagagaatgacagatttcaggcaatggccaatagtcagtattgagtttttctaaccccagaatctggttgggctttatgatctaaaaaaatgtggtttagaaaagaggataattggtagagctgtagtttgaaaatatcaggtcaaagttgcaaacatacttatgatggaatcatttcatttttagttcctttcccagaaaagctgagagagcacactgttccagctgacttttttttccattaatagccgttctattcaacaaagagctgcccacatgccaggaaagtgctacagtccttctaagcttttcacgaccagggatctcgcaatacaccaccctgttggaagacggcacgatcgccagcctcgaaagactacaagctcgactttagagtatcg

SEQ ID NO: 392276 - DNA, 752 bp, Homo sapiens
catatacacacacaaatatattgttctctttaatcccaggtctgagaatctaacctaaagaaataatcaaagtataaaacaagctatatacatgccaatatccatctcaacattgtcatacagaattaaggaagaaacgaaaatatccaacaatagaacagttaaataagttatagtaactttgtatacaatgcaattatatgatgtgttatacttatataatatattctaattacatattagaagatcatatattattattcagctgttgaagtaatcacaatgcttataataaaaattaagataaaaatattatgcacgttgtgcacatgtaccctaaaacttaaagtataataaaaaaaagtactggtcatgataataatgaaaacaaacaaaaaatattatgtataattacatattcactttatttaactacaaaaatcttgaaaataaaggaaatggactctattaaaacatattgaaatatcaatagtaataggattaaaaaatataagtgtagctgaaaattaaaagttgactgtcttctaatcttgattttcaaaggttagcatgaagagtggcaaggacttctttaacaataaatatagccaaaaatagcagggtcttaaggaaacttattttactgtgtcactatataaaaataattactttttataatgagttttgatagtaggtgcttattattcctagtagtcagactgagtttcagtgagtcacttttattttcattt

SEQ ID NO: 392277 - DNA, 159 bp, Homo sapiens
tattcttaggaataatacaagttaaaaaaggaattaatagttagggcttattggactttgggggacaattgattcaacaaatttgagcacctaccctgttcaaggcactcattttgtgctgggaaaacagcacagaaagtcatttcttccttcagagaa

SEQ ID NO: 392278 - DNA, 516 bp, Homo sapiens
gcacgagtgtaaatctgaggtggctctagaattaaattatctcattagaatgggatgttgttttttccacagaattcctccattttagcaagagtagtagcaacagctgctatcatttattaagtgtttactgtctgttagatactgtgttgagcaatttgcctgcagactcaaagtggataatgttatcttcattttacaaatgaaggtctagaaagtcagtaaataatttactcacaaatgcatatttgatacatgcacagtctggattcaattcctgtctccctgtcctcagtttgtcttccaaaccacagcatgggtctgacttatattggtctattgaaactattggagtcctttcacctactgagaatgcccattagaagctgactttagaccgggcacagtggctcacgcctgtaatcccagcactttgggaggccgaggcaggcagatcacctaaggtcggaagttcgagaccagccagcccaacatggcaaaatcccatctgtacta

SEQ ID NO: 392279 - DNA, 307 bp, Homo sapiens
caataagctttaaaaagttagtgccacatgaccagcatcgactggcctcagacatctgcaagcactcacccaggccacagggtcaggtagagggctcctgggcccactgtagcccctgctgggtcagtgtagctggaaggctacgggcccttagtggggagccacagcctttcccactagggggcctctcactctgacatctccctgtggtgttcggaccaagggtggggagggagacacgctggccctaaagggaggtggtaatgagtgaagatctccaggcccagcccacaggggctccgtccat

SEQ ID NO: 392280 - DNA, 636 bp, Homo sapiens
atagaaattaaactgtctttaacttaaaaggtgaacttaaacataagagaagatctgaccactgggagagatcctgtgtttagagccaaagctcaaaaagaattgttttctctcctcttaaaaataatggacaatttaaataagcatttaagacatttccatagtgaaactattttgctgactgaatacaaccacctacttatatttatttactgttttcttaagtggaaataatcttttccgttcatgttaatattcacctcatgatcattggtattgctgaaagagaaaaccacagaagattgccagtcttttaggaatataaatttaccttgtattggagtctgtttttttttaaaaaaaaaagcttgcccacagttattccttaatcttttttattttaatatattgtactataaatcatgcatatttgccttaccttactttataaaccatctctgaaatttagattcttctgttttatagcactttataaattgaactttactgaagaagcagcatcttttcatgaaatgtgttctgttgcttcaaaatttagctaatgattagccaaaaagatgtttgaatagtttttagtaacttttttcttagcaactttcaaaacatattaagtgc

SEQ ID NO: 392281 - DNA, 100 bp, Homo sapiens
gtcttgatccccatcactggcgaggatggggtggtgaagggacagtggaaggggtctgaggcagcacagatgtagagaaggaagtgccacccactgggtc

SEQ ID NO: 392282 - DNA, 380 bp, Homo sapiens
cccaccatggccaggccagaccagcccaggtacaactgttgatcagtgagaattgagagcagttcccctaaacaacactccctttgcttcttctgccatactaaggcctaggcaaatggatctctccaagaagggaggcaactgggctgcctttccttgtaccgtcagggggccttattcctatcctttctgtcccttcttactcaccattccctacactcctcccatctagtggtgtcatcctaacgactgggggtggggggcacccagaactgaggttgctatagtaacagatgagctgaggctacagccttctatagttgtggactgtatgctctcctccccctcgccccccatgcctcatttgcagccttagtctc

SEQ ID NO: 392283 - DNA, 180 bp, Homo sapiens
tctggctttggtatcagggtaaggctggccttaaaaaatgagttcacctcttatcagatgtatggctttcctcataatttttgaaaggtttaagaaagattggtattatttttaaaaatatttgacagaattcagcagtagcagtgaagctctgggctcgttttttctttttgatgggaa

SEQ ID NO: 392284 - DNA, 196 bp, Homo sapiens
atggcacctctcctgggttctgcccattctgcgcggcctctgctctgctcaaatggctacttaccttgaagagcttcccctctaggctctacctggttagttcctattcttttcatttgttctatttgtttgtttgtttgtttgtttgtttgtctgagatggaatctcactctgtcgcccaggctggagtgcagtg

SEQ ID NO: 392285 - DNA, 304 bp, Homo sapiens
ggattttatactaagtacaatgggaagtccctggagggctttgaggagggtattgtatcagttagtttctgctgtataacaaaccattgcaaatctgagtgacataaaagaagggccttttatttgttcatgatatgtggcttggcagtatgggctgggctcagctgggacggcttgcctctcacacatggggagcggctgacctcattcctgcatttgcggccagcaaatttaagacagtaaatgttgattactttgcacagtgcccagctcaagatgaaatgttctaaaaattattattatc

SEQ ID NO: 392286 - DNA, 142 bp, Homo sapiens
catggatttgctggtgcagtacaactaggcttaatagggacatgcttaaatgtttctgcgacttcctgcccttcctggatctcttttagactccttaagggaatgaggttttaaagacataaaagcagggaaggcaaaagaa

SEQ ID NO: 392287 - DNA, 434 bp, Homo sapiens
gagacagagtttcgctcttgtctcctaggctggagtgcaatggggagatctcagcatactgcaacctctgcctcctgggttcaagccattctcctgcctcagcctcccaagtagctgggattacaggcgcccaccaccacgcctgcctaatttttgtatttttagtagagacgggggtttcaccgtgttggccaggctggtctccaactcctggcttcaggtgatccacctgccttggcctcccaaagtgctgggattacaggcgtgagccaccacgcccggccatgtgtagcttttaattgtggttcattaacccagtttctaagcaaattagaaccttctgtgtatctcccctagttctgtatgccccactggttcctgtagagctttatttctgaagggaagtatgggaaaactatggatatttgaactaa

SEQ ID NO: 392288 - DNA, 100 bp, Homo sapiens
ccattttaattcattctattccattgcattccattccactccactccactctatttcattccattccattccattccactccactccactccattccatt

SEQ ID NO: 392289 - DNA, 218 bp, Homo sapiens
ccacctcagcctctcaagtagctgggaacatgatgtgtgccactattccctgctaagttttttttttttggtagagagaaagttttgccatgttggccaggctggtctcgaactcctgacctcagttgatctgcctgccttggcctcctgaagtgctgggattacaggcgtgagccacctcacccagccaagctatactttttctttttcgagatgga

SEQ ID NO: 392290 - DNA, 414 bp, Homo sapiens
attttatccctcaaaaccagcccttataacctcatgtgccctggcccaaagggaggcagcttgtatagttttagcagcagagcattagcagtgaaacagatccagggtcagtgggataccaaatgagggagattcatgtttctagtcttcagaataccatgatttcggtttccttggaagtaaaacagggagagataaataatggcttaatctgcacttaaaaagtcagggcttagtttttgccatcagccccgataaatgctccacacaaaaggctatgcaatggaggatttacatgagcagatttacatcttcagttttacagtactagaaaggggaaaacatcccccaattagatgtagaacccattttcttttcttttctttctttttttttttttttttgagacacagt

SEQ ID NO: 392291 - DNA, 714 bp, Homo sapiens
gattgagtgcagtggcacaatctcggctcactgcaacctccgcctcctgggttcaagcaattctcctgcctcagcctcccaaatagctgggattacaggcgcatcccaccatgcccagctaatttttgtatttttagtagagacagtatttcaccatgttagccaggctggtctcaaagtcctgacctcaagtgatccacctgccttggcctctcaaagtgctgggaatacaggcaagagccacaccgtgcccagcctgagagccttgagttctgatctgtcttttcctctcctactcaaactcctctaccccgaggcagaagcatagctggggggatggaggtggaaattggttgttgcttttcctccagaagagttggttcaaaatttttaaatttaaagtaaatgatggtaagatcatgatgcaaggatgttagaggaagcagccagactttgagatcagggctgagagaaagtagtcaaaggccttctgctgagtgtactctgcctccagccactgagcccacttgccccatctctgtctttcccgggcctgctcacgtctctagcctcaggcactgcttcagaaccacagtaccatctggcctgggtgttctggctgttctcagtatttctgctctcatttgctggaattatgcaacactcggtccttcctccgagggccgccagatgagcctacttcagtgcatctgc

SEQ ID NO: 392292 - DNA, 1089 bp, Homo sapiens
gagcgtcccggcactgcaggtgcccgcagatgcaggcggggcacaggatgagccattggagacttccctcttgcttgagagatgggttctagaatgctgttttaaaataactcttagaggtgggttaagtgggtggaatatagatagagcaggaaactgcagaaggcactggctgggggaaagagtcccctcagagatgaggatgagttgagttttttctctgttcagtgaccgcgccccctgcccccgctccagcgaagccccctgtttatcaacccacttggtcagaagacatttcaccacagccagaaaccaggtatgaatgaatacccagggagctggaaacgcaaataagaacctcagaacttataagcaatcagccccatcactctaacaacaataacaacaacaaaataaatcaacaaagcttactgaaccaaagccaatggcaacaaagaatgctgaagtggcccccagattcccctggctccaccctcaggaccagctttccttcttctgtgagagacccgtgcaggccctttaaccagccggactccgctcggagggtctcgcctcggcctggtgctatgactgctgatgcctacacaactgcttcccctcctcactaaaccccagctcccatgctgccaccaagcggcaggttgctattctttcccggggttgaaatccaaatactacctgggctgtgtgactctctagtgtggatgcagattagggtggtaagccaaagggttgaactcccagttccacacccgatgggaaatgtcatctctacacagggtcagctacttcatgtccatcgcacgcaccaccaccacgtgcatggtctgcacctgacccaagctgaatgatggacatcacctgtgtaagcatcttgatgaagggaaaagctcactgggtgccagtcccatcccttccgtcctctgggcctcagtcttctctgtcaaacaggcaagactcaaaaggctcctggagacccaacaggccaggctataaagcaagacatgaccccagagcagccacctatctcatccttgggccagccggggcaggggcagctggggggac

SEQ ID NO: 392293 - DNA, 392 bp, Homo sapiens
ctcaaactcctgacctaaggtgatctgcccgcctcagcttcccaaagtgctgagattacaggtgtgagccacccagcctggccttaatttttttaatgtgtgtatttattaatatattaatatttcatttaacctttttttaaaatttttttttagacagagtttcactgtcttcacagagtttcattgcacccaaggctggagtgcaatggtgttatctcggttcactgtaacttctgccttccaggttcaaacaattcttgtgcctcagcctcccaagtagctggcattaaaggcacacaccataattgccagctaatttttgtatttttagtatagacaaggttttgccatgttggccaggctagtctcaaacttctggcctcaagcag

SEQ ID NO: 392294 - DNA, 512 bp, Homo sapiens
ctgggcatttacaatgtcgcaggcacagttctagacgctgggactacagctgtgaacaaaagaaagtccttacttctccaatcgttttcattctacggatcacgatttcaattatttcagcaaccatacagttatatggtctagaacatttctaaacctatcagcctcacgacaaaacacggcttcaaagttctttttttcccttggacgctaagtgttcttaacagcttaaaaagggacctcatatggttaattcagagcatgacaatattccttcttcaaagctcaggcaatgccaccacctcatatctataaagtacatcacagtttaaagcggatttccctccacgttcattttcaaagcgaaccaatacacggggtaggtacgttttctggtgctccacagccacccataccaacctttgacttggtttggaaattcccaagggttagggctcagacaggcagaaggccagctctacctgcagagctgacctggacaagtgtctccg

SEQ ID NO: 392295 - DNA, 659 bp, Homo sapiens
ttcgaggccgatatcgacgccaccaccaccgagacctacatgggcgagtggaagaacgacaaacgctcgggcttcggcgtgagcgaacgctccagtggcctccgctacgagggcgagtggctggacaacctgcgccacggctatggctgcaccacgctgcccgacggccaccgcgaggagggcaagtaccgccacaacgtgctggtcaaggacaccaagcgccgcatgctgcagctcaagagcaacaaggtccgccagaaagtggagcacagtgtggagggtgcccagcgcgccgctgctatcgcgcgccagaaggccgagattgccgcctccaggacaagccacgccaaggccaaagctgaggcagcggaacaggccgccctggctgccaaccaggagtccaacattgctcgcactttggccagggagctggctccggacttctaccagccaggtccggaatatcagaagcgccggctgctgcaggagatcctggagaactcggagagcctgctggagccccccgaccggggcgccggcgcagcgggcctcccacagccgccccgcgagagcccgcagctgcacgagcgtgagacccctcggcccgagggtggctccccgtcaccggccgggacgcccccgcagcccaagcggcccag

SEQ ID NO: 392296 - DNA, 260 bp, Homo sapiens
aatccttatgtagatccaccttttcttccctgacagctactccacattcccaaattatctcctcattctacttcaaaatttcattgcccattcataaaataaaactaatgttacctgcatgttgatttaaatagaattatcaggccaggtgtggtggctgacgcctgtaatcccagcactttgggaggccaaggcaggcagatcacaaggtcaggagttcaagaccagtctggccaacatagcgaaaccctgtctctact

SEQ ID NO: 392297 - DNA, 397 bp, Homo sapiens
gagagagagagagaaggagaaagaaagagaggagacagaagagaaacatctacaaagcaaggaacaccaaagattgctggtgcctaggaaactaatataataacataatatttggggcctaaagtgttacagctgcaccaatatctcccaaatcttgctcctagctcctgccccagcctgattttctcagtgactcccctgtgtttccctctgccaccagcccctccttctgcctgctgtgtgtgacagttcccttgccactccctccggcatccgtacttcaaactggggagttagttatttccattgtttcttattgcagcctctggctctgacgtttccagagctgttgcatagctctattgagtctatctccttaaatgcattttcatccact

SEQ ID NO: 392298 - DNA, 598 bp, Homo sapiens
ctccctctactacccattattctgttctggatctcaaacatgctttctttactattcctttgcacccttcatcccagcctctctttgccttcacttagactgaccctgacacccattaggctcagcaaattacctgggctgtactgccgcaaggcttcacagacagcccccattacttcagtcaagcccaaatttcatcctcatctgttacctatctcagcataattctcataaaaacacaggtgctctccctgctgatcgtgtccgattaatctcccaaacctcaatcccttacaaaagaacaactcctttccttcctaggcatggttagtgtggtcagaattcttacacaagagccaggactgcaccctgtagcctttctgtccaaacaacttgaccttcctgttttagcctagccatcatgtctgtgtgcagccgctgccgctgctttaatactgttagaggccctcaaaatcacaaactatgctcaactcactctctacatttctcataacttccaaaatctattttcttcctcatacctgacgcatatactttctgctccccggctccttcagctgtactcacactttcttaa

SEQ ID NO: 392299 - DNA, 775 bp, Homo sapiens
cgcggtggctcatgcctgtaattccagcactttgggaggccgaggcgggcggatcacgaggccaggagattgagaccatcctggctaacacagtgaaaccccgactctactaaaaatacaaaaataaaattagctgggcgtggtagcaggcgcctgtagtcccagctactcaggaggctgaggcgggagaatggcatgaacccgggaggcggagcttgcagtgagcggagattgcaccactgcactccagcctgggcgacagagtgaaactcctccatctcaaaaaagaaaaagaaaaagggaaaaaaaaaagaagaatgttaacttcagcgctgtctataatagcaaaaaataggaaagaatctaaatccttaccaaaagaaaataatatattcatataatggattactacatagctgttaaaatgaataaattatataaattccaacatgaaagaagtttaaaaacctaatgttgaatggaaaacgttatacaacaaacatgataacatgaatgaatggttaaaaagcataaaacaatacaaacacatttatttaaaataaactggaaggatgtaccaggtccatgacggtgttacgtctggggaaggggagatggagggcgtggccaggtggtaatcaaagagtcctttagtttggaagcaaatatgactaccaatgctaacaattaacataagttaattctacatatagagaagatatgggtgtaggctgcctttgtacttttctatatttttccatttcttaaaaaaaaa

SEQ ID NO: 392300 - DNA, 263 bp, Homo sapiens
tcagttgtgtttcatgatttaaaaaaaatagataagagcattacttcccaagtacctccactttataaaaataagtgaaaagagactcagaattgcctgtgtgtatttctgtatcctcactcacattcttgaaaattaacacccaatatggttgactgctgctgggcaagacctaagaatgatagagaaaccatttgattttgaaaaacatccacttcagcaggttattatataattacatgttcacagttaaatttataagt

SEQ ID NO: 392301 - DNA, 331 bp, Homo sapiens
cccgaagccctcaaagtcatccacgaggattagaatcaacttcttccaaactcctattaatgttggtattttgacctccttccaagaatcacaaatgtgcctcaggcatctaaaatggcaaatcctgactatgacctgcggcagcagctgagacacctgcgaagggatgcatcttttcttctgtaggcttgagtcaagaactctcggtcttcttggtaataccgggttggatgtcaaaagttgcagaaaaaagaccagaacgttcaggaaaaaacttaactgtatccagcaattcagatatagcgaaagtgaagtcaatgttccaggaagt

SEQ ID NO: 392302 - DNA, 245 bp, Homo sapiens
aaagactcaggggctgtggcctgcctcactgggaattggtgctgtgtgtggttagtgatgtctctgttgcttgtggatagtgggatgatggtgagatgaggtgatctttcttgcctatgcctcctttttttttttttttttttttgatggagtctcgctctgttgcccaggctggagtccagtggcttgttctcagctcactgaaacctccacctcccgggttcatgcaattcttctgcctcagc

SEQ ID NO: 392303 - DNA, 640 bp, Homo sapiens
ggatcatacggatgtgctggggctgcagcgggcctctacggatgtgcgggcgctgtgtgcatgttgtttgtacacaagactagatctcctggaccttgaaaacaggacagggagtagtatgtgtgataaggagcgctgaacacagcctcctaaaaatgtggtttgagtgttttttacaaggccatatgtgcctcatacccgaccgccaagagccacctggtggatgtctcttgtttgtctaaattgtagtttaaacaagctctctcaataaatacctggcagacagatcttagagtgacgctctctcaaaggaactgctccccgccccgctcagctagaattgtctgagtacttcattctcggcattcactacagccataagttgcacccaggtgcgatcttggctcactgcaacctctgcctccttggttcaagcgattcttgtgctcagcctcccgagtagctgggactacaggtgcccgccaccatgcctggctaatttttgtatttttagtagagatggggtttcgccatgttggccaggctggtcttgaactcctgacctcatgattcacccgtctcagcctcccaaagtgctcagattacaggcgtgaggcaccgtgcccagcccctcctaatc

SEQ ID NO: 392304 - DNA, 194 bp, Homo sapiens
gctccaaggctggggagggaggcctggatgatcctagtatgcttttcaggttcactgtctgcaggttctattttacagaccagactgactgtgaataaacctcaccacacagtgacatggatcacactcaccaaagacaaaactgcagaaaatactggcatcgatttgggtcaacgggatgattaggtgatcgt

SEQ ID NO: 392305 - DNA, 503 bp, Homo sapiens
cacatcctactacttatttatggcccaattttaacatgggggtggagttgaggttggaattgttcctccgcctctgctgcacatgctcagtaagcaagaacactgttgatgggaaaggcttagtcacagacagtgggagcacatccctccttggagctttgggtcgctgtgctccagaaacagttagttatagcacaccctgctcctggcatctactggaaggtgaagcccttgaccctaagaaacattgggaatgatttgtaccctccaaagtccaatagctatgtcggagggaaacgatcaaagaacatgattgaggagactcaaacagagatgtgcttcagacaacaccaagacagaaaattaatccattttaccaagttaacaatgtactgaaggcgaacaagagaccaacccacctgccaaccaacgctatgaagaaggagggttgatcagtctggctaacatggtgaaaccccatctctactaaatatacaaaatta

SEQ ID NO: 392306 - DNA, 454 bp, Homo sapiens
tcaactgccagtattaattatgaaagcaaaagaagaaaagtctataaaagtaatggaatgcgaataaaggtagaagggatggacacacttttgcatatattaggtggaacgttagcctcagtaatgaagagccaggacacattcaaacctgtgccagactgtctacggagaggatagaagtaaattaaagaagataacccagtaaactaatttagtcttgcttctattaaattttctattttaatttactaacttcattttaaaaatatgctgtcgtaacgtttatgacttttgcaacaacgatggcatttatcatcatgtgatgattatccatacatctgcctcttccaccaggtgagttcttgacagcaaagacggtgttttcatctctgcttcctccacagaccagcagcaaagtagatggcacagagcggacactgcaaatagtctcgta

SEQ ID NO: 392307 - DNA, 142 bp, Homo sapiens
tcttaactatacagtcacctgttgtttcacaggtaatcagacttagattagaaacaatgataaccaaggcccatttgccctaggcaaaaggctggcggcaggaggccttaaagagatttaacaggctctgtgttttatttca

SEQ ID NO: 392308 - DNA, 789 bp, Homo sapiens
ggaagtattcttttaaaccccaaatgaaagctaaatagaaattacagactcaacagagttgtatcagtttctttcaattgcaatgatggagacccaacataagctagcttagctagaatgggaatgaatggtgtcttcaatcgcaagtccagttaaacaacatatcatctctcttcaaacatatcatctctccctcttggtaggcttctttgtgaagatttcattctctctcccacagcaaacaaatttcttctgtgctgctggagaagagaaccacaaagtggcctagacctatacgctccaggccctgcaaactcagggagcacagaatctatatttcccaatgttaagtatccagaagattctgaatggttttgttagggttacatgcccttcctggacaaatcttaacccctgaagatggaatttatgattgaccaggcctggatcaaatgactagtagccatgggaaaatactaataccagtacaatgtaagtacatttgcaagttatgatattcattagaaaatcagtcatgttaattaaagaacctacagtgtgtatctaatccccaaagaggctgggcacggtggctcatgactgtaatcccagcactttgggaggacgaggtgggcaacctgaggttgggaattcgagactggcctggccaataaaatacaaaaattagctgggcgtggtggtgcatgcctgtaatcccagctactcaggaggctgaggcaggagaattgcctgaacccaggaggtggaggctgcagtgaaccgagatca

SEQ ID NO: 392309 - DNA, 649 bp, Homo sapiens
aggttcaagcgattctcctgtctcagcttcctgagtagctgggattacaggtgtgtgccatcacgcccggctaattttttgtattttagtagagacggagttccaccatgttgcccaggctggtctcgaattcctgagctcaggccatccacccgcctcggcctcccaaggtgctaggattgcaggcgtgagccaccatgcccgacccagaacttatttttaaatatggtgtgaggcatggagcaaagtttacttttttacatgtgtttacccaattgttccctcaacatttgttgaaaagacatttctccactgcattgttttatgtctttgtcgaaaatcagtgtatgtttggactcttgattgttagttccattgatgtttgtcttgatttattttttggccttgaaacaacaatttattatcatctctcatgatattggaggttggccaggttcagctgggcaattcttacttgggttctctcatgcatttgcagttggatgatggctggagcagcaatctggaggctcaaggaggctgaaggccccatatgactccttcatttccatatctagcacctcagtggagtaggctggaacagctggggaatgattgagcttctaattctctccctacctcctatcta

SEQ ID NO: 392310 - DNA, 533 bp, Homo sapiens
taagctgttgcatgtgcttggctcttatgttccaaaaagtacatttgtatggttttgtggaaactgtgctgttctgcttttgcagtctgtgagattctgattttttttttctcatcagcaattatccttgtcttggaacatcagagcttgaagaaagggattctagcagccccacctctctccttccctaatcccagatggttagaggccttagagagaggtggtggttgcctctgagtttacccagattcagtgacaaaccccttctaatttctaatcaatctggcagccttcatttaccaaaagttgacttttgatagtataacttttatacaccgtgagacaacttattttaaaaaacagtttagaaatatttaatttttttttgaaagactttttaaggtcaggcaccatgggtcatgcctatcatctcaacgctttgaggactgaagtgggaggatcatttgaggccaagatttcaagatcagcttgggcaacatagtgagactctgtctctaaaaaattaaaaaaaa

SEQ ID NO: 392311 - DNA, 491 bp, Homo sapiens
caacatatattctgagaaatgcctcattagacaattttgtcatagtgtacttacacaaacttaaatggtagtgcctactacacacctagcctatgtgccatatagcctattgctcctaggctacaaacctgtacagcatgttgccatactgaatactataggcagctgaagtacagtgataagtacttgtgtatctaaacctagaaaaggcacaatataggctgggtgcagtagctcaacgcctgtactcgcaacaagactgtgcaactgcactccagcctgggtgaaagagtgagaccctgtctcaaaaaaaaaaaaaaatacagtataaatagggtattataatcttatcagaccataatcatatacatgatctgtcactcatgaaatatgcagcacatgactgtatatgtatttttgttcagtaattacactgtaacttttaccttattttgcaacttttttttaacttaaaagacttaagagatttg

SEQ ID NO: 392312 - DNA, 170 bp, Homo sapiens
tcttccctgggaatttagctgggactaggaaggggttttcagttctttcagtggcttcttttgtttgactaaaggtttatttttctgtaattgcatgcctgctgcctcatccatggtacctggaagtgggactttgaaacccaggaagttaacaagacttcagcaagatt

SEQ ID NO: 392313 - DNA, 279 bp, Homo sapiens
ctttaaaaaactttaaatacatttagtgcctgcacttaataatttgtatctaagctgagttcaagatgtctaaaactggaagctatgagaaatttctgtttttcctcccagtctaacatactgttttttggacagaatccccatgtgacttgattaatgataaggaataatcacaaagtattttaaaaattattttctgtaaagcttcatagtctatatcttaagatggtaactatctctgtgtatatgttcatttattttaataatgcttttattatt

SEQ ID NO: 392314 - DNA, 310 bp, Homo sapiens
gttctgtggtctttggtggaagccagtttgttgtaagagaatgtagagcttattaatgtaagtcatttggggttatattgtggagggttgtttaggattgcatggcaggaattgggtaaatgaaaggtaacactaaagattggagatggtataatggcatatctacaggtctgtgtttccttatctgcgaagtgagacattgaaatagatctgttttgcaaattgtggattgcaaccctttagtgatttacgaccagcattaatcactaacccctttcctaccccagtgtaaaacagaaactatcagtgt

SEQ ID NO: 392315 - DNA, 762 bp, Homo sapiens
aaaaagtgggaggtgaggtgggtcctccccttttgagccacacggatgtagactgagagtggtctcattcccactagaacagaaagtactgttactagctgtgagactgaaaaacaaaagggggcagggatttaaaaacactatagccatgggattgacagaactttacacccactggcccattagagggctgacagaagaaaagaagtctaaggtggctttgaactttatagattggccaagtggatgagggtgaagccatatactgagaaatttgcagagaaaagaaagtaaaggctaacagcttaagaattctgattcgacgtcctttgaggatacttccaacttaacattttgtagtactagggataaattattggagcctcgaagaacaaaggggagtggaatagcatttgagtaggtgaccattaaaattcaagtggcacaaatgaggttgagatattcaaggcaccactagcatccagagaaatttattgtagttgaatttgaatatttacttttttatttttatttatttatttgagacagagtctcgccctgtcacccaggcgggagtgcagtggcacaatctcggttcactgtaacctctgcctcctgggttcaacaattcctgtgcctcagcctaccgagtagctgggactgcagatgcacaccatcaccccaagctaatttttgtatttttagtagaaacggggtttcaccatgttggccaggctggtcttgaactcctgacctcaagtg

SEQ ID NO: 392316 - DNA, 326 bp, Homo sapiens
atattttattggccctgagaagatgatattctaaaaaactgaatgtcttccaactttcttacctgtttttctttgtatcctagctccagaaggattaaaattaatctcagttattgctggttcttatggttactatattttactgactgtattaggccattcttgcactgctataaacaaatacctgagcctgggtaatttactttttaaaaagagttttaattggctcatggttctgcaggctatacagaaagcatagcagcatctctttctagagaggcctcaggaagttgccaatcattgcagaaggcaaaaagaggaacagg

SEQ ID NO: 392317 - DNA, 1227 bp, Homo sapiens
ggctcggcgactcagcacaggctcactcagacccggcctcttagagggaagcgcggcgcgggcgcgggggtggggcgggccgggggagcgggccccgaacacctgccggcctagcggccgagcagcggggatgtttagacgatcttccagcaatgcgaccgaggctcccccggctttcttgcgttggtgccttggcagggctgggggcggccagctaggggccccttgcctatgaggtctgctgacccagaaactttgctacgagcttccagccaaggaccaagctgaggccgactttgggaacggcagcaccgtggtaaagaggcacagcctgtcgtctggcagggtcagccgctcagccagtctgtcttcttatccactcagccggtccttgtggatcatctcctttacggaccctgtgttagaaagaaggggaattgctttgtcgaggactgtcagagagtgccaagagcttcttgatcttagactgcgcggatgggtttttttgtacctgatgtgtacaaagttccctgccagctcttgccaagaattcaaaggagtaagaataattgatcatatagccatcattgaagcagcgccagacactgtgctaagagcttcatatgcattaccccagcgctcctgttctcgaggaactcctgtcgtctagagaaggtgaaatatttacagtgcctgctgcgtgtggagtgacgtggaccaccatagtcgggggctcagacaaggggcctccagttctgatctctctcactccccttcaaatctgaaacgttgaactgtcctgcaggattgggtcacctctcttatagcctgtgatttgggattgtgtgtagcattgtccatcctaagagaacaggagccaagtccttttcactccaaacatctggcacattgtctctgctttctacaatattcactcatggccgggcacagaggctcaggcttgtaatcctagcattttggcagaccaaggcaggtggaccgcctgagtgcaagaccagcctgggcaacatactgagactccatatgtacaaaaaatttaaaacttagccagacctggtggcacgcacctgtagtcccagctatttgggaggctgaggtgggaggatcacctgagcacagggaggttgaggctgcagtgagccaagatcacgccattgcacttcagcctgtgtgatagagtgtgactccgtctttaaaaaaataaaa

SEQ ID NO: 392318 - DNA, 1173 bp, Homo sapiens
ggctcggcgactcagcacaggctcactcagacccggcctcttagagggaagcgcggcgcgggcgcgggggtggggcgggccgggggagcgggccccgaacacctgccggcctagcggccgagcagcggggatgtttagacgatcttccagcaatgcgaccgaggctcccccggctttcttgcgttggtgccttggcagggctgggggcggccagctaggggccccttgcctatgaggtctgctgacccagaaactttgctacgagcttccagccaaggaccaagctgaggccgactttgggaacggcagcaccgtggtaaagaggcacagcctgtcgtctggcagggtcagccgctcagccagtctgtcttcttatccactcagccggtccttgtggatcatctcctttacggaccctgtgttagaaagaaggggaattgctttgtcgaggactgtcagagagtgccaagagcttcttgatcttagactgcgcggatgggtttttttgtacctgatgtgtacaaagttccctgccagctcttgccaagaattcaaaggagtaagaataattgatcatatagccatcattgaagcagcgccagacactgtgctaagagcttcatatgcattaccccagcgctcctgttctcgaggaactcctgtcgtctagagaaggtgaaatatttacagtgcctgctgcgtgtggagtgacgtggaccaccatagtcgggggctcagacaaggggcctccagttctgatctctctcactccccttcaaatctgaaacgttgaactgtcctgcaggattgggtcacctctcttatagcctgtgatcactccaaacatctggcacattgtctctgctttctacaatattcactcatggccgggcacagaggctcaggcttgtaatcctagcattttggcagaccaaggcaggtggaccgcctgagtgcaagaccagcctgggcaacatactgagactccatatgtacaaaaaatttaaaacttagccagacctggtggcacgcacctgtagtcccagctatttgggaggctgaggtgggaggatcacctgagcacagggaggttgaggctgcagtgagccaagatcacgccattgcacttcagcctgtgtgatagagtgtgactccgtctttaaaaaaataaaa

SEQ ID NO: 392319 - DNA, 416 bp, Homo sapiens
accaatgtattgtacactcacatacatgtacatttatgctccaacaccttaccatataccacctggattcataaataacaggtctccacacaacatccttagacattttacacagacataatacacattcctacatttgtactcaaacctttcctccactctcacactgcatacttgaatacacacaaataaatgcatgaatctacaaacatgaccagatccagacactgcacaagacattcgcgccacacgtacaaactcaaaaaatgccatgacttccacatattacatacctgagtctgcacgcaccgggtggatttgtaagcataacagcattcctcactgattactctgtccatgccacacaccacacgcgggcactgaactctactcgctgcacccgctgcacgctgtgc

SEQ ID NO: 392320 - DNA, 565 bp, Homo sapiens
actaataaaaattactctcaaactctttcaaaaaagtgaaatagaggaaatacttccaaactcattttattaggctaccatcattctgataccaaagacagacaaggacactacaagagacgaaaatactaggccaatgtcagtaatgaaccctgatgcaaaaatcttcaacaaaacattagcaaccaaatttaagaatatatgaatggaatcattcaccatgatcaagtgggattcatcctttggatgcaagttggtttcaacatatgcatatgaatacatgtgataaaatgcatgaacaaagtcaaagacaaaaatcgtacgattctctgaatacatgcagaaaaagcacatgacaaaatttaaaaccttttcatgatgaaagctctcaacaaaacaagtgtacagaaaatgtatctcgacacaaaaaagaaccatgtatgacaagctcttagctaatgttattctcaacgtgaaaagttgaaagcttttcctccatgttcagggacaacacaatgatgaccactctcaccacttcttttcatcgttaacagtggaattccta

SEQ ID NO: 392321 - DNA, 574 bp, Homo sapiens
gtgattgaaaatttcctatgaactcagggttgggaatagcagaaaccaaaactgtctctggtctcaaagagcttataatcaagcagggcagcaaacataaaaaattatataaacacttatttgctgaaattgtgacaaatgacatcgaggacacttagagggtgccgtgagactatgatcagagaaggtgatggggagaaggagggtggctaacctagtgatcaggggagttgagacaggcttttctaggaaagtaatctttgaggtgaagcctggagtatgaagtaggagttggccaggtgaagagaagagagaatcaccttccaggtaaaagggaactactgtgtgtgcaacagcaaaaggaaggaacttatctatgtgccaggcattgtctttgtgcctccacgtgtggaatcccatttaatcttcatagttgatttacaaatgaggacaagacagtccagagaagtcatggagcttgtccacagccacacagctggtgggaaatggtagacctagacttagacccagcctatgtcttgaccctgtgcccagcaccactgcattgcaccct

SEQ ID NO: 392322 - DNA, 614 bp, Homo sapiens
ctgccagagtttgacggagactctctgcaatatcccccacagttgatatcttgtttgaagagaggcagggttgcacagtatctaaatgcacacgctttgagtcagagacacatctgggttacccaggctctaccccttactagtagtcatctagactaagtaccttaacctcactttcctcagttgtattagggggtgataacagtaccaacctcatagggctagtgtgatgcttgcatagactactaaagtggtacagtaaggacttagcatgtagtaagtgctcatacaaaatgttagctagcactgactactgctataataggcccattccaaagttaaaacagctccaactatcaggaaggtcaaaaccagctgtctgcttcctccctctcatgaatcctagtctgccctacagaatttcaccagtctctgagttgctgtcaacagggagggtggatggggccatggcccacctgagtctccttgttaccaagcagaacatgcccagcttcctcgacggttcctcaggtggcctccatgatcaatgtgctctcccctgatgtgctcctgcctgccaggggagagtctccgtcaactgggcgagctgatga

SEQ ID NO: 392323 - DNA, 493 bp, Homo sapiens
tcatgcagaccccagattcatggacccccaacaacttgtatccttagtggggaagggtcacaggcactcagcaccagccggggtcctgagggcagccgtgggcataaaccctgcaaagccacaggtgccaagctgcccaaggccttgggagcccagccctcacacccctgtgccctggatgtgggacagggtttcaaaaagggtgattttggagctgtaggattgaatgactggccttttggttttggagtttcatgggaccggtaagtcctgtctatgttttgttttttttctggcaaaattctttcttttggctgggaatgcttacccaatggctctacaaacattgtaccttggaagtagttaacttgctttatagttcagaggctcatgggcctaagcaactgtagccttgtgccagatgagactttaagctttcaacatttgaataaatgctgtaatgatataagattttggggaatctgggagggaa

SEQ ID NO: 392324 - DNA, 548 bp, Homo sapiens
aaaatcagaaggcagagaagctatgggactaggatttatagggtaaaaaggaaggagcagagagagagcaagggagctcaagatctttagagtttggttccaagtctttggccaagtactgacatgtacatgcatgtatatgcatgagaggaaacaacttgagaccagggaaagctcacacaaagctgggaataattctttctccaatgaaccaaagtggaaagatctcataattaacagggcatgtgtagtcttcaaaagggtattgtgttggtggtgctgaattagacctggactaaagggtattcttgacccactgttagaaatattaaaggcaaacctggaaaaggagcaaactgattccaagtcacttaactgcttgccagaacaaagtctgacattctttgaaggaatacagcaaaatctagcacccaaaaatataaacattttaaggtctggcattgacttaaaaattactagcatgaaaagaacaagaaaaaaatgtaccctgtaacccagagaaaaagtaatcagtagaaacaagagtc

SEQ ID NO: 392325 - DNA, 776 bp, Homo sapiens
atagtttaagagactaatgcattaaaacttattttatgtttttggacacaatatataaagataggcttttgtcacaattgtgacagcagttgaaagaggcggggatggagctgttataggtgcagaatttttacatattgatgttaagctggtataaatttagagtgttataactttaggatattaaaagaggtacaaaaaggctatgagacatacagagaacgaaggcatatagaaagcaaaatgacagaagcaagtttctcctgagcagtaattactataaatgtaaataaactctccaattaaaaagcagaggttggcagaatggattttaaaacaccatactccaactatatactgtctacaggagactcactctagatccaaagacacaaataggttgaagtagaaggatggaaaaggttatgccatgcaaatagcaccacatgatccagcaatttcacttccgtgtatatactcaagagatttgaaagcagggtcttggccgggcatggtggctcatgcctgtaatcccagcactttgggaggctgaggcgggtgaatcacctgaggttagaagttcgattccagcctaaccaacatggtgaaaccccgtctctactaaaaatacaaaaattagcgaggtgtggtggtgcatgcctgtaatcccagctacttgggaggctgaggcaggagaaacacttgaacccaggaggcggaggttgcagtgagccgagatcacgctattgtactccagcctgggcaacaacaatgaa

SEQ ID NO: 392326 - DNA, 355 bp, Homo sapiens
ctcatagcaagttgtcccacaatgctctaagaaggagagctcctccagcccagcagttgctcattctggtttacatggggttgaggaggcagaggctgctgtcctgcctagaactccaaaatatcatgaactaattaagaatcactggccgggcacagtggctcatgcctgtaatcccagcactttgggacgccaaggcgggtggatcacttgaggtcaggagttcgagacaagcctggccaacatggtgaaaccccgtctctactaaaaataaaaaaattagctgggcatggtggcacatgcctgcagctacttgggaggctgaggcagaagaatcacctgaacccaggaggtg

SEQ ID NO: 392327 - DNA, 398 bp, Homo sapiens
ggcatatttttatcagaatcatttttgttacttatttatgtccactgtagaaatcggtaaacataataaacaataatgaaaatgaagatctcagtgtcatcacccagatacaactactgttagcaaaacgatcacagtatcttcagacttcataggaattcacatgaatgcacatgaaataaaatgtgttatatattgtgtttcaaatatgatttttgctcttaatgttttgtgaacatctcttgatgtaatctataatttttataacagttgcatagaattcccttgtgtgaatgcagcatacttgttcaatcagtcctctgttcatggacattatgatcatttgggttctttggctattgtgaactaagttatattaaacactcctgtgtattcat

SEQ ID NO: 392328 - DNA, 975 bp, Homo sapiens
tctgaacagaagcccaccctccacccctgacaccatgacccactgttgctccccttgctgtcaacctacatgctgcaggaccacctgctgcaggaccacctgctggaagcccaccactgtgaccacctgcagcagcacaccctgctgccagccctcctgctgtgtgtccagctgctgccagccttgctgccgcccaacttgctgtcaaaacacctgctgccagcccacctgtgtgaccagctgctgccagccttcctgctgcagcacaccctgctgccagcccacctgctgtgggtccagctgtgaccagagcagctcctgtgcacctgtgtactgcagaagaacctgctactaccccacaactgtctgcctgcctggttgcctaaaccagagctgtggctccaactgctgccagccctgctgccgcccagcctgctgtgagaccacttgcttccagcccacctgtgtgtacagctgctgtcagcctttttgctgctgatcaagtcccgagagaaccaccatcctcacacaacaactttctgctcaactgacttatcttttgggggactaatttaatttgctgctgacagccaccatgctctcacccaaatttttatgaattctctacatgtttaaaatcttgggaatctgcttgagggagggcagaatacttcatcctgattctctttttccttacactttgtggatcatgtgccagcttcgtgtgttctcaattttgagtcatggtctcagctttgactcaaaagtcaagagcttcattctctgcttctaaggaatttaggtttctgcaactgatcaataatctttgcaatcatatttttgttttcaatatcctcctcatggttcttgtatccttctttcttcttttcataactttgggttatgtttctgctaccagcagagattcttagctatatgtttctgaataaactctgaaccatcctcatctcatat

SEQ ID NO: 392329 - DNA, 347 bp, Homo sapiens
aaaattcccagcctagaccaagcaggaaaaacattgatttcaatgaaataattgataataatgaggataatgtttttatgattttcatttgaaaatttgctgattctttaaatggtttgttttctacattgacggaatttttctcttttaacctatctgtagcttatagcagttcaataaactataccgcagtttattgaactgtaattgaaatatttacttttgctttctacctgactgccccagaattgggcaactattcatgagaattgatatgtttatggtaatacacatatttgcacaagtacagcaacaatctgctctctttgtaacaggacacatttcaa

SEQ ID NO: 392330 - DNA, 256 bp, Homo sapiens
tgcttgaatgttgtatatttgctaagatcccagatgatgaaatgagaagcacagttttcatgctttctccttactaaccttgtgctggttatacttttttaaaactgtttccttgatgttgcaatggtgtaatccagtgagaatagatgactggctcaaagtaagcactcaataaatattgactgtgttgactctcattactttaatcattagtatctttaaatacacttaataaaagcctttcttaacaagcata

SEQ ID NO: 392331 - DNA, 323 bp, Homo sapiens
cccccccaaggagcccacccgggcgcaaaaaatgggaaccccaattcccaaaaaaaaaaaaaaaaaaaaaagaaaagttcatctgttggtttcctggcatgtgtttccagctgagagatgctggcctcatttttttctctcaagacttcagtgggcagtggtagaaaacatgactaccaaattcagtctaagacttaaacctatcagttgctcatccacggaagtgccccaggactccgttagatttgcctcatcccacagtccttccccagtttagggccaacctgtattcttggtgtgcacattttcccacatcatgacca

SEQ ID NO: 392332 - DNA, 347 bp, Homo sapiens
ttcccccagatgttcttaatttgggggttattttccattgcatgtgggcccttcagtactgtaaatatttgacttcaatattttccatagcttgaagaactttacagtggtcacttcagacatggttacagaatgttctctgatcctttcaggctgctctgtaaattagaaacttggtagttgatatcttgtgggctccacacaccattttttttttctcagactttgatgtctaaaagtgcattgtgttatttaggccttaggcacgtatagagatatccctgaagcatagatcagggtggctcatatgaatgaattttttccaattaatttatcctctatggtgg

SEQ ID NO: 392333 - DNA, 219 bp, Homo sapiens
aaacagtgatttacacagacaacatatttctaacttaggtgtttgtgcctcctagagttgaccgatgaactatcaaattgtcacacagttctctcactaggctcctaagtgtctgtgtcacagccagtggcaattttaagtggtccaaggatgaaagtgttgagcaactaagacagagccacctgtgaatcccaagagctcccgctgccccaggatggg

SEQ ID NO: 392334 - DNA, 305 bp, Homo sapiens
tttttccccttgcaacagcaataacatgaggaaaacttgactcttttaaacaaagctaagtcacaaccatttagattttattctgagtccaaactgtgggtataaatgataaactataaagtatctactcaagtgcatacctttgactccacaatctgtttcagatattgccaggtttttctgcaatcctttatgcctcaagagttgtaatttgttaagtccacttccttatttcctactttctcccaaattcatttccaatcaggctttaattaccactccttaaaagaataacttaactttca

SEQ ID NO: 392335 - DNA, 279 bp, Homo sapiens
cagtggtgcagtctcagctcactacagtctccaccaaccaggttcaagtgattctcctgtcagcctcccaagtagttgggatcatagaccaaaatcttcgaatgcattggaaatacgaaagtagagtgtctcttgccctcctggagtttgtgatctagttgctagtgatgaaggcaaagtggatattcagagaacagagtcagaacttcatctgggatcagagcttcttgtgttcactattgctgggcccaattgcaaatgagactagtatgatgtccc

SEQ ID NO: 392336 - DNA, 721 bp, Homo sapiens
tcccagttgtcagtttatagaaatatactctcatcaaggtagcatcatcttcaatcaaaaatatctcaaaagaaaatagtagtttaatgaaaatttggaaaaaagtaaaacagatatccaaataatgcttaacattaattaattaaggcaaaaatatgaactcccttacatgcgcacaaacaaaaattttaatttctttaattcacttccaagttttttcttttggaacttctactagtctatttttctaaaggttatttcaatttaattgtttatctttttaagcaggagaaaaagtaataaaacaataaaatgtatttatttataagatgtatctacattacatgtctaaagttagagctagatatttaacttggaaaatttttctattattttctaatccacatatcagcataaaattaggacatctcatttattatttctaacatttataatatgcacagtttactaataaaatttcagaatgtataaaagagaagtactatttaacacaacaatgagaaaaaaattatgctttagcagccctccagaattgcagaaatcagaattcaactggttttacattacagtagaatattttacggaaataaatattagtctacataaatctctaatgagtacattacaatcagcagtgtatagtcatgaaaataaaatgttattgatgtgcctattgactatgaatgtaatgatagaaaag

SEQ ID NO: 392337 - DNA, 521 bp, Homo sapiens
tggtcaagggaggccatcatcatagtagctttgaagaaaagacctatgagcaggcctgaggctctctggataaggccatggtgtatcgcagagaggaggagcaatgctttgagctacgacatgtcagtactagcactagtttgctgtgtgactttaggcaagtctctctccctctcagaaccagttttcacatctgaacttatgtggtactgtagggataattgcactaaagacacttctacaaacacttcctaggattctataatcctcatcaaggctgtcctcagacaaaactgtgaagttggcaatagttccagttttcttccttttctggtgtattttcctccactaggtggtgcctgtgcctgtcaccctcaggggccaagtgtggacacattttcggcttccacacctcagcaacactggggaaaaaagaagatggtacaccttcttgctaagtaccattgactggtaacaacttggaatgttactgctccattggtggatactcttttaggact

SEQ ID NO: 392338 - DNA, 368 bp, Homo sapiens
gagagggaccaggggcaaccagctctccccagaaaagtgaaacagagggagaggtgacagagggactccaaaatgtcagggctgggaggcctcgcagacccctcagtgccctgtacaggggtgagaagccaggcccataggaggaaagaggcttgcttgctctagatcacacagggagaacccacagtgagagcccacagcgagaacacttcgcctaggactttcccactagagcacaggggaatgactccaagaagggagtccagtcgttagtaggagttctggaggagggttagcacctggggggctctgggagcgctggaggagggagtgagaaagggaagcagaggggttctttggagagaatg

SEQ ID NO: 392339 - DNA, 397 bp, Homo sapiens
cttcaggaagaaattgtaatgcttttaaaatactccctatattctattcattaagaaaccaaatccctttgatgtttctttattttcaatgataccagatggtcttggtgtctgtatactcaagttggagaatttaattaagagtttataggtaagggttcagcaaatttcaaagctagcatgcaaattatttattttggctaaactgttatttgctgataaacatttgttcccccagaccattgttaattggcagtcttggtatgtagctcatatcaggccacatgtagagtatgtagatgaatgtgaaccaactagagtgaactcagagaatggaaaccatatgaggtgtttgaatgtcatgaggagtggctagaggtactgagaagcctgcttg

SEQ ID NO: 392340 - DNA, 623 bp, Homo sapiens
cccatatgatccagcttggttgcagtgagccgagatggcgccactacaaaacagcttgggcgacagagtgagactccccctaaaaaaaaaaaaaaaaaaaaaaaaaactgaaagcagagacttgaacagatatttgtaggccaatatttacatcagcattattcacaacagtcaaaagatggaaacaaaccaaatgtctaccaatgggtgaacagatatttccataaatgtgttatatgcatacaatggaatattattctacattcaaaaaggaataaaattctttgacatggtacaacatgaagtttgcaaacattatggagtgaaatatgccagacatcaaaggataaatatgatttcatttatatgaagtccctagaacagccaaattcataaaagacataaagcagaatgattaccaggaagtaatgaggagttagtgtttaacgcatacagtgttgcagtctgggataatgaaaaaagttctggaagtggatttagttggtgatagctgcacaacagtatgaaggtacttaataccactgaacagatgcttaaaaatggataaaatggcatattttaccacaacaatttaaaaaatcaaacatgtagtactcaaagta

SEQ ID NO: 392341 - DNA, 531 bp, Homo sapiens
cctctttaaaaggcaaaagttgcttcacccctaaaaatatacccagatctgagtctgagaaatgccactctattcaaatgactgcaaaacgtctgatcacccagcaccccaagacctcatgtggcctttatctggcctcaaccccaaacctaagcgcacaccctggcactgacgtctcctggcagcatttgactctggtggcatgcaggatacgcttctgactaaaaagtctcatcactgacttgaaaacacattacacagcctcaaagaacctccaaccccaagacccttggggtcacaacattacacagcctcaacgaacctccaaccccaagacccttggtccacagaccccatggattggagacaagctccttgcgagggcaccccagggccttcctctgcagtccccaccactcctggctcagaagacatcaaaggtcacagctcattctgggttctgcatgccagcctggttcccactatcctttaggaacccccaccaccaccccgccgagggtcacttgagaa

SEQ ID NO: 392342 - DNA, 158 bp, Homo sapiens
ggatcacctgaactgggaggttgagattgcagggagctgtgattatcaaagtgcgttccgcctggtcgacagagcaagactgtctccagagaaaaaagtgagctcccagccagccctgagagtcgtattctgcacctggtagacatcctcatggtgct

SEQ ID NO: 392343 - DNA, 423 bp, Homo sapiens
agaagaaaaaccaggaatacgtgttggctcttctgtatgctaatgcatgtaagagctattacaggtgtaaaaagttgcttagttgcacacattctctctcccttactcagtgtttcctcagtgtatactatgtgtcagccactcttttaggtaagcatgtaagaaaatagctgagtaagatatgaagacaaatgctgggctgctaagaacttaagattagtgagaactgagcataggctctgggtatcttgacaagagttatagggatgaaggatgaattggagggggcttaaaaaaggaagagagaggagactccacgagcacagataactcttttagggtgtctgtctgtaaaagagacacacacacacacacacacacacacacacacagacattccccttgttttcacttctgctatca

SEQ ID NO: 392344 - DNA, 372 bp, Homo sapiens
agcggggaacaatcacttgggtgagatcatgcatttcttcacactccagtatatcatcaagatatgcaaataaggactgggaaatgccctcacagtatccaaggattcctctctctacacctgaagggagacttaactggagcatcagtgatacaaatgcccagtaacagcaaaggcaaagatgtatcagccaagccatgggctatcagggcccctatccatattcccaaagcttaaagtgaaagcaaagtctctcgagaaaataaaaacagacacctctccacagagctgcctttttggggagagaatatcttgtgaaagtttcgcctgacagttcacatggactgactacagagtgaaaacaagtcaagt

SEQ ID NO: 392345 - DNA, 236 bp, Homo sapiens
tgcccgtggtggagcctaggagaggcccctggctgggcgtggcgttccagatttcacggctgctctttcccactgacagtgtggtgtggacgctgccaagggagtctggagccccagagggtggaggtgcaggacttccaggagcgtccgtcgcactccacccgagggcgagcacctcagtggccgcagtgggtggatgcatgctgtgccaggctgatggctggccccggggcaca

SEQ ID NO: 392346 - DNA, 506 bp, Homo sapiens
cttcatttcttttgttgctgggtactggggatttattttggtccttttattgtgtcatgtttcctgagtcttcaggttccttgtagcttgtgttggtttctgcacatgttaataaaggtcaatttgttcagtctgtgtaaagattggctttaatggggaaaaactttaaccaattaacccagaacgaaattctaggaagttctgtaacctttcctacggatgtgtattctctgaacttgtgtgtgtaggttcttaattacaggaatttgctgccctttgctttttcaaaggcctgtaagctctcgcttcttcttttatgagactgtaaaccgtaggtcaagacattggcagcacactccactcctttccttccttctgtgtggagaatatataacctctgcactttctccaaattttacagagccatgcggggtgtagaaagctgcaagttctttttccttcattcttagctgtccctccaaactataccagttttgtcagcattc

SEQ ID NO: 392347 - DNA, 246 bp, Homo sapiens
cagctcctcaagtgcaatgtccctttacaaaaataaaagttcatatagattgcccttactatcctaaaatcatatccttttggaagacaagaatacccaatttaggggcatgactaaagaatgtctatccatgggggaggagtgtgtgatatgtatgcagtttcctgaccacagctacgtggctggcctcctaagtcttctgtgtttcagcagttttcaagtaaaaagctatgattaccttaagca

SEQ ID NO: 392348 - DNA, 776 bp, Homo sapiens
aataataaaatgaaataagaatcaaataacacatgttgaagggacagagcaagcttcacaaccagactcagagacagcagggatgctggaattaccaggcgggaaattgaaagcagctctgattaatgtgaggggctgtaatggataaagtaggcagcatgcaggaacaggtgcgcaatgaaagcagggagatgggaatctaagaaaaaaccaaatgaagtgacagagagcaaagcacggtgacggaaatgaagaatgccgctgatgggctttgatggatttgtggactggacacagctgaggagaggatctctgagcataaggttatctcaatagaaacctccacatgtgaaaagggaaaagaaaacccacccacacgcacacgcgcgcacacacgcgcgcacacacacagaacagaatatccaagaactgtgggacatctacaaaaggtgtagcatgtgtaatgggaataccaggaggaggagaaagaagaaatacttgaaatggtaatgacagatttctccaaattaatgtcagacactaaaccacagatccaggaatctcagagaatcaggacaaatgccagaaaaactacacctgggcatatcattttcaaactgcagaaaatcaaagataaagaaaaagtcctggaaggggccagagtgaaaaaaacacattacctgtagaggagcaaagggaagaaatgcacctgacttatcctcagaaaccaggtgagcaaggagagagtggagtgagatgtgagggtggagagagaa

SEQ ID NO: 392349 - DNA, 242 bp, Homo sapiens
tttatttttaacttttcttttctcttacactgaatatactgtttctagtaacactattatttaaaaattagtataccaatattactactgagtaaatattattataatttctttgcaattctttttgttcttaccatatcctaataagtatatacagagtactgtgctctacaattacctgaaataattttctctgtctttcttttgtgctttctttttaaacattttgatacagttatgat

SEQ ID NO: 392350 - DNA, 265 bp, Homo sapiens
atgcacagaaaaatggctcaacatgcttaatgactagaagaagtctagaagcagcaagaaggtaatgtggagaggggaggacctccatgggacttccatgaccggtatctgcagagccaggggtacaggcacccagtgctgtggactggcaccacctctcagagggtgggtagcacactgtccttacctgggggacagcaggcctggtcaccagcttttgtacctgtctctgcaagcattgcattgctggaagagaatctcatgc

SEQ ID NO: 392351 - DNA, 562 bp, Homo sapiens
gatcttttctttaaagttaagtgagattccccagagaaagctcccccagtccactgttcagagggggtgagtcccgctgccagagttctacggctgagtgggagagaagggctgggctgtgggatccttccccgaagctccctattctctgtgtgctgccagtgccccaactgtgcagactgcccccagtctaggcacctgtaactctgtcctctcttgacatgaaaccttggaatggaggggaaactgtgacgctcccttggccgaggggagagggattctcaataactgcttcttgaagagacttcaaccagcgctcctgttttcataacccgctttcctgcccccactcctgtaagtgcgcaaggtcactaaggcccgaacctttgggtgattccgtaacagtgtacactcggtcaccttccagtatttccatgatgtcttagcatttgtttttctctcatgctgttaggcactgatcattcatcagctttctggcttctgaaaccttgttgctgtcatcctcttcttgtttcctttgtccttgtgggattatgcttta

SEQ ID NO: 392352 - DNA, 707 bp, Homo sapiens
gttcatcgtgcttgaggtttgttaaatttctctgatctctgggtggaattttttctcaaattaaaaaaatttcaggtcattatttcttcagatttttttctgtttactaccctatttacctgtctctagcccttctcttctggaatttcagttgtgtatatattagcctgtttgatattgtctcataagttactgattctgtgctcattttgttatctttcagttatttttttaactttctttgtatatagtgactattttaaagaatatgctaattccatcatggtataatctctaaatttatttcagttgactaaagtatactcttgttcatgggttacatttcgttgcttgtttgaatctctagtagttattgactggaggtggatattgtgaattttgggttgttctgtggttcattttgttgtcttcctttaaagaatgttggatttttttcctggcagttatgtaagtcacttgagaattttcttgatcctttggaggtttgtttttaagtcttttagagcaagtctggtgtagacttcactctagggatagttaagctcaatgttaaggtgtgaccgtttcgtgtctcttccgaagtacttcaggtgtgtgaagaagaagaatcattctggctggtcagaacttgaagatcactttatttgatctcttggaatttgatcaattccaagagatatagctcc

SEQ ID NO: 392353 - DNA, 450 bp, Homo sapiens
atcatttattcctcgatgtctgctttaaaaagcaaagtcatatttatgtcttccaatgtctattgcaaagaaaagtaaacacgaagaagaattttgcttgagtccatgctttgccgctaatttattgagtgataaaagtaaattctctcactcttagtttcttatttgaataataggtataaataatgtctcccctcgtctctcaacagattttctttattagatttagaaattatatggcatatgtcaaaatcatgtacacagcatacatctttaaaatcaatgacaatatttagttccagtggcatgatagatgtctcagtaaggtaatgaaacccttgctgaagtgatgctctctgcaactgcagctctagcttccccatcggatgagtcggtggaatgcaggggatcacagaaagcaggtagcacgcttcccacacaggtgctact

SEQ ID NO: 392354 - DNA, 311 bp, Homo sapiens
cactttaaattgcatcccgtgctctgcaactgctcctggttttcttttggcaagacaatctcactctctttgcccaaactctgaagtattacaggcaccagcaatgcggtcagtgcaggttaagaaactgtaatgtgccatggtttactccttaaactttcttatcaacttttttcccttctgtttcatggtactttcaaattgcatttattataaagcaaatagaaagtgtttcacataacttctcccacaagcaattttaatgagctttggctttagtaatggttttaatcatgttagacttgatcttc

SEQ ID NO: 392355 - DNA, 430 bp, Homo sapiens
cagagtccaaacagtgctcagagtccaaacagtgcccagagtccaaacagtgcccagagtccaaacagtgcccagagtccaaacagtgcccagagtccaaacagtgctcagagtccaaacagtgcccagagtccaaacactgccttgagcctgcgaaatcaaagcttcagtgagctatgatctcgccactgcactctagcctgggtgacagagtgcctggggtgctctctgggtgctcacccagaatgcctgggtgacagagcctgggggttaccacccccaacccacctctcattaaaaaaaatgtgctaatacgatttaaccttgtatttcagtatttaagtcacgatttaaccttgtatttcagtataaccttgtatttcagtatttaaccttgtatttcagtatttaagtcacaggatatcaaaag

SEQ ID NO: 392356 - DNA, 177 bp, Homo sapiens
cttgagacatttggcatagatatgcaaaggcacgtgaggcatttcttgcttgcatctgcttagaatattttggggagaaaagatgtacacaaatctgtgtggcacaaaccagcagatttattattattaaatagggccttattattaagggcctactcaatataaagtgtcttaggg

SEQ ID NO: 392357 - DNA, 210 bp, Homo sapiens
tagcctgagtgctgtcaggctaagaaatgtccttaggtgaccaagtgtgtagaactggtcataatattttaggagccactgactccttaaaaaaatctgatgaagacctggcacggtggcacacgcttgtaatcccagcactttgggaggcttgagcccaggaggtggagagcagcctggccaacatggtgaaaccccgtctctactaaa

SEQ ID NO: 392358 - DNA, 747 bp, Homo sapiens
gagatcaacatttattataaattttctataattaatacagtgtggtattcgctcaggagagaaaaaatagatcaatggaaaagaattgggagcccaaaaacagatccacatgtatacagtgagttagtttattagccttgaaatatgttggagaaataatagtcattttaataactgatgctgggttatcagttatactgataactactacttaacactacttaacactagctcttcatacaactacaggcaataaatacaaatagcatgcagctggcagactgggcccagtggctatgcctccactagactgcccatagaagcataataacagctaccgaagatgtctgatctgtcttgtcttttttttcaggtataatttacataaagtgcagactttaactacatttaagttttaacaaatgtacatatccttgtaaataatgcccattcaacatgttaaacattttctttaccccaaaatttcccttgtgcccctttcccttcatttctttccaaaaaaggatataatcactgttttgctttctatcaccatatgttggttttgcctattcttgaactttatataaatgaaatcatactgtaatatactcttgcgtttggcttttttttcattcaacatggttttctaaatttgtaatttataataaatagagtattgcatattttattattgtttataaattgtgttctgaaaacattctatattagtaaaatttatagtaa

SEQ ID NO: 392359 - DNA, 368 bp, Homo sapiens
acacacacacagtcccaggttcccacagtgtaacagaagttagaggtttttgttctctcctggttttgctacacacagaaagatggactcacccatagcctcaaagataaggccaactttgtttctagtccctatccactgaactgactcccacaaccaaatggaatagtctttaaacctgctgggctttaaaattctgtgagataatcctacaagctcccgcctctagcccccaggcaaattcttccagaagaatccaactacccatgattaaactaccatgaaatattaatatacaggcttacctaaagaaactagcattaggctgggcgcagtggctcacgcctgtaatcccagcactttgggag

SEQ ID NO: 392360 - DNA, 612 bp, Homo sapiens
tgaaacctcctttgcaaaaattataaatgaggaaattatggcagtgaaagagatcagacctaatccactccatcctgcttctaacctttaagccatctttgttcattcctagctgtaggctgaactagccttgggaaggaattcagttcatggtttgactctgaaacaaaattgataatagcgctttccccaaaagacctccttcttgcctggggaccagtctgcctttgtaggactaacaaattagctacaagattagaaattatggtttaggggtcatgcagcctctggctataagagtgggaacctcccctattgcttctagggataacatcactattgcgaaacctgaaattagtgcttgagatattttgtagaccctgcacttgatggatcagctgataccacctagactggcaatctggctcaaccagttctgtgatcccatccaggaacagagcacagcaagaaaacctcacttgatcccctgtgattccatctccaacctgaccaatcagcactccccactttcctgagccactacctgtcaaattatctttaaaaactctgacctcccccttccatgctcagagagactgatttgagtaataa

SEQ ID NO: 392361 - DNA, 1142 bp, Homo sapiens
tgaaacctcctttgcaaaaattataaatgaggaaattatggcagtgaaagagatcagacctaatccactccatcctgcttctaacctttaagccatctttgttcattcctagctgtaggctgaactagccttgggaaggaattcagttcatggtttgactctgaaacaaaattgataatagcgctttccccaaaagacctccttcttgcctggggaccagtctgcctttgtaggactaacaaattagctacaagattagaaattatggtttaggggtcatgcagcctctggctataagagtgggaacctcccctattgcttctagggataacatcactattgcgaaacctgaaattagtgcttgagatattttgtagaccctgcacttgatggatcagctgataccacctagactggcaatctggctcaaccagttctgtgatcccatccaggaacagagcacagcaagaaaacctcacttgatcccctgtgattccatctccaacctgaccaatcagcactccccactttcctgagccactacctgtcaaattatctttaaaaaacttctctggactttcccctcttcacaggctcaagaagaagatcggatcgagatgtaatatctaaaatcttcgggtctccaggcaaaacacagacagcgaaaccagcacacaagaagacgcaagaccagtgtgtgtgtcgggggcagcagcaggcgcctcgtgaaaaaaaagggcttctgctaagagacacagtcgcgtggggtggacggggggggcccccagaggagggactcaggcggcaaccagtgggcccaaacaggcggggcccccaaggagaaccaccgctgggcagaggggaagacagagggtggactggggaggtccccatcccaggcagataaggaaaagaaggcgcccccaggaggagggagcaggcacgcgagagaggccgtagcgtgtaaggaaggacagcgccgcgagccagtggggacatctgaaggaaggcgcacactaacaggaggcggagagcctacctcaaacaaaacggcggggaccacagtctcacaggagcgacagagcctgcggagaggtacaacaaaagttaagcgcccgcgccggagtagcgggggtgagcgg

SEQ ID NO: 392362 - DNA, 338 bp, Homo sapiens
cttaagttcttattatagcaaagcatatcactcatgtagcaaactatataaatgtttagaatcatttcggagctacatagcaggtatacctgcattagacaatataatggataataagattcttacacctacttataattagtaagtttggaatgttcagcaaatattggaaacgcaggggtagtttgtctttctatgtaaaatggatttcatttctatgctcagttaattataggattttcatttgcataaggatgagaagtataaatatttttggaggtataacgtagattgtgagacagtgaatatgatgagtaggattggaagagtaagggcaa

SEQ ID NO: 392363 - DNA, 184 bp, Homo sapiens
gagttgactacgcggctcgatctgtacgcggctgtctcagagatctgatggttttataaacatctggcatttcccctgcttgcactcaatccatcctgccgccctgtgaagaaggtgcctgcttctcctttgccttctgccatgattgtaaatttcctgaggccttcccagccatgcaaaactg

SEQ ID NO: 392364 - DNA, 240 bp, Homo sapiens
tgctcccccacacatacacacccttttcattatgtgccaaagatcactttcccaaacctgtttcggaacagctggccgcactagagggcctgcatgggctgggggaggctggggttattaatagcatttgctctgcccggtgtttggggcaggaaaggggtgatttgcgtctttttggaaggctaggccctcatcagtttgggcctgatttttctgcgctggatcctttaaacctcaggg

SEQ ID NO: 392365 - DNA, 459 bp, Homo sapiens
cagaaattgaagcttaaacttttatctaatcttgttttaaccttctgagaagactgtgtgtccttagtgactcagatttagcatacaggtgatgagttgtctcatttggtggccagtacttactttttgtcttattaggttgaaagctatctcttcttgagaatgctggtgtatgtggctggtaacagcttgccatttttgtttagttgcttttactttcctgaaacccaggaagccagataattaagttttaaggattatacgatatacaagtcaataattttctaacaagatcttaaaagcacagtatattgctttggtacagtggctttatgagagctttttgaactgtttagagtaggggtgtccaatcttttggtttccctgggccacgctggaagaagaattgtcttgggccgcacgtaaaatacactaacactaatgatagctggtgagcta

SEQ ID NO: 392366 - DNA, 419 bp, Homo sapiens
cttgctgtggtcctcgtcgcacacccagaactagagcactgaaccctgtaggccagaaaccatgattgactgatatgttgaatccagcactaagcctaggactcaataagtaactgatgaattgaactaaattaagcataccttgtttggtcaatctgcaacatttctctcaaaattacttacaactctttcttgagaaagaaagagtcttttcctagccaacccagcagactgtctgacttaagaccatgattgacagacagaagaacgtggccagaaaaaaatgcaactgagaggattaaatgaaatataactagggatgagctacttttgataataatctggagcggggatgaaagtagggaaaacggacttagacggcccattgatcgctgttgatggtgggtgatggtgacggc

SEQ ID NO: 392367 - DNA, 225 bp, Homo sapiens
ggaatacatgccaagtattttttttaataatagatacttagaagtaggattaactgataagatatcagcatttttaaattttaatagaaactgccaaattgttctccaaagtagattattcaatttacactcccaccaacagtctttgagatcccacgttttttcctcaaacagccttatgttgtcatcaatttccctgtactagttgtcaatgccttttttccc

SEQ ID NO: 392368 - DNA, 281 bp, Homo sapiens
gacatggtttcaaatgtattgataatgttttagttcttaaacatactaccattctgaagcaagtataggaaaatgttaaagtgttctctatctgtaagaatataagagtttattatttccctttaagctttttctctgtgtttgaaagattttattaaaaaatagaatgaggccaggcatggtggctcaggcctgtaatcccagcactttgggaggccaaggtgggcagatcacaaggtcaagagatttagaccatcctggccaacgcattaaaccccaac

SEQ ID NO: 392369 - DNA, 314 bp, Homo sapiens
gcagggggtcgggggacagagttttgctctgttgctcaggctaggatgcacaagtgcgatcttcgcccactgcaacctccacctcccaggttcaagtgattctcctgcctcagcctcctgagtaggtgggattacaggcacccaaaaccacacccagctaattttttttttttttttttgagacaaagtcttactctcttacccaggctggagccttcaaatatcctctctgaaccctcttctactttgctcactatcgctccccctaacatctgctaacattcattcccactagatgccagagtccaggtgtg

SEQ ID NO: 392370 - DNA, 163 bp, Homo sapiens
gacacagctaaaccatatcactgggtttctaaacgagccgccaaatgtaattctcagagtcttcacttcaaagacaaggtcattaagacatgtgcttttggcacctcgttcctgcctctggtgcatgacacacaattggttttttgctctttttactcatttc

SEQ ID NO: 392371 - DNA, 912 bp, Homo sapiens
acaatttctcctgactatacattaatcattcatctagcaaatacttcctgagtccttacaatgaaatataagttaggtatacagacaaaaattcctgctcttgtgaaacatcttagtgaagggagacaaacagtaaacaagtaagtaaaatccatgtatgtcaaattttgagaaggaatttggagaaaaatcaggaatagggagtaccagagaagggggatggaattgcaattttaaatatggtggtcagcgccgggcgccgaggctcaggcctgtaatcctaacacttagggaggccgaggctggcagatcacttgaggtcaggagtttgagacaagcctggccaacctgatgaaaacccttcactaaaaatacaaaaattagccgggcatggtagcgcttgcctgtaatcccagctactcgggagtctgagacaggagaatccgttgaacctgggaggcagaggttgcagtaagccaatatcgcaccgctgcagtcagcctaactgagggagcaagaccccatctcaaaaataaatatggtgaccaggacacctttgaaaaatctcggattatcagaaatatatattcttctgtctagtgaaatgtaaatatatccagtagaatagaaaaatttggcctggactggtggctcacgcctgcaatcccagcacttttggaggccgaggcaggcgggtcttctgaggtcaggagttcaagaccagcctggccaacatggtgaaaacccgtctctacaaaaatacaaaaaaaaagggggcgcttaaaatcccggagggcaggtacgtaccagtttgacaaggccaaggaccgataaaaagaggggacaaaaacgaaggaagctggctgggactcatcgggaagacacacaaaacggaaggaggaccagggagga

SEQ ID NO: 392372 - DNA, 458 bp, Homo sapiens
cacctggtggcctcagtatatgtctccctaatagtcacagttataaaacatttggcaattattatcactcatgaactctattttactctcatacaagccagtgcagtagcttgcacctgtaaccccagtacttcgagaagctgaagtgggaagattgtttgacgccagaagtttgagaccagcctgggcaacatggcaagatcccatctttacaaaaaataaaataattagccaggtgtggtgatgtgatctgtagtcccagctaattgggaggctgaaacgggaggatcccttgagcccaggaggaggaagaggctgcaatgggatatgattgcaccactgcactccagcctgggcaacacagcaagattccgtctcaaaaaaaaaaatataaaaacacccccaggaaggaaaggcgatgtggattaaaacttcctccggctggagctaagggcttc

SEQ ID NO: 392373 - DNA, 156 bp, Homo sapiens
tctctcaggacaattcccttctgagatgttgatacgtgcaccactctcctcgcgcatcttcttaactgattctcctttctttccgatgatactgccaacttcctttccatgcataagtagtcggatggtgagagtgatatttaatccaccttcaat

SEQ ID NO: 392374 - DNA, 237 bp, Homo sapiens
gacgaaacagagatacagaagagaaacaggggaaaaggccaagtgacaagggaggcagagactggagtgttgttgccacgagccaaaaacgccagggaaccccaggcaagcaccagaagctggaagaggcgaggaagggttcctcccagagccttgggagggaacgtggccctgccagaagtcacaagtcctggatttaggatttctgccttccagagctgcgagagaccgagtttc

SEQ ID NO: 392375 - DNA, 356 bp, Homo sapiens
tccaaccgtaggctaatgtaagtgttctgagcacatttaatgtaggcaaaattgttataatattcagcagatttagtgtattaaatgcatttttacttacattttttcaacttattatgggtttatgggatgtaatctcattttaagtcaagaagtgtgtttattcaatgacttgatatagattctgtattagaaaactgtattttagcaatgtattttagcaattcccaagtgtaccaattatattatgcttaggtaagggtgtgtctttgttcttaagagacacacaccaaagcatttaggcatcaagtgttatgatgtctatagataattccaaagtgtgataaaaactaata

SEQ ID NO: 392376 - DNA, 308 bp, Homo sapiens
gggttgatgggtgcagcaaaccatcatggcacgtgtatacctatgtaacaaacctgcacattctgcacatgtatcccagaacttaaagtatatataaaaaaagattaaataactcccttctccaaagtgatgtccccattgtagtcaagatactataataattatagcatttcttgaactctgactgtatgccgggcattgagtataaaagggtttagcaaccctgtgaagtagttgtcatcattcctattccatagatgggaaaactgaggcactgagaggttagggaattttcccatcataacact

SEQ ID NO: 392377 - DNA, 286 bp, Homo sapiens
gttacctgcagagtgaagaatgagtggtactcacactggtttactatatttatctcactattacattctatgtggtcccaaactagttctctcattcacacaggcagcaagaaattcttcactagtcctaataaaataaaagacaaaattgcagcggaaagatatatcaagacagtaatctattggtttagatagatcaaatgcctgactatattgtttatgggaaataagtgttatccctactcctcacactttgctgttttctgaaatggatccactttgagat

SEQ ID NO: 392378 - DNA, 341 bp, Homo sapiens
actaggcgcactctggtgggtgaccgacttcgttacacgggtttaaagtttatttttatggtttagtcattgcagagttcttattttgcggggagggaaagggggccagtccccttcttttggccctccgcccccgcaggcttctcttttttttggtcaaataccaaatgcatgaactttaccttcctaaaaaggatggtcttcgtaactcaaacattttttaaactgtggtttctgccacgaattttgaaaaatcaattttagacttgaaaactaacaatttgacattttctttgctgtttttggctatgtaggccttttcctgaagcaaaaccatggtc

SEQ ID NO: 392379 - DNA, 453 bp, Homo sapiens
tcccagcctcccgggttcaaccaattccccccacctcagcttcccaagtagctgggaccacaggtgcccaccaccaagcctggctaattttaaaaattttttagagatggagtcttgccatgttgcccaggatggtcttgaactcctgggctcaagcaatcctcctgcctcgacctcccaaagtgctaggattataggtgtgagccactgcactcagctgcaggtggcctttctgatcttgcctgtaataagggagggtgggaggtggatagagccggagacatctttttcattctctgctggagctgagtagcaatttccccttttaaacaggccatgtgtgcagtcccctacctggccgtcagacattttcattgctcacctggcccctaggcatttgagtttcagaccccattttgtagttctagtaaagccttgctatagactggggtc

SEQ ID NO: 392380 - DNA, 651 bp, Homo sapiens
tcatgcaatgtggtcgctgtgccagggacactcttctgtcctctgcttacatcaacccattgatgaatcttgacatcactgaaagtgagacagcagatacttgtgcctctttagggatacagtaagaggtatactgcgtcacctataaactgttcttgccaaatacattgaacctgaagtgcagtcaagacttcagatctagctacatgcttataggaaacacagcagatagagattaagtgatacaggaggagggaaacaacttgatccagaatgtgatattctgccaaagcaatgacctggtttcttcaacaaatcagtggcatgaaaaaaagagagcaggggggaaccatgattgttcaaaaatgacttatgtgacatcaaccaattgcaatgtggtcctcttttagataccgattcaaagaaactgactttaaaaatgtcgggagtttttttttgcaattttttgaggaaatttgtatatagactgggtactaagattgtcattaatttgctaggtgtgatgatggcgatgtggttatacatattcttaaaataccttttctattagaaatacgtatggaattacttactggtgaaataatctgatgtccgagatttgtgttaaacgatgtcggggtaagaggaaaa

SEQ ID NO: 392381 - DNA, 699 bp, Homo sapiens
agactaaattcttcaaagtaaaataacgatttcaaagagaaaatccattctaaatcatttgctatattgtgccaaccaaaaagactacttgtattctttttaaaattttaatttatttatgtattcctatatgtattcaaaagactgatttttaaaaaatccttcccaaattgcaaaatacccacaacgactaataaaattcaaaatattttattattattacttgttgcaactttaataagtcactacattttaacaacatttgatgaaaactttctcttgatcaatgacacttctgaaacatctaccattttgatctctgatgaccttttaatcagtgagcatttcacacttgataacacttgattactacttggacaaattattgatacaatgacctggaaattcacaagatttctcctcaaatttgaagaagtcgagtttatttttgaaaggtttatttatagtttactttaaaaattacatttaatctcataaaaaatgtggtaagatagaatatcatggaatttgagctttttgttttgatgagcagtctcaactcacatatctatactaatgcaagtaaaatacaccttacaaagttcaaaaattcccaattacatatatttaacttaggaatgaactatgtgatacttgtgccatattgcccttataattatatttttcttacactaaatt

SEQ ID NO: 392382 - DNA, 408 bp, Homo sapiens
taccttggctcagaaggctgcccaattcgcagttcattctttgttcagttaaactcctttaaatttaattcagctgaagtttttcttttataccctaaaccagggcttctcaacctcagcactactgacaactgccacagacaatcctttgttgtgggaaactgtgctataccttgtaggatgttgagcagcacccctggcctctactagatgacagcagtatctcctctgcctccagttgtgacaaccaaaaatgtctccagacattgcaaatgcctcctcagaggtgaaatccccccagttgagaatcactagctctagacccaatcatcagtacctgcacccactccagaatcgtagtttcaggcttctctactccctaattgaccacctcttagctttccaata

SEQ ID NO: 392383 - DNA, 715 bp, Homo sapiens
ggaaaaattaagaccataatctatccttaattcagttgtaccctaaaagaagaggcttataaatacgcaaacttcactaagtctaaagctgtaatttataaaagaaaaaaatacatgtttgattccttggctgaagagagctggggctgagagattcctccacattctcacaagcaggaccaattggaaaagcagacctgacaagcccttgtgaaataaggatttcaggcactgttaggtgcatccattttcattcagacttcatccccaggagctagatagcaaatcctcacttttataatgcagaactgaagcagagtagataacaaacatgaccaaggtcaaacaagtagtaagttatgaagctgggtttcaatcccagaaagacgaaacgactgttagctgtatgtgacctttgaggaacagaatctcagaaagcttttctcttgaagtggagctagcaaaggagagaaggagcacagaggtttccttggcaggaaaggagggtgcaaaggcttcagcaggtcaagggtatgaccattcacagcggacttcagtaaccagcacttgaggggaaaaacgtcaacttcggtaagtagagaagcacatttaaggttctgatgtaccacagcacacctataaaataagcataaatcaatctagcacttctagggctttgggtagagaaagtcatgtcacttaacgacggggatac

SEQ ID NO: 392384 - DNA, 578 bp, Homo sapiens
agtgaggggtagctgctgctgctattgatgaaggctgaaagtccttgggcttccttctgctctggaattgtgtctgtgtttctgcacagtctctgtgggattctacaccttgtgttttcatctcagaacaactttatgactctaagttctggcagaggtaacttaagggaaactcatacaagtaactcacttttttttgggctcagtgttttacttgataaatgagactggtcccttaattactttgtaggaatgatgtgttttacttgataaatgagactgatcccttggttactttgtaggaatgatgtaaggctgcgggactaatcatggtggaaacatttccagagagtggataattttcctcctttttctgttacttgccattggctatttatgtatgtatgtgtgtatttgataattccacctttggctatataagatatatataagatatggtaatcttattaaaagctaagtcttggtatgacatttatggacacctttggggtaccaagattgctttgtttctccatcaaaagagcctgttcagttcatatacactatgtatgtgatca

SEQ ID NO: 392385 - DNA, 463 bp, Homo sapiens
cagaatgtggtaggatgttgcgagatttcatcatgtcaaaatggcacaaaatttaaaacttacgacatttatttctggaattttccatttaatattttcagaccatagttgaccttgggtaactggaaatgtggaaagtgaaaccatggatggggagggggactactatattctcatccagcaattgagctcctttgtattcaaatgaattgaaaatctatgtccacataaaatactgcacacagatatttataatagctttatttataattacgacaacttggaagcaaccaagatattttttagtaggtgaatgaataaactgtggtacatccaatggagtattaagcactaaaaagaaataagctattaaaccatgaaaaaacatggaggaagcttacatgaacgttactaggtgaaagaaaccaatatgaaaaagccgcatactttataattccaacta

SEQ ID NO: 392386 - DNA, 4944 bp, Homo sapiens
  misc_feature (4894)..(4894): n is a, c, g, or t
atacaatagtgctccgcgccgcctcagccgccgccgccgcccaaccgcctgcccagcgctgaggcctgacgggccgggcggacgagggccgagggcgggagctgaggcgcggggggcggccccggcggggggcgggggcgaggaggggattaaggggcaggtgcgagggagggaagagaagaaagcgagcggttaggggggcggttaccactccgaccggactcacccggcacattgccgggccgcggcgtggagccgggcaggagccgcgagccagctgcgcgaaggatgctccaggatgaaacgccataggcctgtcagcagcagtgacagttcagacgaaagtccttccacttcctttacttctggctcaatgtataggatcaagtcaaaaattccaaatgaacacaagaaacctgctgaggtattccggaaggacctcatcagtgccatgaaacttccagattctcaccacattaatcctgatagctattacctctttgctgatacatggaaggaagaatgggaaaagggagtccaggtaccagccagtccagacaccgttccacagccttctctcaggattatagctgagaaggtaaaggacgttctgtttatccgaccccggaagtatattcactgctccagcccagacaccacagagcctggctacatcaacatcatggagttggcagcatctgtttgccgctatgacctagatgacatggacatcttctggcttcaggaactcaatgaagaccttgcagaaatgggttgtgggccagttgatgagaatcttatggaaaagacagtagaagtcctggaacgccattgccatgaaaatatgaaccatgctattgagacagaggaagggctaggcatagagtatgatgaagatgtgatctgtgatgtgtgccggtctccagacagtgaagaagggaatgatatggtgttctgtgataagtgtaacgtctgtgtgcatcaggcctgctatggcatcctcaaggtcccagaaggcagctggctgtgtcgctcctgtgtcctgggcatttatccgcaatgtgtgttatgtccaaagaaaggtggagccctgaagaccaccaagacagggactaaatgggctcatgtcagctgtgccctgtggatcccagaggtcagcattgcttgtcctgagaggatggaaccgatcacgaagatctcccacatcccacccagtcggtgggccttagtctgcaacttgtgcaagttgaagacgggggcttgtattcagtgctctataaaaagctgcatcactgccttccacgtcacctgtgcctttgagcacggcctagagatgaagaccatcctagatgagggagacgaagtgaagttcaagtcatattgcctcaagcatagccaaaacaggcagaaacttggagaagctgagtacccccaccacagggctaaagagcagagccaggccaaaagtgagaaaaccagcctgcgggcacagaagcttcgggagctggaggaggagttctattccttggtacgagtggaagatgtggccgcagagctgggtatgcccacgctagctgtggactttatctataactactggaaactgaagcggaaaagtaacttcaataagccattatttcctccaaaggaggatgaagaaaatgggctggtgcagccaaaagaggaaagcattcacactcgaatgagaatgtttatgcatctacgccaggacctggagagggtccgaaatctgtgctatatgataagcagacgagagaagctgaagctgtcacacaacaaaatacaggaacagatcttcggtttgcaagtccagcttcttaaccaagaaattgatgcagggcttcctttgacaaatgcacttgaaaactcactgttttacccaccaccaagaattaccttgaagttaaaaatgcccaaatcaaccccagaagaccacagaaacagctccacagaaaccgatcagcagccccactctcctgacagcagctcatctgttcacagtataaggaacatgcaggtgcctcaggagtcactagaaatgagaacaaaatcgtatccgagatacccactagagagcaagaataaccgtttgctggccagtctcagccattctaggagtgaagcaaaggagtccagtcctgcttggagaaccccgtcctcggagtgctatcatgggcagtcactgggaaagcctctggtccttcaggctgccctccatggacagtcttccattgggaatgggaaaagtcagcctaactccaagtttgccaaatccaatggcctggagggcagctggtctgggaatgtcacccaaaaagacagctcgagtgagatgttctgtgaccaggagcctgtgttcagcccccacttggtcagtcagggcagctttagaaaatccactgtagaacactttagtaggtcctttaaagagaccaccaataggtgggtgaagaacacagaggacctccagtgctatgtgaagccaaccaagaatatgagccccaaggagcagttctggggtagacaggttctcaggcggtctgcagggagagctccatatcaggaaaatgatggctattgcccagatttggagctgagtgattcagaggcagaaagtgatgggaataaagaaaaagtcagggtaaggaaagatagctcagacagggaaaatcctccccatgactctagacgggattgccatggtaaaagcaagacacatcccctttcccacagttcaatgcaaaggtgattagaaacttccaaggatgacccaacctttgcctttgccccatatattggggaaaacccatacaccaaaaggattttagcatatgttaagaggaattgcagtgaaaaggataacatttttccatagtaaattgtcttgcagtttttgaaaatgtttcaagtctagtttttacaagcacattacagtaattgcaggttgtccagaggttggtttgtcagaggctattgggaacagctgggcccagggtatttgctcagtaaatattttggggcagctttccggttatataacacattgacaagtatatgtattaagagtccttgcattgttaactgatttgcaagagaccatgattatcagacactaaaactacttatcttttgaagctacagcatgtgactccccagagctcctgtctgtaggaagtttctaattccactggtatctataaacccttttcaggggagagaccaggagaccaccatcttagatactgtcaaactcactactgtcttcctttgttctgcacaaggttgagtttctttcacagtatcttaacttactgagtcaatactcctcatgcttatcagtgtccagtgcctgttcctaaacttgcttgttggggacacactcataactatttcacctgactgacaagcataaaaggctaacttgtggatagtgtttacaaaagtacaaaagtactacttccaaggaaaatgctctgattctctgtttaggcatttgtgaaggattccagagcctttcccaaagtgagaccatttctggggtatttgtaccaggtcagggtttttgtgttgttttcaaataagtttgactaaaataagtttggctgacagtttttgtatacctgctttaatgtttataaaatttttattgaggtataattaaaatatagtaaaatgcacagaggttaagtattcttacctgctttaattttgaaacagatttttattgtcaaacagaatttgaaagcatgtgtttaacacatggatataatttagctttgtgtcacctttgaatctgaggcagtttcccaaacaaaaaggctggagccatttttcagaagttgcttataccctgttcccaaactatcagccttgattaatttctagtaggaagagaataattacatttgcggggggggggggtggataaaaacatgtctgcttctcatttaaataagagagaaatgatgccgttttttaaatgtgaagcagactataattctcagctctcttttcttcttagccttaaattaatattctctttcttctagttttggaaagtgtagtgggaatattcagacaaaagaggccattttccatttttaaagcttcttactggtgaaacagcccagttgtagtaggtgccagtcagtcaaggcaggggccctctctccgtcaatatggaaaactcagcagttttcctctcccccagttgtgttcttgtaacgttgttaatgggttcctttgctttttgctttctccttttctgaaaatgtatgtgttttgcctctcttttggctacatcttcaaaatatttcttttgtgcctatgtacatgtgtaaacatgccatagcatgtgtggtaggtgtcctgtattttgtttgggaaaaaaactatcaaaatgaggaagagaatttcccctatttatgcactaggtttctgtgctttttctttgagttctctggagtagatattaatttgataccttcatggtaatgaaattatgatggagctgtgttataaattccttatgtcagaggccagtgcggtagcctttgtcccttcatgcctttcaattctgagtgggaggaaaagcaaacatcaaaacagtgcttcagccaaattccatatgtaatgccattgggagagtattgactaaaatatcattcgtcagggaaatatagttgtaatatttttacaggatattcctaggtaaatgaaggagccttcagttgtaaatttcaattaccccaaaatgtatttgctacattttgttgtttgaagtattacctcttaaccttctttgttaatttttttcattttgtcttatatagtccagttttccaagataagctcagtcctttttcaaatgtcncctttttaccaatactttttcattaaattatgaaaactgctaaaaaaaaa

SEQ ID NO: 392387 - DNA, 498 bp, Homo sapiens
ttttccggcacgagggttgtataataaaacagtctaattagcctagagccagggcagccctgtgggagatttcatacataatctagaaggaaagcaacgacaggcgggcttttcccactaggtctcaattccttttactaagtttgaaaagccagggggaagtgtccaacaaggacagaattcttgccaaggtgaatttccagctggcttgaaaaagcttgagcaataatggctgactcttaaatggggaatggacaaggttattaaaactatcagagtgcaccttggggcatttgtagcagccagagcgagctgtgaaactatgtagtggagaggtgaggaccccatgccaggtctgggtgaggaataaaaataaggatgccaggttcctgggggaaatgctgtttttcaagggtgacacagaatttctctgatacctcaagcagtgtacagaatttttagcccctggagagatttcagtcctgaccaaaaaaaaaa

SEQ ID NO: 392388 - DNA, 223 bp, Homo sapiens
ccttgagctttccatctggctgtctccactacgttcttcacattatagcaagactgacctggaaactacctggacgcagctgaccctcttgcctggtatccttcaatagcttcccattttccttaaagtcaaatctgaactcatcatactatccttacaagcctgtgtgatctgccccctgcctgtctaaacacagtttatgttactcatccaccaaacactt

SEQ ID NO: 392389 - DNA, 380 bp, Homo sapiens
ctgctttgcagaaatatttatggattattatgccataacagagagtaaatgcttgggtaaggaacaccaatatgtcaaaatgagctaaggtttggaaagaggttatctggagaaatatttacttttttagacaaaaagtttcaagatattgtcattcaatttaaaatatgtaataggtatggaaattaggggaatcctctaagcaactctgcaagttgtgcaaacttttagctctatttcctatgaaacaaagggattggactagatgatgaccaagattcccttccgttctgtctttgaattatgacatttgggttaaatactgcaggagtgtgtgtgtgcaaaatcctcttgaacaaattccctaaacagtccaaaac

SEQ ID NO: 392390 - DNA, 776 bp, Homo sapiens
gaggctggaacaggcaaggggccccaggctcctgaggctggactggggcggctccagagccctgtgattcatggcagcagctctctttctctccatcgccctgtcaggtcctttctgggcagacaggacacactgcagagggaaccaagtgacgagcttgtgaggcccctggtgggcacctccattgcctgggtctccgcggagcccctagctctgtctcctgttagcagagggggaagcccacttggaccaagcattcccacagctgctggagcgggcgcgtttcctgcgctccaggtggacatcgcttgttttctcacttaactaattattgctgattccagcgcgtggggacacacaaatcagaatcctggaagcctctgtcggtgactgaagatagacactgtcctgtcagccacaactccatgggttatacaccccggctgaagggtcacccggggctacaggagcaaggacagagaaacaggggaagtgactgaggagaagatgccttaattggaggtttgaaggagaagcagaggtgcatgagtttggaggaagcgctgtgacagcgccctgctttggggacaaagggcgcacactgtcctcctgggtctggctgtgtcccttgggcctgctcagagaggaagcgatttccttctagggtctgtgagtcagtcagtgctggggacagctgagaccctgcccagaggcaggaggggagcagccacatgccactgtgtccttgagtccctggggccatggctctggggttg

SEQ ID NO: 392391 - DNA, 676 bp, Homo sapiens
agtgtgctttaaaaaatgacgttatattagaaaaatggggaaatgctgtttttagatcatttttatctcctaataaaatgcaagtttcagccactgtagtacttgattaattcaaaatttggatttctttttcctctaaaacaactacttaaggcagtatattgaagtagattcagtcttctggtttttgaagaagaaaagaagtagagagggtagcaggtaggtttacgaatataggggcactatgtatggtgaattcatagactataaatcaaaacttataattagcattctcatgttatgaatcttaaatgaaacttgtgtttctatttgaacacctaataactttggtaaagtcagaggccatctatattacttcaccaaagtgagaatttgctactttttgagctcttttaagtctagaagtctgggctccaagccttcaaggcccatccccgggaaatagaatgggcagaagggagggagacaaaagaaaatagtttatatatccctaaatatatctggtgctgtcaaaaatgataattaaacttgctaaagtattcagtgtaatcctaaatgaaaaagagtataaatgattacacctctgtaaaataaaatgtaagtgtctatggaataaaaacagaaggaaataaatacaatgaaacaaatgattgtg

SEQ ID NO: 392392 - DNA, 191 bp, Homo sapiens
ggggtccctgacttcctgcaacagaccattattctgtcagttacgatgtagcatgtcaattatacttcttttaaaaagtttttaggaggctgaggcaggagaatcacttaaacttgggaggcggaggttgcagtgagccaagatcatgccactgcattccagcctgggcagcaagagcaaaactctgtctc

SEQ ID NO: 392393 - DNA, 292 bp, Homo sapiens
acaggaatacatttttttctttatgataaagatttactagaatcttattctgcactggcacaatgtcaaagtaaaattccccacatttatgatgctatttcttgtgatttcctgtggtaatagagttctccaaatatatacatgtgtcagaggaaaaactgtattcaaaagcaagtgggggccgagcatggtggctcacacttgtaatcctagcactttgggaggactgcttgaagccaggagttcaagaccagcctgcttaacaatgcaagaccctgtctctgaattgtac

SEQ ID NO: 392394 - DNA, 458 bp, Homo sapiens
gccaagccagctcactgatcattacagaaatgcaatcgaaacaacaacgagataccatctcacaccagtccaaatggctattataaaagatgtcagaaaataacagatgctggtgaggttgtgcacgaaaaagatatgcttatacactgttggtggaaatgtaaattaaattagttcagccattgtggaagacagtgtggggataaagacagagataccattcaacccagcaatctcattactgggtatatacccaaaggaatagaaatcattgttataaagacacatgcacgcgtatgttcgttgcagcactgcccatcagtgacagactggtttaaaaaaatactgattatatcacagtgtgactccacttttgttttctaaaacacattcatttcaactataccttaataaaaccagggaaacatatgtttatgcaccagcatagaatgaggcta

SEQ ID NO: 392395 - DNA, 217 bp, Homo sapiens
ggctgcatgcagggctggctgagcagcacggctgggagagctccaaggaaagactcagcagcagcagtgagtaaacctgcggcaggagggactcagagggacccgcttctggacatccccgcaggccagcgatcgttaggtgacgaaactggagatggagccgctgtccctgcagctccgtcgggtgatatcacaggtgtgctgccagacctcaccc

SEQ ID NO: 392396 - DNA, 332 bp, Homo sapiens
tcatttcttttagatccttctaggtgatagagctaggaaataaatttttttaagagaaaaaatatcttgaatttatactgctatttccagttcaaatttgatttgtgaggttgtaacttctttcattttacacttttttttttaagttgaaaatgtttcccagtattaacattaatataattgctttgggccctatctatgtgtgtgtggtgcacataaatatgtttaaaacataaatttaaagtaatatcagtgttattactgggtgaagtttaacatttctttgtagattctttttgccgttagactgttttctactgaagatagtaaaa

SEQ ID NO: 392397 - DNA, 223 bp, Homo sapiens
cagctgtgaaccatgtaggatgtgagaaattacaccctaatcatctatttcctagccatgaacagttcaacctcggaaaattctaagcccaggctcattagtagccagtaaaatctggatgttatgtgagtcatgaataagaccagagtagaatgaacaagtaaaggtttactgtgtatgtatgaagatagggtagaaatatatcggttttatttttattttt

SEQ ID NO: 392398 - DNA, 425 bp, Homo sapiens
gaaatattctactcccttggatttcttgactccaattgcccctggtttctctgctacttgcccgattactcctcagtctccatcattgattctgtcccccaatcagccttattaaatgttgcagtgcggtgttctgtcagagggctttgctgtagtttgaatgtgtcccccccaaagagcaagtattggaaacttaatccccagtgcaacagtgttgagacctaaggagaggtgattaggccacgccttcatgaatggattaatgctgttattgagaaagtgggtttgttatcttgggagtgagctccttataaaaggattagttagccccctttgtccctctcttgtgcggtctcttgtctgtctttgcccttccaccatgggctgttgcagcaagaaggccatggcttgatcttagacttcct

SEQ ID NO: 392399 - DNA, 269 bp, Homo sapiens
ggcttctctcaagttagtttgacatgagttataccctaagataataacagtggttatcactaggtagacagaataggtttaatgtttctttttacctctctgagttttcctggtttctgccagtaaacatgggttatgccgtaaaccttcccacttctgacacctggccttcacatcagcatgggacaccagaaagtgcctgaataagagccagcaaagaaaaatgttttcatttcttctagtgtaatttatacttatggatctcatga

SEQ ID NO: 392400 - DNA, 796 bp, Homo sapiens
cacttttccccagctttcttaagtcactgcgcagaggtgagaggaaaaaggaaaagtgatacccaaaataaaaggacatagtatactcatatgattattgtatcgcaggtggcattgcctttatgttcttgtttaattttttaaaactgagataacttgttaatcataatatagtacagcttgtacttgtgacctgaatttacttagggtgctgagcgtaattaacctgatggagccatgtcatctatcagtatggttggaaagagagaacagacctaagctctgaatgtgactagagcagaggaagctatgctgaaatttttttttttttttttttgggacggagtctcgctgtgtcgcccaggctggagtgcagtgatgcgatctcggctcactgcaagtatgctgaaatttttaaaacttgatagattcttcaaaaggccaggtgtttgtttttttggtttttttgtttttttttggtttgttttttaattgatgcctgtcacaactccagaaaattctgtttgtgtagcagttgacaatctaaaaaacaaatggtcttttccagacattctcaactgtcgtggttgttttgataacttgaaagcaaactgtttctagcacccatctcttgtccttcctaaggagaaaactatctcattgaaataaagaaaggcttgttttatgactggtgcctttctggactctcatttagttttttacactgacatcagcctcctcaagattggtcgtcttttaagcactagtttgtttcattatttgtaccatcaaaata

SEQ ID NO: 392401 - DNA, 859 bp, Homo sapiens
atctgtattagtttgatagggctgccttgacaaaataacacagagtgggtggctgaaaccacaggaatttatttcctcacagttctggaggctggaagtctaaaatcaaagtgttggtgggattggtttctaccaagcctcgctctttggcttgtagatggctgagttctccctgtttcttcacatgccctccctctgtgtatgtctatagcctaattttttataagggaaccagtcatattgtgttagagcccacccctagtgacctcatttaacctttatctccaaatacagttatattgtgaggtacagggattaggatttcctgtgaatttttaggagacacagtttagctcataacaaggttctcaaagagacttagtgtgtaaactagtgagactctgaggcagtgagctcgtattggaggctagtgcatagtctgagcattactggggtaatttgatgtttggcaagaaagggaagctgctatttgaggacaaaggtattttatctttggcctgaggccacttattttctttctctggatgttcattgggaaattgtgcctctgtggcctttttgtggacagagcattaattttttttttaagtgttttataaaagcattcgttttcttaaaatatttcttttaatggttcttaaaaatagtaaagcgctaaatttggcaaagctgaaacactgtgttgtaaatgtctcagtggtttttgagtctgattaaaacaacagaatttattctttaaattccattgatctaaaaactgtctgtcttatacgtgttttgtggggtaatgtatggcataatcttttttccttcagaaatgtttcccccttttgggaaa

SEQ ID NO: 392402 - DNA, 127 bp, Homo sapiens
aagggtctccagactgtgacacacacaactttcatgacaagagaggaaaaatgaagtcactgtttccctccaggcatcccagatgtctctctcttcccacccacctatgtgacagtgtctctgctgt

SEQ ID NO: 392403 - DNA, 377 bp, Homo sapiens
cctaccttaatataatgagccggagactctgagagtgggcccagcaatctgttttaacaagccctccaggtgattctgaagcatgcttaagtttgagaatcactgttctagtagtagtatagctgtggagctcctagcagatttcattctcaactgtcccattggaagaggaagaggcattttttactgccacttatgccaagattacacatactctttgtgtttctgccagcatgatttcattttttatttcagtgaaagtaattccagtaagttatagtttaatgcctagtatgtgcaccaaaatgagatatatgtgatttcatcttagctttacaatgacctgggagccttttggagtagatatagggggagag

SEQ ID NO: 392404 - DNA, 144 bp, Homo sapiens
ggatttgctggtgcagtacaactaggcttaatagggacatgtctgattacataaaaactgaaacttctgtataccaaaagacaccatagataaagagcaaacgcaagccacagactgacagaagacattttaacccaaaaaaaa

SEQ ID NO: 392405 - DNA, 251 bp, Homo sapiens
atgctgggtcacctgaaattgagggcctaaattctctagacttcgttcttcttatcccattaaaacacctactccttgaggcttatctcagcttggagctgacctaattaaaggaacagacaccaagctgtgaattgtcttgttggaaggcaagaaggagggtgaatgtagtgtgctctgtattcctaaaggggagtttaaaggtgggtgaagttggctggatgcaatggctcatgcctgtaatcccagca

SEQ ID NO: 392406 - DNA, 891 bp, Homo sapiens
cactccagtgaaagataatgagaaatagaacttctgcttacagaagatgaattttgaatgcctaaggtttaaatttagatttgatgggatagaactttgcatattatttacatggttttgaaaacaggcatgaagagagaacaaggttgtaaggagcttaggacagaagagaccaagctgtcttataattgagtcaggacgaagcacaggaatgttactttgaatcaatgctggccttaatggtccactgatctatgggagaagaaaaaaaacttgatatttaagcattggtggaaaacacacacacacatacaaaatttctgaataccagagactgagggaaatttgtacccaacctaattagttgaaaatacaaagcaagtttcatcaatatagcttgtatagggttaagaaaaatacttaagcattacatgattgctgtaggagcccattttttggaaaatttccagggactctttgagtcaacttgttaaaaacagaagaaaggctaggaaagaaatagcttgttttatgcctgtgattataggatttcatcattatgtgggccactgagtgttattttctcaagttcatgcatatgcagagatttaaactaaatttgtgttctactcaccacgttaagaggcacaagttatcaaagttactaccaatacattctattcccgaagaataacataattttcagtacaattatttggtaggaccctgtcctcttcaatatcagggtaccttgaacccacaggtctgttaaaaacctggagctgataaaatgtcctttaggacgcggaaaaaaaaaagggggccgaaaaaatggcggaaagaatcacgcggtccaacgcccctggcgccctccgcagccccggaatgatg

SEQ ID NO: 392407 - DNA, 327 bp, Homo sapiens
ttttgccaagggtgacatattctaaaaagtggaaataaagtatagaaaaaatagcaaagcactgtttcagatgaccatgttatatttataacatttaaacctagcaaaaatatcaaatgaaacagttttcaaagcaagtcatgaaaattcaacttaaaagaatgtaaaaccggccaggtgtggtgatgcatgcctgtaatcccagcaatttgggaggccaagatgagcagatcacttgaggccaggagttcctgggcaacatggtgagaccgcgcccccgccccatctcttcacttttcttttttttttttttttttcagacagaat

SEQ ID NO: 392408 - DNA, 305 bp, Homo sapiens
agtccctgcgaaaggagtccgctaagattgtttattcattcatttacccagctatccattcattgcttctttaattcaagtatttatggggccctaagtttctgtcaggcccagagaacaagacaggcaaaggctctgccctgcccccccggaacctgtatcctggtgagatgagcaaataaatgaaacggatgatgatggagaggagtcggtgcccctaaggaaactcagcagagtgtagtgtaggcatagagggggacagggggaaagcagcactttagatgggacagccaggcctgcagtct

SEQ ID NO: 392409 - DNA, 455 bp, Homo sapiens
gtgggcctggcactgatttggccctttctcctaagcccccaggtcttcatggacctcctagtgggccagccctggctgggtaggatttcaagcagactgctacccagagcccacagtgagaattggcctggggctgctggagggggctcagatagggcatgagtagggtctgtgaccaggctgacaatgacacagagggaaataacaaagacccaggtaggccccaggcacagcccagctgcaggggcagcctcggcccagccactggcaggagtggatggccatacggctccccgtgacccacctggggccaggggcctgtcagcactcccagagaaggccctgcgggtgtcaggattgaagcaaagggcaagtcgaagttggagggactggtgggatggccccaagtccctctagaacttgtaacttgttgtcactcccaaaactttctgggg

SEQ ID NO: 392410 - DNA, 303 bp, Homo sapiens
tgctaagtaaaaatgctatataactgcatgctttttataaacagtagtggtcttcctgtgtagtctgctatcactggactgccccatatgtaagtccccccaataaaccctatgtctcgttggctggcttcaggtctcttctttggcctctggacatggtactatccctgctggagtcaatagggatctggcatgacaccatatgacacctatcatagcccacaggacatgaaatttgaaagacatttctactctcgcagctcattgtttttgatggcatgtgccaactaagtactgacatgc

SEQ ID NO: 392411 - DNA, 187 bp, Homo sapiens
ggcagatccaagctctgccttcataaaggtcacttcgaggggatgtcacagttgaggcaaaggaaaacaggccactgttagactacatgtgaacagcagaaaaccaacctgtagcacagaaagacctatataattcagcaatgttcggcaccagcttaatcacaagcccccatgcatggcctgctgg

SEQ ID NO: 392412 - DNA, 296 bp, Homo sapiens
agatgacccactaattaggtgtggacacctggaaagggtatgacactcccagtgccccagccatgacagtgcgcgtactgagtctttatggtctcttgtgagtcatacccagcttgcctgtggatggtaccaaactgaggcctgtcctgagcactgagcccaggggctgctggcaagcagcaggtgatacacacacaactactggggtgcataagaacagggtcgccagagtgtttcctcactggtaacaattctgactgtccccgcttttaatgagagaaaaacagcttccagat

SEQ ID NO: 392413 - DNA, 304 bp, Homo sapiens
aagggtatacatgggctcagtaaggtggatccaatccagccactgctgagtgctcaatctgccagcagcagaggccagccctgaatctctgatgtagcctcactacctgagagaatcctctagtcacctggaggcatcatggaaggggcagtggtttgttcccactggaaaagacacttactctgcatgtaaatgtgccttccctgcctacaacgcttctgccaaaatcagtgcttgtagactcagagacggcctcattaattatcaaagtgtcacacacagccttgtttccaaaccaggagat

SEQ ID NO: 392414 - DNA, 696 bp, Homo sapiens
agccatcggaaacctgagtcttctctgtgggaaagtttttaattaaaaatatcaatttcttaaacaggtatgtaggatgactacgatttttttttagatttgacaaattgcatttttctgagaattcatttgtctaagttattgttatttgaatttactgtataaattgttcatattattcccttattgtgcttttaatatctgtgacatctctaatcatttttcctttaatttctgattctgacaatttgttaattatctcttttccttgattagcccatataggagtccttcaattttatgaatatatttttaaaattcaacttttggtttgttgattttctctatagttcttctgctttctattttaattatttctgctctttccatccctgctactataattttcatttgcttttcctccctgcactggctgaacattagttgtaacattgaggaggtgaggtgatagtggtaagctttgttttgtttctaatatgagtaagggaggttttaataactaactattaaaaatgccagttggtatagattttttaaaaatagatatccagtatcatcttaaagagactctttcagttcttaattttctaaaagtttctagatgtcattaataaatgcaaaattttattaagtttttctgcatcttatttagaaaatcatatattatttttcttt

SEQ ID NO: 392415 - DNA, 371 bp, Homo sapiens
gtggtcaatttttgttcctgtctcagaaattgttccccgatgtgacacatgatagtgactttaatgaaattgttaatttggatttctgtagaagctgaccaaataaaaccccgtgtaaacacctgtattagttcattttcacactgctgatagacatacccaaaactggaaacaaaaagaggtttaagtggttttgaaggaagtctgggggtgagtgccgatcttctgagtgtgacgtttcttgcaggagcgcccccttcatttctgcaaatgctgaggtgtttagagatgtatcatcgtggtgcacgatgcatcatcatggtttagcatgtggacttacagttccacacggctggggaggcctcagaatc

SEQ ID NO: 392416 - DNA, 119 bp, Homo sapiens
agtatgtgcagtgttaagctcctgctgtgtgccctcggggcttgaggatactaactctctttgtctcccccagaacactccgagtctgcactggaccgttctcagagcgctgtcctgac

SEQ ID NO: 392417 - DNA, 557 bp, Homo sapiens
ccaccactggtgtcagggtgccagcatgacactgaatccagagctaggaaaagatgcacccatcagctctttacaggaatggtcccaccccctaggggccacaaaactgaagtgacagctccttggggacagagccaggagaggattctggatccaggggccttccccaccacactgcactgcttcctagttagtcactgccctcttgcttagcagaaatcatgaccaagtagctcagggatggccctggtcaaaggcagggccagaatgaaatcaggaagctgaacaagaaacaaaagcacagtcggtctttccttcctcttcactttgcaacagaggcctcaagagtgtgggtgaccaggtagaaggagagagccttactgcccacgcttgtgttctccgaggggaaagtggaaaaggcaagagaatgattctgggaagtggacatagagtattggcaaaactcagaggccacagagacagcattcttgccagctggcctgagccgattccacccagggccttggaggtgcggtggcagtgctgtaatgggcgtg

SEQ ID NO: 392418 - DNA, 407 bp, Homo sapiens
tcttcctgtgtggtaacctgggattcaatctgtgagatgggggtctattaacaggaacccctctcgctttgctgagttttttcttttttaccaaataaattctgctccttactcttcaaagtgtctgcgagcctaatcttttctggtcatgtgacaagagcctggtttttctacaacaatggtagggaaggaaactgaggaggatacttaaatgattaatgaaaattagaaggcacaattcccttccaaaaaatgaaaggatgggtaatatagtaggggttttttgtatagtcattcagaaaataggagtggaactaagaatatataaaaagattgttaagacgtcttaagagcccaggtaaatttagagggcatgagtttgtgagtttgtagtagtaccaatctat

SEQ ID NO: 392419 - DNA, 495 bp, Homo sapiens
caggtggatcacctgaggtcaggagttcgagaccagcctggctaacatggtgaaaccccatctctactaaaaatacaaaaattagccaagcgtgatgcaggtgcctgtactcccagctacttgggaggctgaggcaggagaatcgcttgaacccaggaggcagaagttgcagcgaggcaagatcgcgccactgcactccagcctgggtgacagagcgagactctgtctcaaaaaaaaagaaaaaacatctcataaccttttaggctggtggccagtcaacttcttgctaacggaaatgaaaactcttttgatgttgatggaaaataatcatctttattcatttattcattctgcaagtatttcctgaggacctgctgtgtgctgggcccctgtggactcgcagacagtgagcatccgctctcctgagcttctctcacctctttctgctctggaatttcttctcaatgagaccacactatttctatactctctggt

SEQ ID NO: 392420 - DNA, 200 bp, Homo sapiens
tagatgctatttttctttaggtttccttagatattcttctttgtccactcactccccatttagcataaatcaaattgtgggatactcttgagcggaaacaaacttgtgagcaatagaaggcagctctcttctgtaggctgattatctactaaccagcaagttgccactcctcatcacagatgacaggaggaaaatctctt

SEQ ID NO: 392421 - DNA, 349 bp, Homo sapiens
cagatctgatgagagaatgcctgtgaaggactgggcacggttctggcacatagtggtcaaggccccacaagaagctggtggtggagcagggctgactccaacccagggctccatctttcctcccataatcttcttccttgtcctcatcctgcattgctgccataggtggggcttgaggagcaggacatgtttgcagaagccccattctctgtgtccactgcctggcctgtacccctccctaccccagacagcttggtcctggtgcatctggacagttgctgctgggacatgcgtcagagctgtgagccaagttatctttttttttaaaaataatgtttgtttatttttt

SEQ ID NO: 392422 - DNA, 396 bp, Homo sapiens
aagtgagtttgggaataagaagtatggatcaaacaaagttggtgtgggggtggtggccacaggggccacggggaggtcagctcagtgggaagaattctgccttctctccaagggagaggagggccgaccattacctcaatggcaccccatggccctaacatcattgtctgatgcttgttggtataccaagctggacgtggctgagtgggatgtgaggtgggaagcactgcggggctcccctggtggacacgtggctgcaatcagggccttctggtggcaacatcaaggacatatttcaaacaggcctcggggaggacactgcacatctcattggacggtgcgggagaacacctaggagcagtgaagactgagaaactggtctccccaaggtctacg

SEQ ID NO: 392423 - DNA, 214 bp, Homo sapiens
ctgatgacattgctgtcattcatttcatttatctgtatgctataattgctcattacattgttactactgttattttaaacagttatcttttggatcaattaagaaaaattaaaaatttcattttacctctattcattcctcctctaaagtgcttcctttctttatgcagacccaagttgctgacctaaatcattttcctttcccctgaggaact

SEQ ID NO: 392424 - DNA, 260 bp, Homo sapiens
tgcttcacttggttgtggctccacttggtcgtgctcacacttggctgcagcccggccaccaggctctcgtgcctccacactacacccaagcccctcattgccaccagcctttgccccagctccccctgagcacagcccctcctggcagccatgtgcacagatgcacgtgcagcagcctctgcctgcacacagagacacgggtccaatgcctgtccacgtggagcagcccgttaactacagagccaacaaacaagccagca

SEQ ID NO: 392425 - DNA, 627 bp, Homo sapiens
ggaacaaggagcaagaatgttccatgggagaacagaggacaagaaaaatgaaaaaataagtggcaggggaggaggggagagataacgagattaagacaaagacttttaagcctagacttgggaaatggacaagattatagcaggaacaaatgaagaaagccatttcagctattagaaatcgtagactattcttagataatggacagtacaatggattaattggagaatgatgactatagaaagaagtattaagagataaagctgaaaacagatggagatcacataatagaagattttaatgccatattaattagtcttttttctatgattttatagtgagttgctgcaggtttttgactagggagctacttgataagaatgtaggctttagtaaaagttctcatgtaccagtgtgtaagggagctttcatgaggaaagagattggaagtacagatattaatctatgagaaattgcagtacacctaaaagataattagggcatgaactaaagtaatgtcaatagaatagaaaaagtatacgaaaccctttcttatagtgaaggaactcagaatctgtttgaacatggagtatagaagggaaaatgtaaggtttcactttgacatagaa

SEQ ID NO: 392426 - DNA, 236 bp, Homo sapiens
acaaccagggagagagttactacaccagggagtcgtcagctcaacacctggggatagagaggcctcaggccaggagggaaccctccccatgtccctctccctctccttcctggcctttctcctcctccaacccagagggaggcattttccaacctagggggtgagtcccggcagcccatccccttccccccgtgcagggaggcatctgggcccttccggcccacccctccctctgg

SEQ ID NO: 392427 - DNA, 1153 bp, Homo sapiens
tgacaagaggacacattctcacctccacagaagcccgagtgtcactttggggacagaaatgaccctgccctggtcaccagaatcagagtcccgaggaagcccaggaggacctgggaagtgtttttcaatcagactcagggcaggcgtctccgtgggaatctctgattggaacaggctttgggattcagattgggaccaagagggaggctcacccagggccagggtccttagaatcctgacagttttcacagtaaccccatcgtcctttaaaactgaacatctaactcagaactgacccatttggtcctttctctgtaatccattttccttttctctaggcttcattcttacacttcccttttcaccttcattctgaaaatggagggtgtgcttcctgtggtctaaaccacaggcctcagatgcattacctggaactcaggtgtggctctggctatggctcctgtggacctggcaggctgagggatctttctcattccctggtgcctgcatgcccctgctgtcttctatgcgtggatgcatttgggaaatgcaagtggacactcatagtcgtttcctcaaatgggatactgttgtagagctgatcttgtgcttctcaccctgtcacagagcccccactctcacttgtggatttttgggagagctgaggatggacactttattgggctgtgagctctgcatgatggcaatcgtgaggtctgggtgggcacagccagagccaatggagctggccaaaaggaaagacaggacggaattcctgggaagtcctacagctgctgtctaccatagagttccattgtcttctcctctgctaggattaaaccagaccgaccaagttcatctaggacaatcttcctgacctagagaagtgatgacaggctttaataacacctgtattatacatcagagcaacacctagattagtgtttgattgaataattgagactatgtcctagtcaaggtgacacacaaaatcaattattaccatgattaatattttatattgattaatattttaatactaatattaatcaatgcaatattgatttaatattaattaatattttatatttgacaatagaatcagactcatgttataaataattttgcaaatatatgtatattattattggtc

SEQ ID NO: 392428 - DNA, 273 bp, Homo sapiens
attttacttccttatatctctgagtcacctttaaaaaatacatatatggaaagagcttgtattgcttttacagtcagaaagagcaataaggttattgtcctttctgaaggttatatgagataatagaggggaagtttctgacacgtgattgaggctcaatgaatgtttattttcttcccagaggaaaagcgagttgtcattggatacatctgggtaaagggattatgagtgactttttatttttccaaaataacagtgatttataatcaggaa

SEQ ID NO: 392429 - DNA, 783 bp, Homo sapiens
tccactcatatgaaatgcccagaacaggcaaatccatagaaaaataaagtacttcagtggctgccaggggctggtttggtataggggagaatggagtaggactgcgagtggatatgaggtctcttttgggacgatgaaaatgttctgaaattagatagtggtcctagttccacaactctgtaaatacactataagccaatgaactgttcaatgaaaaagggtgaattttatagtatgtggatttaattttatgatatgcgaattacatctcaataatatatgaagcgtgaaactttattcaataaatatattaaacatttaaaatataattcaattaaaattaaaaatgaagtatagggaaggagaacaagacaacgaggaaagatggaagagaaaatacttggctcaagaaagaaaatgagctgggtgcagtggctgacatctgtaatcccagcacattgtaaggccaaggagttcaagaccagcctgggaaacatagtgagacccatttgttaaaaaagttcagatgtggtggctcacacctgtaattccaacactttgggaggccaaggtgggtggatcgcttgaggtcaggagttcgagaccagtctggccaatgtggtgaaaccccgtctctactacaaatacaaaaattagctgggcatggtgctggaagcctgtaatcccagctacttgggaggctgaggcaggagaattgcttgaacccaagaggtagaagttgcagtgagctgagatcacgcctctgcactccagcctgggtga

SEQ ID NO: 392430 - DNA, 498 bp, Homo sapiens
ctgttttccccttacatgatcctggttctagcatttttttaagagacaaggtcttgctgtcacccaggctgtagtgcagtgacacaatcacagctcacaacagcctcaaactcctgggctcaagcaatcttcccgcttcaacttcccaaatagctgggactacaggtgcatgccaccacacccagctctggttctagccttgactctgccattaactattgtcctgactttgggtatatttctctgtgggtctcagtttccccatgtgccccttagagatgtgtactcatgagggtctttatgcttaggacagttgggattcaagcctccctagttgggtctcatctgaggactgtcatacccgttgctgccactgggggtcagcaccaaaccaaggattgggcgaagaccaggtccatgagggatggtcggagggaaggagggagggaggacacccccgatccccctgccctgctctgtcagtgaagaggtgaggtg

SEQ ID NO: 392431 - DNA, 359 bp, Homo sapiens
aaatagaagcagggagtgccacaccagaagagtggaaacagagatgggctggggagagtcctaggccccattcccctcctcgccatcagccggccctcctctgctctgcctgatccagtgccagctatctcctgatgccccatcttgggtctggctctttctagaccaagggctgaaggctaatccttgtccccatgcccaaaggtaatccattttgcttcttggactgaagtgaacattttagggcccagatgtcctgcctctcgtcacttccaggctgaccctggagcctcagaaccctcaatttccttgttacaggagtaaagacaaccccctcctcccccacaaagctggataaa

SEQ ID NO: 392432 - DNA, 399 bp, Homo sapiens
tcttatccggcttgccgtctgtagagacgaggagttacccccaagaaagggagtccacggaagcgtgagaatggaggaagaacagtgctttgagtgactgctgcagggtcttcctattatttttagttatgaggattctcgttcccagcctgtccttgtcaacatgtgatgaaaccctaaccctttcttcccactgttttttacttgtcctgtgttagggacactctcctaatttttctcatattctttttctctgttgccctccacttttgtgaactctgttagatgggacaaaaaatcccgggactttgcctcctagggctctggtttaacttcagttcgcacagtctgctcttcttaggaccctgtacacagttaaaaggccacatgatccacgga

SEQ ID NO: 392433 - DNA, 420 bp, Homo sapiens
cgaagtgcaagtgcgtggaatcggcaaccttgaaggggcctgtagagaaaggggctcccacaagagaaagggagtccacggaagcgtgagaatggaggaagaacagtgctttgagtgactgctgcagggtcttcctattatttttagttatgaggattctcgttcccagcctgtccttgtcaacatgtgatgaaaccctaaccctttcttcccactgttttttacttgtcctgtgttagggacactctcctaatttttctcatattctttttctctgttgccctccacttttgtgaactctgttagatgggacaaaaaatcccgggactttgcctcctagggctctggtttaacttcagttcgcacagtctgctcttcttaggaccctgtacacagttaaaaggccacatgatccacgga

SEQ ID NO: 392434 - DNA, 416 bp, Homo sapiens
cggagcctgctcttgcccatcggagggacagaggagctctgagggagttttgctcaatgtgcaagtccagatgaagcattttctgtaaagctctcccggtctctcctggctccttcttttcccaccctgaccctgtattaggccctcagggacccgtgggccaagcaacaatgcgggccaccacctcgagatcatgccccaaggcaaccccaaatcctggtcatctactccctggattatccgcctcctggagaaaccagagcccagatctctctccctgagataacccaggctttagaaccaaagagctgagagaccctgtcccttcagagaggcacttgcacctagaggagtctctgggaagcagatggggatatgggacagacgcatcttgaaaaagcccccagatgcctccc

SEQ ID NO: 392435 - DNA, 729 bp, Homo sapiens
gaataccaagtattctgtctggcaattcagggaaacttgagttgggtgatgaggcagcagtctgaaggttagagtgcgaggtctttgagagcactcactcactctgcccagaaacacctgggtctcacccatctctctgctcctgactccctcccccctcctcctacccttccttgcaaaggctgtttccccctctgagggctgttcttggatgaaaggagaggatgccagtcaagtgcttacccccaggggccagcgcatggtaagtacttaagaacgtggcctctgctattaacatattaaatgtgactttttatgtatgtatgtctgtatctatgtatgtatgtatgtgtttgttgtttttagagacagtcttgttctgtcacccaggctagagctgcagtgagccgagattgcaccgctgcgttccagcctgggtgacaggctaaaaaaaaaccctgcctaaaaacaaacaaacaaaaaactttacctcttactaactcatgaccactctgttttcttctatatccaccaccacccaccctctactgtattattttaacgctaaatagttgagtatctgcaagataaggattctttaaagacataatgagaagaccattttaatcatgacaataattaacattaattgcttacatcatctggtatccgcacagtgttaacatctcagatcatctcataaatatctttctagaattggtttgttcc

SEQ ID NO: 392436 - DNA, 579 bp, Homo sapiens
cctgttttgtacaggcactattctgggaactgggaagagagtaatggaaaagcaaacggggtctccacccttgcagagctcgtattttaaaagagcagctagatagtaagcaagtcagttacttagtgcgtcagagataaggggtgtgaagaaaaataaaggaggctgggcatagaggctctcaactgtactcccagcactttgggaggctgaggcaggaggattgcttgagcccaggaggtcaaggctgcagtgagccgagattgcaccgctgcgttccagcctgggtgacaggctaaaaaaaaaccctgcctaaaaacaaacaaacaaaaaactttacctcttactaactcatgaccactctgttttcttctatatccaccaccacccaccctctactgtattattttaacgctaaatagttgagtatctgcaagataaggattctttaaagacataatgagaagaccattttaatcatgacaataattaacattaattgcttacatcatctggtatccgcacagtgttaacatctcagatcatctcataaatatctttctagaattggtttgttcc

SEQ ID NO: 392437 - DNA, 676 bp, Homo sapiens
agttatggtagtaaattttaaattcccctgaagaaaagattgacaaaattgaattatgaagaagagctaagaagattaaattaccagaagaagagcaaagtcttgggagtaacttctcagcagtcttcagacccagaaagttttattaagtagggagtaggaagggtacaataagacaacattgctgaatttgcaaatgtttgggctatctatatgtaaagtccaactggtgtaaacattgcacaggaggatgaacggaatttgtaaaaatttggcattagggagtgttaggaccagcatatcccccatcctagaaccatatggctatcaagtctacttctcttatttctgagatgagcaaactgaatcgtagagaggttagttagcgtcagaccatcacttcagatttcagaatatgaaaatatttataagtcctgcataaacataaactgttattactgcaattcctctcacttaaaaaacaaacaaaacaaacaaacaaaacatttagcatacgatgatgacttttagtatgtctctccatggttaaaggactcttgctcaggatcttaaaataaataaggtagacccaaagaagaaaggcaacccttatacccagggcctcatgtcactcatacattgtatgtcattctggtcatactgataaaactagagt

SEQ ID NO: 392438 - DNA, 302 bp, Homo sapiens
gggttctggcgacagggtgcctcccctaaaggggagctgtgtcttggtagatgctgccctgggggtcaggaataaaggggagctgccttcctgagagcaagaatgatgcagagggtggggtggctcacacctgtaatgtcaacacttagggagaccaaggcaggaggcttatttgaggccctgagttcaagaccaacctgtgcaacaaagtgagaccctgtctctacaaaaaattaaaaaattagccagacatggtggcacgcacctctaggcccagctactcaggaagctgaggcaggagg

SEQ ID NO: 392439 - DNA, 1046 bp, Homo sapiens
  misc_feature (868)..(868): n is a, c, g, or t
  misc_feature (900)..(900): n is a, c, g, or t
atgcaaatattagaacgtgacaaataatggtcagcagaccaggtaagagacaggatttaattttctagctcaaattactggtttttaattataaccttgacatctgtaatcattaatattttgggaagcagtcccttttcatgcttatgttacttggatatatacttgttttaattaaaattgggggccaggcgtggtggctcctgactgtaatcccagcactttgggaggccaaggcaggtgatcacttgaggtcaagagttcgagaccagcctggccaacatagtgaaaccccgtctctgctgaaaatacaaaaattagccaggcatggtggcaggcacctgtaatcccggctacttgggaggctgaggcaggagaatcacttcaatgcagagggtagaggttacagtgagccgagatcttgccactgccctccagcctgggcaacagagcaagaccttgtctcagaaaaacaaaaacaaacaaaagctgtatatatttgcaaaaacactatagtagacataccagaccatcagctccctagggctttttatgaaaaacagcagtccttccccactccccttcccagccccttagaagcagtcattttcaactctccagttccttttggtatatctctctaaataataagcctcttttgctttacagtgtttgttattatttattaacttcactccttaaatagtggtcgtttttggtaggcttacctgaccacctcacatgccaacattaattgtcactctggggccaggcacctggctcacgcctgtaatctcagcactttgggaggccgaggcgggcggatcacaaggtcaggagatcgagaccatcctggctaacacggtgnaaccccatctctactaaaaatacaaaaaattngccgggcgtggtggtgggcgcctgtagtcccagctactctggaggctgaggcaggagaatggtgtgaacccaggaggcggagcttgcggtgggctgagatcgcaccactgcactctagcctgggctacagagcgagactgcgtctc

SEQ ID NO: 392440 - DNA, 603 bp, Homo sapiens
gctccagcattatcttgttctgtttatatctggatcgtgtacttccctaagtcaagaatcagtctctaaagtcactgagaacttttacaaaagtaagtgaatatgaaacaaaagagtatgcacaataatagtggatcagatatgtatcctacttgaggacagtcatttcaggctatcttggaaccaaggaacagacagtacagacatataagcaggttatgaaagtagaagtttatgagcaacctcaaggccctgccctgcagcccaaggaccccatgaagacagctggagaggaaattttagggacaaggtggagcaaaaagaaatctgcaggtggaatcctggatttgggagtaatgactttgactttaaacctttttaaggttctagaatagagtattatgtcatagtaaattcatagtcaatagtaaatacatgattgattgatcatatcttatttaaaactattattgcttccaaaaacttcagaagatagaattaagacaatgaacaggtctagaatctgataatctagaaggatgtgactgggtgcagtggctcatgtctgtaatttgcactttgggaggctgaggcaggtgtatc

SEQ ID NO: 392441 - DNA, 425 bp, Homo sapiens
accacaaaacaagcctctcaagaaggcaggcgccgttcttagtccaatgtgtcgccgggagtgcagctcacgtttctttctcctccgtccagattccccagcttcccttcggcagctgatggcctcaccaacgtgcatttgcagcggtttattcactgaggccctgcggacgttgtcactggaatgcagaggcttggagagacgctgagcacagcttcccgttcagccgctgcatggcctcaagtgcccttctcctctattggattatctgctgattacggggaggtcaggccttggcaggtgcagaatcagtgcctgcaggacacctcaaaggacagtccaagcagacctggtcatgctattaaggacgctggccttagtttctctgtcccaaggatgtatgaaagccaggatctctgtcacag

SEQ ID NO: 392442 - DNA, 199 bp, Homo sapiens
gtctatagcatgcacagctcagagctaagcccaagacgtatgtggctttatatacagattttagggaatcctttcttcaatctttcaggattctccttaactcttcagacttttctcaacttttccttgataatttggctagaaatatggagtttctgtcacagtttctgttgcctacacaactgcttcatgattgggg

SEQ ID NO: 392443 - DNA, 770 bp, Homo sapiens
tcagattatcaattatgaaaataacccaccctgaatttgtgaattctaacggattccatttaacactcttgaagccatgatgccagctaaaagcacctcaggctgagtaaatgaggtgcttttcagagataaaataatcctggaaagcagaacaactaaagataacataaatgaatgaggaggcatttgccctgaatccagaaaatgactttgaaaagaggaaatatttcaccagtgtttatctcacactgtccaagatagactatatttgtcaggcaggaatatcctagccctcagtgggctgcagggtgtgtttaattcttcaagccttacagtctggatatgagacgccacaaggttatccaattctctcctcaccaagcactgtgacacagagaagggggcctgatcagcagatattctatgtctttggatggcatatccctttgtgaaatggaattcctgtggtttgttcatcagtctcttatagattaagttaatataaaagagtgtgtcagagacagatttccttctgaggggggataggaagttgtactgaaagaagtcagggctgagagcaaatcctccacttaaatatagaagcatgaaacacatgggatcaaatcgcattttcttcactaactacttctgtgacactagtcaggttagttcattcctctgaccttgactttcctcagtggataaacagcctacttaggattgttctgaagattctttatggcatttagcatactttctggcaaagtgtg

SEQ ID NO: 392444 - DNA, 334 bp, Homo sapiens
cttgcaagggagtctgggaaggtaagtagttgtggctgggcaattgctcttgtaatagacacagggcagtggggttcatgctgcctgccacagatggagtttgtatttcttttcctcattgtcttgtttgcaacttgactctgccattcaaagctataagtgcccagcagacctgtttccacactgtagatcttgttccactgctctcctggctcttccctattccaggagcatcttggtatcttctctatagctttgtatgacatggtcatggtcatatcttagtgtcattccaaaatacaggatcgtttttgtcagtatgaatggtatctgt

SEQ ID NO: 392445 - DNA, 405 bp, Homo sapiens
gcagctcagaacttagaacctttatatatctcagtcacccatcaatgggggaaaatactgtcagcaggtaaataattgtgaaattttctagctctctttattgcactttaacaatatctggtagatctcttaacttctgtttggtgttccacagattgtcacaccttgaaaattccaccttcttaagtcttgtatccctgatatgcctctgttgtattttcaaccagaaacgtatttctacaacttataaatgggaataattacatgcaccatctttcaaagtcagggctctagtcttggtgcatgaaataagcaaatttggagaaatacacattaaatcaatagctctctgcatgggttttaatggtagtacaagaagagaggctggagagcctccaaacaatc

SEQ ID NO: 392446 - DNA, 358 bp, Homo sapiens
tcgtactgaatgggcaaaagctggcagcattcctcttgaaaacctgcacaagacaagcatgccctctgtcaccactcctattctacatagtattggaagttctggccagggaagtgaggcaagagaaagaaataaagggtatacaaataggaagagaggaagtcaaactatctttccttgaagatgacaataagattagaggaagtcgatctatctttgcttgcagatgacaataggaaaagaggaagtcaaactatctttgcttacaaactacctttggttgcaaaggtttcctttatctacaaaatcccatcccagctatctgagtcctacaacttcttaagttgataagcaaatt

SEQ ID NO: 392447 - DNA, 405 bp, Homo sapiens
ttaagatgctctagactgagaggagggcaggaaggatccccagggatgccccagacactcccttctccaggttggacagatcagttccacctgcgcagctgtgcacttcacattctttcaatgaaaacaacttgccctttttactttaaaaagtgacttagaaaaatgttagaccactaccctaagtagaaaactagctcttttactatatagggaagtgaaccagaaaaataaaagcatagataattaaaaataaaaggtcaaaagcccagtgtggtaggctgaataatggctcccaagaagaacatgccctaatccctgtaacttgggaatgttcccttagatggcaaaagggaccctgcagatatgattaggttaagaacactgagatgaagagattattct

SEQ ID NO: 392448 - DNA, 533 bp, Homo sapiens
attcaggctgcttatttaagtaaaatatttccccattgtgagcagaataattctaaaaagtaccctgatattcaggtatgtatgtgcttcaacaattgtcagaatcattaccataattttttttactccacatccagcaacaggatcctcaaaatgttcctttttttattctaagagcaatgagttctccattgtgtaaattaagatcttaatattcatagttacttgttgctggagtttgtaaattgccagtcttgccttcatgctgagaatcaaattgcatttgtgggctggcaacacccttgttaagccatcctcatggtatgataattagagattcctgctaggtttggcttgtataaaaaagtaacacaggtgggaaaatttacatacacatcttcaataacaaattgttataatttttcagaaggggaatttttgtatttcatgtagattgctcataagcaacagtgtgattgcttttctctcatttttagatatatagcctctgcagtaaggggaccatgttaaga

SEQ ID NO: 392449 - DNA, 476 bp, Homo sapiens
cttcaaggcactactctctctctcacgtgtactgctacaaaggtcctaactggcatgattttattcacatgacaaccacagttacccttttaaagcataaatctagatatcacccttctgctcaaaactctgcactggctttaacccttagaggaaaatataaactcctttccaggagaaacctcataccctaccactctccccttcactcactctaatccagccacactggtcttccttctgttcctttttccatcttaaggacccagcacttactgttccctctacctagggtgctcttacccaagatagtcacatggctggcaccttctcatttaacatcagttcaaacatcaaatcctcagaggtcttcactaaccaactcatctaaattaccacccaaaacactctgtcacagcatcctcttattttctttatagctcttaccattatctgaaataatcttatttacatgt

SEQ ID NO: 392450 - DNA, 583 bp, Homo sapiens
gattggaattactaacagaaacaagacactaggtagtactttatttgaattttctgttgactaacattttattttgatgtcaacaaagcaaatcttgagccaattaaatctgcttaaagctgctttgtctgatgggtaagctctctcagtagttactcttcctcttgtgttaaaggcagaagaatgttctataagccaatttaaatgcaaatttaaattagtagcaacttagttgatttaactcagtacatatttcaaattaagtggtaaatttaaattagtttttaggaggtacctactgtgtattttaaatcagtgattattttggcttttctgatgaaactacatcagaatattacagggtaatgtagtaattggtttgtttttgtttttgttttttgagacggaattttacccttgttgcccatgctggagtgcagtggcgtgatcttggctcactgcaacctccacctcttgggttcaagcgattcttctgtctcagcctcccgagtagctggaactacaggcgcatgccaccatgcccagctcatttttgtatttttagtagagacaggggtttcac

SEQ ID NO: 392451 - DNA, 388 bp, Homo sapiens
cacttccccctgggtacttattagagttcagttgacaaaaccaatagcccttcttacctccaatatcttcacaactggctctcccagcacagccaagccaagagcaaaccctgagcatcagtgatgactcaaatgcagagaggcagggactcggaaaggacagtgctacctgttccatttatgtttcaacccaaagggataagtcaatcaggaggttggagagaggcagagaacataagaaacttcagtattttctttcctttctagattcaaaagcctcaattctcagaacataccagccagagtccaagccacagactgcaaaccaaggtcactgccattgccaagcttgtctcacatgtcctagctattttcttctcacactcat

SEQ ID NO: 392452 - DNA, 155 bp, Homo sapiens
ggacatcccatgtagcactgtgggcctgctgcactccacaacatgaacccacattccacatcagtcgtctcactagctgggtggtccaggctccattctggggagccttgccagctgctcctgcctggctaccgggcagtctgtaaagctttgac

SEQ ID NO: 392453 - DNA, 672 bp, Homo sapiens
acttcgagctcggcacccatcttccctctctcacgtatgatagctgatttccttacattcatgtccacccagaaataactagtttctagaaaagctgtaatatggattgtatttctgtaaagccatatgttccatacgtcctgacatcctcgcagatgccatttgattccattttgtcatattcatttaataaatattgagtgtctgcttggtgcctggcatctgcagtgcaaagaggaataatattcagttctacacgctgaaggatcccatattttgtggcaaagcaagatctaaagacataatttaagtagactgtgaataggttaatttggagctactaactggctatcatgcaggtgggaattgggaggtcacaagaaactttcagcaaatctggcatttgaactgaaccttgaattgtgaactgaatcttcccaggtgaagaaaaggggatgggctttcctgacatgtttcctgatgaaagagcatgtacttgaaagagaatggctggctctgtaaagggtgaaccgtgtgttgtcccaggattaggatgccagcagctgtttactgaaagcacaatatgtgttgtgtgcatggtgctaagtacttgttttatttcacttgatgcacacggcagccatatgaggcagtcctattattattcccatt

SEQ ID NO: 392454 - DNA, 386 bp, Homo sapiens
cgctgggattacaggcatgagccaccgcgcccagcctgcagttgtcctttagtacctgtgtagttatctttaccatgcatggatgcctggcatactttctctactggaatataagggctttttaggcaaaaactgcctctttgtctccactgtaatacccacagtatctagcgtacaattaagcacttatttgaggctcaaaaacattttatggttgctcaccaaagccatcaggtgtacttgaataaggcagagcatgaagctaccctcaggaagggagtggggcaagaatacaacagctaactttcatagggcatttctactttaccaggcactaggcaaaggggttcatgtgcattacttattttaatcctaacaacccatga

SEQ ID NO: 392455 - DNA, 301 bp, Homo sapiens
atcaaagtataaagaaaatgtataaaataaaccagttaagagaatggatgaaggtggaaattttaccatgtgagaaataacacagttttggataatgataaagagtgtattgatggaagaacccacagagaaaactgcagccacgtagaccaaatggaacaaaaagagagtctagaaatacatttatacatttgtagtcaattggcctttgacaaagatgccaagaacacacaatggagaaagctataggatagattttttaatacatgttcatgggaaaactggatatccacaggcaaaa

SEQ ID NO: 392456 - DNA, 258 bp, Homo sapiens
atctcccttttaaatcttgctgcatctcgtaagtccacaagtatatatgtttaatgttcaccattagagcttatgcaaatatttctctggtcattttgattatctgaaatttattccctagtaccttcttcagaaaatgtttatgggaacaacagtcccctgaatttttgaatgtcaatgaaagttttactctggtcgttgtatttaatggtcagtttgaatagatataaaatttttagcttatattttcttccttga

SEQ ID NO: 392457 - DNA, 210 bp, Homo sapiens
acctgcccttcctccacccgtcccagagaatgcactttcccagtgctacatacccacacataaccgcacacacacgcggcacgtgcccttcctccatctgtcctggagaatgcacattcctagtgccgagatgctgccatccctgttctgctacatttgttcttttagaaaagttctggacctttgtgaaggatggtttggagaagaaaa

SEQ ID NO: 392458 - DNA, 730 bp, Homo sapiens
cagttcctttgagtatcatatcagtgctcgtgaagtttcagattttggggcattttggattttggattttcacatttgggatgctcagcctgtactaactctgttctccttgactccttcttcacttggctggcaggactcctgcctcttcttgtctccttttacctagatggctgctttttctgtctttgctgtctccttcttttcctgacccttaaacactgaagtggctcagagcccattctttggttctccagaagcctgttaccctgtgctccgtttttctaactggtggtttgtagggcccctctttactatactgaactgacatgtgtaggtgatatagcccactgacccacatcgttattttaaaaatcagtattcatctgtaactataatagggaagaacatcagaggaaataaacgaatttgtataatactcgaatatgtttccagatgtacatgcttaagcacagctgtgtcagaacacaaagtgaattattcaggcgtctgcccctgtactcaaacgcagcagttagaaatgcagacgggagtgtcaactggataccactaggagtgatgctattggtgatacggctttgtgaaatggtagataaagttgattagagtccaaagtaaagaataatctgtttatttacatagtagttacattcctagaagattccatggaaaatcaaaagcactccaaaactttgggcttatatgtata

SEQ ID NO: 392459 - DNA, 599 bp, Homo sapiens
tgattgtactcagtatagatttgtttcctggcacacatgtatgcactatgtcacttaatcacagtgcccctattagattacaaactcctgtcaccaagggttttgttccctcttttcaaagcagaacttaaaagaattttgcttacctttaagcgtgcagttcacatcattgactttaactggatggtggttgatggctgatggtcaactaacaaaaaaggagttgaggagttgaggtttcagatataacagaaggatacttaagacttttaaggaataaaaaactaatttttcttagcacaatggttcagatgaaagtaagggtgcatcagagaaggctgtcattggtttatttgttatattcctagctcatggtgattgtatgttagccaaatatcttgcatttgattttaaaacaaatcagaagtagatgactcagaaatgttgacaataaaattatggacaagccccttgctacagcagctcttattaattaaatatctgagacagcagaattaaaagagaagaaagtgatatacaatttggaaggtttggaaagctggccataaaattatttctttcagctggagataccttac

SEQ ID NO: 392460 - DNA, 182 bp, Homo sapiens
ctgccacagcctcccaaagcactgggattacaggcgtgacccaccatgcctggccaagtatcaggttaagatcagctgtgaagggtgggctcagacctcaagctaagaaaacaaaagggctgcagagactgggagagatgtaatgagaatagtggaaaggccttggatctcaggcagccaga

SEQ ID NO: 392461 - DNA, 265 bp, Homo sapiens
cggggacacagcccatcagccagaattccaggctctgattcaactctctcctggagtggaaaccgaatggcagggaagccactaacttcatcctgaacaacgggtaccttccgactaggcatttctcactgatgctgcctggctcagtcaagcccccactcagaacctgtgggcgacactgagtcactttggctgttgatgactgtgatgatatgactactgcctgcatcccagccaggaaagagaagccctgggctactcaaca

SEQ ID NO: 392462 - DNA, 196 bp, Homo sapiens
tctcatgggttttcctaccattactttaatgtggtcagtacaaagcacaccacattttggctaacttagttgatgatgatgtgataagagtgagtgtaaacatttaagaatttcttttcaggttacatgtcaagtgatgtgccaggaaaaatcttgttgttttttgctatatgaacacagcataggactactgtag

SEQ ID NO: 392463 - DNA, 204 bp, Homo sapiens
tgctgggattacaggcatgagccaccgtgcccagccctctgtgctattatatcaaggccaggtgaagatatataaccctcttcaatttaccaaggatggtattatggcttttggtttttaattattgagaaaatatatctataaaagctgacttctgctgggttcagtggcatgggcctgtagtcacagttaagaggctgagca

SEQ ID NO: 392464 - DNA, 214 bp, Homo sapiens
ataagcatgggaccttggctttaaggagttcaaaactgagtaaggaaggtagacaagtgactacaaatgtgagtcagcatcacagctgcttcattagagatatacacattgagagaggtagcagaacacagtggttaaacacactctggccccaggtcgtctgggtgtgattctgcctctgctgctcatcagcagtgagtggcttgggaagtta

SEQ ID NO: 392465 - DNA, 255 bp, Homo sapiens
tgtgtatctttctccccatggtgactctttggcggctctcagcggcccctccctcccttcagatctgtgaacccggctgcagggtgggtgaggttgtcggataaaaggtgtcacctgggctgggcacggtggctcaggcctgtaatctcggcactttgggaggccaaggcgggtggatcacctgaggtcaggagttggagaccagcctggccaacatggcgaaaccctgtctctattaaaaatacaaaaattagc

SEQ ID NO: 392466 - DNA, 281 bp, Homo sapiens
accactgagcaggagatgcctgagagtgaagtgggggctccctgggtcaggaaagctgcccttctcccaccacgtcctcagctctcctggaaggtctgctattcagccttgggttctcatttttctttttcccagctaacccttgaagactttttgtttttttttgtagcattttctttgttgaaggattattctgatctcaaataggcaatatgttctcttttaaaatataaattcttattcagtaagtattgggggtgttagcagatttccttttgaat

SEQ ID NO: 392467 - DNA, 340 bp, Homo sapiens
acacaggataaagaactcttttttccatgtaaaagttcaggtatctaaagtcagctatcatgctgctctgtttaggttttctctttccctgtctaatcaatgctagcttcttctctaagagttctagttcttcttccttggaaccactccagtgcatcaatagcccgcaggaataaattattaacatcataaatagctttgatttggctttgattaaaattaaagattttttttttttttttgagagggagttttttttcgctcttgttggcccaggcgggaatgcaagggcgcaatctcggctcactgtcacctccacctcccaggttcaaacaattct

SEQ ID NO: 392468 - DNA, 297 bp, Homo sapiens
ggtgagtagctctttgactagaacgtaagaaaaagatttctaactaggactcacaatccaaaggcaataccagactggtaaattttactacataaaattaataaaatgggccaggcgcggtggctcacgcctataatcccagcactttgggaggccaaggtgggccgatcatgaggtcaagagattgagaccattctggccaacatggcgaaaccccatctctactaaaaatacaaaaattagctgggcatggtggcgtgcacctgtagtcccagctactcaggaagctgaggcaga

SEQ ID NO: 392469 - DNA, 775 bp, Homo sapiens
aatagcttgaacccgtgggggcagaggttgctgtgagacaagatcacgccacttcactccagcctggacgaaagagtgaactccatctcaaaaaacaaaaaaggaggtctgattcacattcagattcttgtccatccattgcctttgcactagatttatgagaggacaaactttttattagttggagattggtaagtcacctgccctagggaataatgagaaactgggtaattcaactgaatttttctccatcttcttcaaaatcatgtttttgtcttctgttactttttcatcagagtactgccatggcaaaaaaacaaaacacttccccactcaggtcccactcctgagagataaccacatttaagtacttctgacttgtaatagaatgcaaaatcggggcttccaagtgtggtttactattttgtttagaattaatttgtagaatactagacacttttttcagaaccacatatgaaggactttatatcttttgtgattgttcacagattttggtggccggacgttaggagtatagagctgaagagagaattcctgtgctttagaggttcgctgggtagtgagggagagaagcaggctaatggctgggtgcatccagttttagggtggtaattcctgtaacacaagtgtgaacaacatagtcaagaacattcattcattcgtttgttcattcattcagcaaatagttaccgagtggctgctgtgtaccaggcactgaggagggagtgatgagcgaaaacaggcattgtttctc

SEQ ID NO: 392470 - DNA, 888 bp, Homo sapiens
ttccgactgctcccttcgccactcgcgcggcttccactcctggactcggcctccacccctgggcttggcctcaaagcctcctcagttgtcggccctggaaggtgcccagcggcgggagacatccccctttcgaaccacccccccactccaagtggcgagcagcgaccgtaaggccggagggggcgagacgcagcgaaacagaggaagacgcgacaggcgaggagcgcgctgcagtggcgagagagaagcacaaacgcgacagccacgaacggaatcacacccggcgctgatagtgacgaagcagagagaggcaagagagcacgtcgcgggaacagaacggaccagcggaaacgagaagaggacagacggaagagaaaacaacgcgcggacagacggcgacggaaggagagcgcaggccgcgcagccgacgaggcgcacctcactccagcgacaccgcaccgtcctcacctcactcctgcggcagagcgacgaagagtagcatcggcagcggtcttacgagcgaagaactacggccagcgccgcgcaacgacgagaccccagcacacgccaagacgagagcagaggcgagcgtaccgccagagcgagggcaggaccaagggagcaaacgatacacgcaacatctcatccacataaaaccacaaaaatatcaattcacaatgaaccactatatacatgaaaatcaccgatccagtgcttgagcgccccaagatcggacaccacatcacactcgcatctagtacacgaaactcttcacgtccacttcgtgagtaaataaaacaacatacatatgagccaacacaacagctaatcaaactagacacaagacaaaatataaacctcatgacttatatacaacatccataatca

SEQ ID NO: 392471 - DNA, 508 bp, Homo sapiens
tggatgcagtttgtctacacaagagtacatataactatgccaactgttcttaaaatataaatagaaaccaaggtacagagcgtactctgagctggtcttgctatcgcagcataagcccttcagcctgcacatattagtaattaccttggagcagcagttttctattgaaaacacctatcgtttttatctctccagatactgaagagatacccttctgtatctgtgaccctttagctttctggattgctgaattaaatcctatccttcgtgttttctgagacaaagttttgctcctattgcccaggctggagtgaagtgggcagatcacctgaggtcaggagttcaggaccagcctggccaacatggtggaaccctgtctctactaaaaatacaaaaaattagccaggtgtggtgacgggcacctgtaaacccagctactcgggaggctgaggcaggagaattgcttgaacccaggaggcagaggttacagtgagccgagattgtgcca

SEQ ID NO: 392472 - DNA, 294 bp, Homo sapiens
gtagagtggaggggtggtctagggggcctccctggttaggctggagtcagtgttgggccacactccatggactcaaagtttttgaataaagaccattatcatgttaccatcttctgcccaagtcctttttgatgacttttcttttagggcagaaaatgtgctcatgtcaaggcaacatatacctaaacttctaattaagtctataatcccagaagaatttcatttagctaacaagcaactgggagagaacattctggaacaaaacatctgaaactgaaagggcagcccaaagga

SEQ ID NO: 392473 - DNA, 881 bp, Homo sapiens
tggatgctttttgccattctgatggtaaatgatgagacaggctaccatggatttcagcaccccttctgtgtttgatcagcaaagaggtgactcatctgaggaagttgacctgaccatggtttatcaagcagcctctaatggagatgtcaatgctctgactgcagtgattcgggaagacccttctatcctagaatgctgtgacagtgaaggatgcacgcccttgatgcatgcggtttctggacgtcaagcggacacagtgaagctgctgttgaagatgggagccaatattaacatgcaggatgcttatggccgcacaagtttatgcctggccacctacctgggctggcttgaaggctgtgtgagtctactcagaaacggtgccaagcacaatatcccagataaaaatggccgcctgccactgcatgctgccactgctgagcccgatatgaggctcctcacggtcctgttgcaacagtcgaacatcagcgagattaatcaccaggacaatgagtgagttcaggtgatctgccaccctggcctcccaaagtgctgagattacaggacctcagaagaatcattgacatagagtgaggcttgtctgttgcagctaccgggagttaaatggaaactaacctctcctgctctcattttagccttgacaggaagagtgttctatcaagagaggctctgagctgttggcatctgggttagaactttgaatgcatttaaccagagaagcactgttatgcacagcatttaggatatatatattgtttaggatatattaaatgcacattcttatgtaagcagatttttgtgagcagtctgacaaacaaaacttcaattgtagaaccactctgagaaaataaatttaagttgca

SEQ ID NO: 392474 - DNA, 286 bp, Homo sapiens
ctcagcatctactacttcctcccacctaccaccaaatattgcacaagcaatcaatggaaaagtgcctttttccagtaatagagccttaatcttatctcacagatgaacttctagtttttagttaaggctagacatggactaggacttgaaggagatgtaggtaacagcttagagagaaagcatagaagaatggagtataaatcctcagagaggccaggcacggtggctcacacctatgatcccagcactttgggaggctgaggtaggcagatcacgaggtcagggg

SEQ ID NO: 392475 - DNA, 499 bp, Homo sapiens
ggcccccagctcaacagacttttatcacatctcaggatctggataatctctttgcctgtaggaattttttttaattaagatttttatcattgtcatccccttcccccttccagttcatttaagactgttatgaaacaaaactcattatgcttcaaaatctgacagagctaaggccccggagaaagtgagaggaggcggtagcagggggtgcttccttccatttccccccctccgtggttttctcctgtggttggttcacttaggacggcccggagcctactgggttgaggtgagtagggcttcccagacctcgcagggtccatccacgggaaagtctgttgtcagccagagaagagaatgctaccttcccagggcagggggtttctccagacaccagtgctcaggatggaagaaaaaaggaagcagactggagaggaaaggagagagaagtgaggtgcattttgcatggctcagctggaggaatactgtcactagagaa

SEQ ID NO: 392476 - DNA, 428 bp, Homo sapiens
ttattcacactatagaaaacagaaatctgagctgaatcacagaaaagtgacataactggccaagatcacatagccagtaagtggcagagctggggctaaagggattatattggccagactccttcattgacacaaaattttgggaagcaatttgtttgtacaatcttttttggaatggaaagatactaatatacctctaactttggagcattctcattaaaagagaaaagagtggcacggttcatctggcctgccaaatgaggattacatagcccatattccagtatctggaggatctgttgtaaaatgtggagtaaataatttcagctattggggtgcttcatttaggtattatctttatcttacaaacttccaaaaaaacacttcagctaacgttgacatatatataatatttctcactaaagcta

SEQ ID NO: 392477 - DNA, 357 bp, Homo sapiens
tgtaactttgcacaagcagttcatctccatagtacaattaaacaataagttcaaacagtaacaaaacaataagaggcctggcggtggctcatgcctgtaatcccagcactttgggaggccgaggcgggtggatcacaaggtcaggaaatcgagaccgtccttgctaacatggtgaaaccccgtctgtattaaaaatacaaaaaattagccgggtgtggtggtgggcgtctataatcccagctacttgggaggctgaggcaggagaatggcatgaacctgggaggcggagcttgcagtgagccaagatcatgccactgcactccatcctgggtgacagagctagatagactccctctc

SEQ ID NO: 392478 - DNA, 406 bp, Homo sapiens
ttagacatatgctttttggttgtgaatactataaaatttgatttcttctcctatggagaattataagttatatcataatgagaatccacttgttcccctagagttctacgctgaatctgtagaaccaaataaaggaatggatttaggttttaggagcctgaatgaaataaaaaccatttctgaatctggccaattctggtaagttcacaactattagaggttatcagtgctagaatttccaatagataataatcattctttattcattcctgagaatttgattttacaaggacgtttctgtatttcattctctggagactgtattttcatgtttagatgtgtttggacaaggatttaagtaagaacagttgtagttttaggggattgtggtgactcccaggattga

SEQ ID NO: 392479 - DNA, 351 bp, Homo sapiens
caggccttttccttggcaggtactgggagaagcagagataacgttgcggcaatggtgtggaagaaaaattgggaaaattgagctgttggacaaggccaggattgggagaggcagccttcgggtgccagccttgctggctgtgacggctgacccacccaagtgcagtgggcgtgggcgataagagaactgccacagcctgcccagtcacagtgctggtgccaggacatcaaatgccacccagcccccacagcttccggacactggccaagtccccaagggctgcagcggcccaaggcctcacccgtacagccagccactggcctctgccttcccagaagtctgtgcctgggg

SEQ ID NO: 392480 - DNA, 470 bp, Homo sapiens
aatgtacagatttttaaatcaatgaactgtacattttaaaagggtgaattggccaggagcagtggcttacgcctttaatcccagcactttgggaggccgaggcaggcagatcacaaggtcaggagtttgagaccagcctggccaacacagtgaaaccccgtctctactaaaaatacaaaaaaaaaaaaattagccggtgtggtggtgggtgcctgtaatctcagctacttgggaggctgaagcaggagaatcgcttgaacctggaaggcggaggttgcagtgagctgagatcgtgctactgcactacagcctgggcaacaatccatctcaaaaacaaacaaacaaacaaaaaaaacaggtgaattttatgatatgagaattatatttcaataaagtttttaaaactactatagaaaaataatttaaatttttattaaaatatataggttaaaatatatgcatttcttaac

SEQ ID NO: 392481 - DNA, 400 bp, Homo sapiens
aaaccaccatgatgttctgagatgtggctggtcgggtaaagtgggtgggagaggccgggcaggtgagtggctttgaaggtgaagaggctacaggtgattacctccagtgggccaacctgtggagggctcggcatctttgcctaagaggaagtcacaccccttccacaccctccaaccccacaactgaggttagccaacagctctttaaaaataaagccaggccggatgcagcggctcccgtttgtaatcccaacactttgggaggccaaagcagctggaccacctgaggtcaggagtttatgagaccagcctgaccaacatggagaaactctgtctctactaaaaatacaaaattatccaggcatcgtggcgcacacctgtaatcccagctactcgggag

SEQ ID NO: 392482 - DNA, 422 bp, Homo sapiens
ttaccacgattacgctcctagacgggtagttgggggattgcaagaagaaaaaaatacttgatagtgtccaggataattttcaggttcaaggatatatgatgttagaggcagctggcattaaacaacagatctgaagaggagactaggcattaagaagcatttctgtgggaaccatgaaatctccagatttgggggatatactctaccaaattagacatggacctcagatcctggccagaagctcattctgtaatgggagctcctgttatatttatcgtatttacccagcatgagatcaagggaatggaatactgcatgtgataggctgctgtgggcaaactgaggaatattgagagagacttgaaggtgtggagggaacaaagtaaaagacagtgagaattgggaggtgaaacgagatactt

SEQ ID NO: 392483 - DNA, 154 bp, Homo sapiens
aaggagatggaggagtctctttcacacatatgcacatacacagtatgctggaggaagctctatcatcttttatgaatctatcttaagaaattatgttgttacttccaccacatggattcatttgaaacaagtcatcaaagttgtcccatcttca

SEQ ID NO: 392484 - DNA, 801 bp, Homo sapiens
cagatgaagatgtctacccagtgtgtctcagggatttgcccaggaagaaacagggagacagcaattgcatgaggtcctgcacaggccatcctgaccacaatactctgcctttccacgataccctccctccattccccaggaaggcggccagagagagctagtgctggtttaagacgggcttcggtgatatgaaggctaatgttctgtcggctcacacctgtgtgctttctgttgctttcagccaatctttgtggattattcattgcctgtaccatcatggttgctaaacagtttggatattagtcttggatcttttgcctaactttaaagttgacagtcaaaacatgatggaaattagttgagaattaagatgacacatatactgtgatttgtttgtcaggattgagagaaagagtaggatgttgttaggataatgatgcatggtatgtaagggaggtgtcacagagtttgatgtagaaaatcatgcgtcatatctgtatttttacctgttctgcaaaaatcaattttatattgttgttataaataaatgtacattgtatttttttaaccctcttcaggattaaccctcccattagttgtctatattctttgcctgctgtaaaataggagatatgcattttcctttcatccccgtgcaagctggctaggaaatgaatccccacggtagaaactcatcgccctacaagttaatagaaaaatgctgttattgctggtgtaaattaggttgcatacttaattggttacagtatttttgcaggcaattttacatcataaatgcca

SEQ ID NO: 392485 - DNA, 801 bp, Homo sapiens
tctctaatgctgaatggtacttgattatatatgcctctgaaatggcaacttgtagagatatttatgatgtatctttaccttgtttaattttagaaggttttttaaatttaattttatttttttgagatggagtttcatcctttcacctaggctggagagaagtggcaggatctcagatcactgcaacctcttcctcctgggttcaagcagttctcctgcttcagcctcccaagcagttgggattatacgtgtccactaccatgcctggctaattttgtgtgattttggcgaaagagggaaatccattcttcataaaaataaaattaaaaaaattaagaattaacaagagaaaaaggaaagaagagatttcccttgggaagggcccggggtggcacaagagaacagaggaggaagagcataaggatccggggaaatccctaacgtgaggaggaaaaaacccggcgagtcaagggaagagtgggtggtgggggaaattcagtgaatagaatggtggtcgaaagtgctgggtaccctggagcgggcaaacaaagaattcgaagatggagcattttagaaaattcaacaaaggcgaactcaaatcagaatgggttcgggagacacggcctcggtctggctcccagcgtggggaagaaagaagcaaggatctcttggctccaaagagacaaaggacacaaaaaagaggaggtgctacaagaaagaggccccccaagagggaaggggggacggggaatattagcgccggaaaggggatggcaaagaattagagaggcgccacccggg

SEQ ID NO: 392486 - DNA, 351 bp, Homo sapiens
atccatgtctagggttttaagttcatgaaactagtggaaaaaagaaaagctatcaaagacagggaagtatatcaccataaaacccaaatatatgaaaaagaaatatctgttctttgtatatgatgacagtatttgacaatacaggaaagtcttgcttggtaagaccatttctcctaacttttggaagacaccagataagaaatttgtcagaggcacagtcctgactgaaggagacttttccatataacccccatgctatgttttttccttcccaacccatctcacttatccttataaaacaatataatatgggttaatatatcagatactccaaaacagacaaagagaaca

SEQ ID NO: 392487 - DNA, 1544 bp, Homo sapiens
agggagtgtgtgtatttcctcccgttctttatcagagcccccaaaataagtaggaatgggcagtggctattcacattcactacaccttttccatttgctaataaggccctgccaggctgggagggaattgtccctgcctgcttctggagaaagaagatattgacaccatctacgggcaccatggaactgcttcaagtgaccattctttttcttctgcccagtatttgcagcagtaacagcacaggtgttttagaggcagctaataattcacttgttgttactacaacaaaaccatctataacaacaccaaacacagaatcattacagaaaaatgttgtcacaccaacaactggaacaactcctaaaggaacaatcaccaatgaattacttaaaatgtctctgatgtcaacagctacttttttaacaagtaaagatgaaggattgaaagccacaaccactgatgtcaggaagaatgactccatcatttcaaacgtaacagtaacaagtgttacacttccaaatgctgtttcaacattacaaagttccaaacccaagactgaaactcagagttcaattaaaacaacagaaataccaggtagtgttctacaaccagatgcatcaccttctaaaactggtacattaacctcaataccagttacaattccagaaaacacctcacagtctcaagtaataggcactgagggtggaaaaaatgcaagcacttcagcaaccagccggtcttattccagtattattttgccggtggttattgctttgattgtaataacactttcagtatttgttctggtgggtttgtaccgaatgtgctggaaggcagatccgggcacaccagaaaatggaaatgatcaacctcagtctgataaagagagcgtgaagcttcttaccgttaagacaatttctcatgagtctggtgagcactctgcacaaggaaaaaccaagaactgacagcttgaggaattctctccacacctaggcaataattacgcttaatcttcagcttctatgcaccaagcgtggaaaaggagaaagtcctgcagaatcaatcccgacttccatacctgctgctggactgtaccagacgtctgtcccagtaaagtgatgtccagctgacatgcaataatttgatggaatcaaaaagaaccccggggctctcctgttctctcacatttaaaaattccattactccatttacaggagcgttcctaggaaaaggaattttaggaggagaatttgtgagcagtgaatctgacagcccaggaggtgggctcgctgataggcatgactttccttaatgtttaaagttttccgggccaagaatttttatccatgaagactttcctacttttctcggtgttcttatattacctactgttagtatttattgtttaccactatgttaatgcagggaaaagttgcacgtgtattattaaatattaggtagaaatcataccatgctactttgtacatataagtattttattcctgctttcgtgttacttttaataaataactactgtactcaa

SEQ ID NO: 392488 - DNA, 4049 bp, Homo sapiens
agggagtgtgtgtatttcctcccgttctttatcagagcccccaaaataagtaggaatgggcagtggctattcacattcactacaccttttccatttgctaataaggccctgccaggctgggagggaattgtccctgcctgcttctggagaaagaagatattgacaccatctacgggcaccatggaactgcttcaagtgaccattctttttcttctgcccagtatttgcagcagtaacagcacaggtgttttagaggcagctaataattcacttgttgttactacaacaaaaccatctataacaacaccaaacacagaatcattacagaaaaatgttgtcacaccaacaactggaacaactcctaaaggaacaatcaccaatgaattacttaaaatgtctctgatgtcaacagctacttttttaacaagtaaagatgaaggattgaaagccacaaccactgatgtcaggaagaatgactccatcatttcaaacgtaacagtaacaagtgttacacttccaaatgctgtttcaacattacaaagttccaaacccaagactgaaactcagagttcaattaaaacaacagaaataccaggtagtgttctacaaccagatgcatcaccttctaaaactggtacattaacctcaataccagttacaattccagaaaacacctcacagtctcaagtaataggcactgagggtggaaaaaatgcaagcacttcagcaaccagccggtcttattccagtattattttgccggtggttattgctttgattgtaataacactttcagtatttgttctggtgggtttgtaccgaatgtgctggaaggcagatccgggcacaccagaaaatggaaatgatcaacctcagtctgataaagagagcgtgaagcttcttaccgttaagacaatttctcatgagtctggtgagcactctgcacaaggaaaaaccaagaactgacagcttgaggaattctctccacacctaggcaataattacgcttaatcttcagcttctatgcaccaagcgtggaaaaggagaaagtcctgcagaatcaatcccgacttccatacctgctgctggactgtaccagacgtctgtcccagtaaagtgatgtccagctgacatgcaataatttgatggaatcaaaaagaaccccggggctctcctgttctctcacatttaaaaattccattactccatttacaggagcgttcctaggaaaaggaattttaggaggagaatttgtgagcagtgaatctgacagcccaggaggtgggctcgctgataggcatgactttccttaatgtttaaagttttccgggccaagaatttttatccatgaagactttcctacttttctcggtgttcttatattacctactgttagtatttattgtttaccactatgttaatgcagggaaaagttgcacgtgtattattaaatattaggtagaaatcataccatgctactttgtacatataagtattttattcctgctttcgtgttacttttaataaataactactgtactcaatactctaaaaatactataacatgactgtgaaaatggcaatgttattgtcttcctataattatgaatatttttggatggattattagaatacatgaactcactaatgaaaggcatttgtaataagtcagaaagggacataggattcacatatcagactgttagggggagagtaatttatcagttctttggtctttctatttgtcattcatactatgtgatgaagatgtaagtgcaagggcatttataacactatactgcattcattaagataataggatcatgatttttcattaactcatttgattgatattatctccatgcattttttatttcttttagaaatgtaattatttgctctagcaatcattgctaacctctagtttgtagaaaatcaacactttataaatacataattatgatattatttttcattgtatcactgttctaaaaataccatatgattatagctgccactccatcaggagcaaattcttctgttaaaagctaactgatcaaccttgaccacttttttgacatgtgagatcaaagtgtcaagttggctgaggttttttggaaagctttagaactaataagctgctggtggcagctttgtaacgtatgattatctaagctgattttgatgctaaattatcttagtgatctaaggggcagtttagtgaagatggaatcttgtatttaaaatagccttttaaaatttgttttgtggtgatgtattttgacaacttccatctttaggagttatataatcaccttgattttagtttcctgatgtttggactatttataatcaaggacaccaagcaagcataagcatatctatatttctgactggtgtctctttgagaaggatgggaagtagaaaaaaaaaaaagaaagaaaggaaaggaagagaggagagaagaaggcagggatctccactatgtatgttttcactttagaactgttgagcccatgcttaattttaatctagaagtctttaaatggtgagacagtgactggagcatgccaatcagagagcatttgtcttcagaaaaaaaaaaaatctgagtttgagactagcctggccaacatgttgaaaccccatatctactaaaaatacaaaaattagcctggtgtggtggcgcacgcctgtagtcccagctactctggagcctgaggaacgtgaatcgcttgaacccagaagacagaggttgcagtgagctgagatggcactattgcactccagcctgggtgacacagcaagactctgtctcaaaaaaaaaaaaaaaaaaaaaaggaaaaaaaagaaagaaagaaagtcccagcacacctagataatttaccgagctcttcagcaaaaaccatgttacatacagcatattccaaagaaatgaactcttctgcaatttaaattataagtaatatgttattttggatcctagagaaaccattttctctacatttcatgagcattgttagaaaagagtttacaagaattaggaagagggaacaattttaatggtcagaaaagaataaaatttattctagttcaagaagtgcacacaaagaatatgcattaatctaacaactatgagattaaatctttcaaaaaggtcaaaggaggattgagaagtttacagagatgtccacggcattttatatcaatctcaaaggtaaggtctgcatttttataaaccaacttaaacttctgttgagataggatattttgttttcaagccaaaattaccattaatcaaatatgttttaattatctgatttagatgatctactttttatgcctggcttactgtaagttttttattctgatacacagttcaaacatcattgcaacaaagaagtgcctgtatttagatcaaaggcaagactttctatgtgtttgttttgcataataatatgaatataatttaagtctatcaatagtcaaaacataaacaaaagctaattaactggcactgttgtcacctgagactaagtggatgttgttggctgacatacaggctcagccagcagagaaagaattctgaattccccttgctgaactgaactattctgttacatatggttgacaaatctgtgtgttatttcttttctacctaccatatttaaatttatgagtatcaaccgaggacatagtcaaaccttcgatgatgaacattcctgattttttgcctgattattctctgttgagctctacttgtggtcattcaagattttatgatgttgaaaggaaaagtgaatatgacctttaaaaattgtattttgggtgatgatagtctcaccactataaaactgtcaattattgcctaatgttaaagatatccatcattgtgattaattaaacctataatgagtattcttaatggagaattcttaatggatggattatcccctgatcttttctttaaaatttctctgcacacacaggacttctcattttccaataaatgggtgtactctgccccaatttctagggaaaaaaaaatt

SEQ ID NO: 392489 - DNA, 3912 bp, Homo sapiens
agggagtgtgtgtatttcctcccgttctttatcagagcccccaaaataagtaggaatgggcagtggctattcacattcactacaccttttccatttgctaataaggccctgccaggctgggagggaattgtccctgcctgcttctggagaaagaagatattgacaccatctacgggcaccatggaactgcttcaagtgaccattctttttcttctgcccagtatttgcagcagtaacagcacaggtgttttagaggcagctaataattcacttgttgttactacaacaaaaccatctataacaacaccaaacacagaatcattacagaaaaatgttgtcacaccaacaactggaacaactcctaaaggaacaatcaccaatgaattacttaaaatgtctctgatgtcaacagctacttttttaacaagtaaagatgaaggattgaaagccacaaccactgatgtcaggaagaatgactccatcatttcaaacgtaacagtaacaagtgttacacttccaaatgctgtttcaacattacaaagttccaaacccaagactgaaactcagagttcaattaaaacaacagaaataccaggtagtgttctacaaccagatgcatcaccttctaaaactggtacattaacctcaataccagttacaattccagaaaacacctcacagtctcaagtaataggcactgagggtggaaaaaatgcaagcacttcagcaaccagccggtcttattccagtattattttgccggtggttattgctttgattgtaataacactttcagtatttgttctggtgggtttgtaccgaatgtgctggaaggcagatccgggcacaccagaaaatggaaatgatcaacctcagtctgataaagagagcgtgaagcttcttaccgttaagacaatttctcatgagtctggtgagcactctgcacaaggaaaaaccaagaactgacagcttgaggaattctctccacacctaggcaataattacgcttaatcttcagcttctatgcaccaagcgtggaaaaggagaaagtcctgcagaatcaatcccgacttccatacctgctgctggactgtaccagacgtctgtcccagtaaagtgatgtccagctgacatgcaataatttgatggaatcaaaaagaaccccggggctctcctgttctctcacatttaaaaattccattactccatttacaggagcgttcctaggaaaaggaattttaggaggagaatttgtgagcagtgaatctgacagcccaggaggtgggctcgctgataggcatgactttccttaatgtttaaagttttccgggccaagaatttttatccatgaagactttcctacttttctcggtgttcttatattacctactgttagtatttattgtttaccactatgttaatgcagggaaaagttgcacgtgtattattaaatattaggtagaaatcataccatgctactttgtacatataagtattttattcctgctttcgtgttacttttaataaataactactgtactcaatactctaaaaatactataacatgactgtgaaaatggcaatgttattgtcttcctataattatgaatatttttggatggattattagaatacatgaactcactaatgaaaggcatttgtaataagtcagaaagggacataggattcacatatcagactgttagggggagagtaatttatcagttctttggtctttctatttgtcattcatactatgtgatgaagatgtaagtgcaagggcatttataacactatactgcattcattaagataataggatcatgatttttcattaactcatttgattgatattatctccatgcattttttatttcttttagaaatgtaattatttgctctagcaatcattgctaacctctagtttgtagaaaatcaacactttataaatacataattatgatattatttttcattgtatcactgttctaaaaataccatatgattatagctgccactccatcaggagcaaattcttctgttaaaagctaactgatcaaccttgaccacttttttgacatgtgagatcaaagtgtcaagttggctgaggttttttggaaagctttagaactaataagctgctggtggcagctttgtaacgtatgattatctaagctgattttgatgctaaattatcttagtgatctaaggggcagtttagtgaagatggaatcttgtatttaaaatagccttttaaaatttgttttgtggtgatgtattttgacaacttccatctttaggagttatataatcaccttgattttagtttcctgatgtttggactatttataatcaaggacaccaagcaagcataagcatatctatatttctgactggtgtctctttgagaaggatgggaagtagaaaaaaaaaaaagaaagaaaggaaaggaagagaggagagaagaaggcagggatctccactatgtatgttttcactttagaactgttgagcccatgcttaattttaatctagaagtctttaaatggtgagacagtgactggagcatgccaatcagagagcatttgtcttcagaaaaaaaaaaaatctgagtttgagactagcctggccaacatgttgaaaccccatatctactaaaaatacaaaaattagcctggtgtggtggcgcacgcctgtagtcccagctactctggagcctgaggaacgtgaatcgcttgaacccagaagacagaggttgcagtgagctgagatggcactattgcactccagcctgggtgacacagcaagactctgtctcaaaaaaaaaaaaaaaaaaaaaaggaaaaaccatgttacatacagcatattccaaagaaatgaactcttctgcaatttaaattataagtaatatgttattttggatcctagagaaaccattttctctacatttcatgagcattgttagaaaagagtttacaagaattaggaagagggaacaattttaatggtcagaaaagaataaaatttattctagttcaagaagtgcacacaaagaatatgcattaatctaacaactatgagattaaatctttcaaaaaggtcaaaggaggattgagaagtttacagagatgtccacggcattttccaaaattaccattaatcaaatatgttttaattatctgatttagatgatctactttttatgcctggcttactgtaagttttttattctgatacacagttcaaacatcattgcaacaaagaagtgcctgtatttagatcaaaggcaagactttctatgtgtttgttttgcataataatatgaatataatttaagtctatcaatagtcaaaacataaacaaaagctaattaactggcactgttgtcacctgagactaagtggatgttgttggctgacatacaggctcagccagcagagaaagaattctgaattccccttgctgaactgaactattctgttacatatggttgacaaatctgtgtgttatttcttttctacctaccatatttaaatttatgagtatcaaccgaggacatagtcaaaccttcgatgatgaacattcctgattttttgcctgattattctctgttgagctctacttgtggtcattcaagattttatgatgttgaaaggaaaagtgaatatgacctttaaaaattgtattttgggtgatgatagtctcaccactataaaactgtcaattattgcctaatgttaaagatatccatcattgtgattaattaaacctataatgagtattcttaatggagaattcttaatggatggattatcccctgatcttttctttaaaatttctctgcacacacaggacttctcattttccaataaatgggtgtactctgccccaatttctagggaaaaaaaaatt

SEQ ID NO: 392490 - DNA, 2996 bp, Homo sapiens
ttatctccagaattcggcttagcgtggtcccggccgaggtacccagacgtctgtcccagtaaagtgatgtccagctgacatgcaataatttgatggaatcaaaaagaaccccggggctctcctgttctctcacatttaaaaattccattactccatttacaggagcgttcctaggaaaaggaattttaggaggagaatttgtgagcagtgaatctgacagcccaggaggtgggctcgctgataggcatgactttccttaatgtttaaagttttccgggccaagaatttttatccatgaagactttcctacttttctcggtgttcttatattacctactgttagtatttattgtttaccactatgttaatgcagggaaaagttgcacgtgtattattaaatattaggtagaaatcataccatgctactttgtacatataagtattttattcctgctttcgtgttacttttaataaataactactgtactcaatactctaaaaatactataacatgactgtgaaaatggcaatgttattgtcttcctataattatgaatatttttggatggattattagaatacatgaactcactaatgaaaggcatttgtaataagtcagaaagggacataggattcacatatcagactgttagggggagagtaatttatcagttctttggtctttctatttgtcattcatactatgtgatgaagatgtaagtgcaagggcatttataacactatactgcattcattaagataataggatcatgatttttcattaactcatttgattgatattatctccatgcattttttatttcttttagaaatgtaattatttgctctagcaatcattgctaacctctagtttgtagaaaatcaacactttataaatacataattatgatattatttttcattgtatcactgttctaaaaataccatatgattatagctgccactccatcaggagcaaattcttctgttaaaagctaactgatcaaccttgaccacttttttgacatgtgagatcaaagtgtcaagttggctgaggttttttggaaagctttagaactaataagctgctggtggcagctttgtaacgtatgattatctaagctgattttgatgctaaattatcttagtgatctaaggggcagtttagtgaagatggaatcttgtatttaaaatagccttttaaaatttgttttgtggtgatgtattttgacaacttccatctttaggagttatataatcaccttgattttagtttcctgatgtttggactatttataatcaaggacaccaagcaagcataagcatatctatatttctgactggtgtctctttgagaaggatgggaagtagaaaaaaaaaaaagaaagaaaggaaaggaagagaggagagaagaaggcagggatctccactatgtatgttttcactttagaactgttgagcccatgcttaattttaatctagaagtctttaaatggtgagacagtgactggagcatgccaatcagagagcatttgtcttcagaaaaaaaaaaaatctgagtttgagactagcctggccaacatgttgaaaccccatatctactaaaaatacaaaaattagcctggtgtggtggcgcacgcctgtagtcccagctactctggagcctgaggaacgtgaatcgcttgaacccagaagacagaggttgcagtgagctgagatggcactattgcactccagcctgggtgacacagcaagactctgtctcaaaaaaaaaaaaaaaaaaaaaaggaaaaaaaagaaagaaagaaagtcccagcacacctagataatttaccgagctcttcagcaaaaaccatgttacatacagcatattccaaagaaatgaactcttctgcaatttaaattataagtaatatgttattttggatcctagagaaaccattttctctacatttcatgagcattgttagaaaagagtttacaagaattaggaagagggaacaattttaatggtcagaaaagaataaaatttattctagttcaagaagtgcacacaaagaatatgcattaatctaacaactatgagattaaatctttcaaaaaggtcaaaggaggattgagaagtttacagagatgtccacggcattttatatcaatctcaaaggtaaggtctgcatttttataaaccaacttaaacttctgttgagataggatattttgttttcaagccaaaattaccattaatcaaatatgttttaattatctgatttagatgatctactttttatgcctggcttactgtaagttttttattctgatacacagttcaaacatcattgcaacaaagaagtgcctgtatttagatcaaaggcaagactttctatgtgtttgttttgcataataatatgaatataatttaagtctatcaatagtcaaaacataaacaaaagctaattaactggcactgttgtcacctgagactaagtggatgttgttggctgacatacaggctcagccagcagagaaagaattctgaattccccttgctgaactgaactattctgttacatatggttgacaaatctgtgtgttatttcttttctacctaccatatttaaatttatgagtatcaaccgaggacatagtcaaaccttcgatgatgaacattcctgattttttgcctgattattctctgttgagctctacttgtggtcattcaagattttatgatgttgaaaggaaaagtgaatatgacctttaaaaattgtattttgggtgatgatagtctcaccactataaaactgtcaattattgcctaatgttaaagatatccatcattgtgattaattaaacctataatgagtattcttaatggagaattcttaatggatggattatcccctgatcttttctttaaaatttctctgcacacacaggacttctcattttccaataaatgggtgtactctgccccaatttctagggaaaaaaaaatt

SEQ ID NO: 392491 - DNA, 1585 bp, Homo sapiens
agggagtgtgtgtatttcctcccgttctttatcagagcccccaaaataagtaggaatgggcagtggctattcacattcactacaccttttccatttgctaataaggccctgccaggctgggagggaattgtccctgcctgcttctggagaaagaagatattgacaccatctacgggcaccatggaactgcttcaagtgaccattctttttcttctgcccagtatttgcagcagtaacagcacaggtgttttagaggcagctaataattcacttgttgttactacaacaaaaccatctataacaacaccaaacacagaatcattacagaaaaatgttgtcacaccaacaactggaacaactcctaaaggaacaatcaccaatgaattacttaaaatgtctctgatgtcaacagctacttttttaacaagtaaagatgaaggattgaaagccacaaccactgatgtcaggaagaatgactccatcatttcaaacgtaacagtaacaagtgttacacttccaaatgctgtttcaacattacaaagttccaaacccaagactgaaactcagagttcaattaaaacaacagaaataccaggtagtgttctacaaccagatgcatcaccttctaaaactggtacattaacctcaataccagttacaattccagaaaacacctcacagtctcaagtaataggcactgagggtggaaaaaatgcaagcacttcagcaaccagccggtcttattccagtattattttgccggtggttattgctttgattgtaataacactttcagtatttgttctggtgggtttgtaccgaatgtgctggaaggcagatccgggcacaccagaaaatggaaatgatcaacctcagtctgataaagagagcgtgaagcttcttaccgttaagacaatttctcatgagtctggtgagcactctgcacaaggaaaaaccaagaactgacagcttgaggaattctctccacacctaggcaataattacgcttaatcttcagcttctatgcaccaagcgtggaaaaggagaaagtcctgcagaatcaatcccgacttccatacctgctgctggactgtaccagacgtctgtcccagtaaagtgatgtccagctgacatgcaataatttgatggaatcaaaaagaaccccggggctctcctgttctctcacatttaaaaattccattactccatttacaggagcgttcctaggaaaaggaattttaggaggagaatttgtgagcagtgaatctgacagcccaggaggtgggctcgctgataggcatgactttccttaatgtttaaagttttccgggccaagaatttttatccatgaagactttcctacttttctcggtgttcttatattacctactgttagtatttattgtttaccactatgttaatgcagggaaaagttgcacgtgtattattaaatattaggtagaaatcataccatgctactttgtacatataagtattttattcctgctttcgtgttacttttaataaataactactgtactcaagaaaaaaaaaagaagaaaaacaaacagacaaaaaagggggg

SEQ ID NO: 392492 - DNA, 3924 bp, Homo sapiens
agggagtgtgtgtatttcctcccgttctttatcagagcccccaaaataagtaggaatgggcagtggctattcacattcactacaccttttccatttgctaataaggccctgccaggctgggagggaattgtccctgcctgcttctggagaaagaagatattgacaccatctacgggcaccatggaactgcttcaagtgaccattctttttcttctgcccagtatttgcagcagtaacagcacaggtgttttagaggcagctaataattcacttgttgttactacaacaaaaccatctataacaacaccaaacacagaatcattacagaaaaatgttgtcacaccaacaactggaacaactcctaaaggaacaatcaccaatgaattacttaaaatgtctctgatgtcaacagctacttttttaacaagtaaagatgaaggattgaaagccacaaccactgatgtcaggaagaatgactccatcatttcaaacgtaacagtaacaagtgttacacttccaaatgctgtttcaacattacaaagttccaaacccaagactgaaactcagagttcaattaaaacaacagaaataccaggtagtgttctacaaccagatgcatcaccttctaaaactggtacattaacctcaataccagttacaattccagaaaacacctcacagtctcaagtaataggcactgagggtggaaaaaatgcaagcacttcagcaaccagccggtcttattccagtattattttgccggtggttattgctttgattgtaataacactttcagtatttgttctggtgggtttgtaccgaatgtgctggaaggcagatccgggcacaccagaaaatggaaatgatcaacctcagtctgataaagagagcgtgaagcttcttaccgttaagacaatttctcatgagtctggtgagcactctgcacaaggaaaaaccaagaactgacagcttgaggaattctctccacacctaggcaataattacgcttaatcttcagcttctatgcaccaagcgtggaaaaggagaaagtcctgcagaatcaatcccgacttccatacctgctgctggactgtaccagacgtctgtcccagtaaagtgatgtccagctgacatgcaataatttgatggaatcaaaaagaaccccggggctctcctgttctctcacatttaaaaattccattactccatttacaggagcgttcctaggaaaaggaattttaggaggagaatttgtgagcagtgaatctgacagcccaggaggtgggctcgctgataggcatgactttccttaatgtttaaagttttccgggccaagaatttttatccatgaagactttcctacttttctcggtgttcttatattacctactgttagtatttattgtttaccactatgttaatgcagggaaaagttgcacgtgtattattaaatattaggtagaaatcataccatgctactttgtacatataagtattttattcctgctttcgtgttacttttaataaataactactgtactcaatactctaaaaatactataacatgactgtgaaaatggcaatgttattgtcttcctataattatgaatatttttggatggattattagaatacatgaactcactaatgaaaggcatttgtaataagtcagaaagggacataggattcacatatcagactgttagggggagagtaatttatcagttctttggtctttctatttgtcattcatactatgtgatgaagatgtaagtgcaagggcatttataacactatactgcattcattaagataataggatcatgatttttcattaactcatttgattgatattatctccatgcattttttatttcttttagaaatgtaattatttgctctagcaatcattgctaacctctagtttgtagaaaatcaacactttataaatacataattatgatattatttttcattgtatcactgttctaaaaataccatatgattatagctgccactccatcaggagcaaattcttctgttaaaagctaactgatcaaccttgaccacttttttgacatgtgagatcaaagtgtcaagttggctgaggttttttggaaagctttagaactaataagctgctggtggcagctttgtaacgtatgattatctaagctgattttgatgctaaattatcttagtgatctaaggggcagtttagtgaagatggaatcttgtatttaaaatagccttttaaaatttgttttgtggtgatgtattttgacaacttccatctttaggagttatataatcaccttgattttagtttcctgatgtttggactatttataatcaaggacaccaagcaagcataagcatatctatatttctgactggtgtctctttgagaaggatgggaagtagaaaaaaaaaaaagaaagaaaggaaaggaagagaggagagaagaaggcagggatctccactatgtatgttttcactttagaactgttgagcccatgcttaattttaatctagaagtctttaaatggtgagacagtgactggagcatgccaatcagagagcatttgtcttcagaaaaaaaaaaaatctgagtttgagactagcctggccaacatgttgaaaccccatatctactaaaaatacaaaaattagcctggtgtggtggcgcacgcctgtagtcccagctactctggagcctgaggaacgtgaatcgcttgaacccagaagacagaggttgcagtgagctgagatggcactattgcactccagcctgggtgacacagcaagactctgtctcaaaaaaaaaaaaaaaaaaaaaaggaaaaaaaagaaagaaagaaagtcccagcacacctagataatttaccgagctcttcagcaaaaaccatgttacatacagcatattccaaagaaatgaactcttctgcaatttaaattataagtaatatgttattttggatcctagagaaaccattttctctacatttcatgagcattgttagaaaagagtttacaagaattaggaagagggaacaattttaatggtcagaaaagaataaaatttattctagttcaagaagtgcacacaaagaatatgcattaatctaacaactatgagattaaatctttcaaaaaggtcaaaggaggattgagaagtttacagagatgtccacggcattttatatcaatctcaaaggtaaggtctgcatttttataaaccaacttaaacttctgttgagataggatattttgttttcaagccaaaattaccattaatcaaatatgttttaattatctgatttagatgatctactttttatgcctggcttactgtaagttttttattctgatacacagttcaaacatcattgcaacaaagaagtgcctgtatttagatcaaaggcaagactttctatgtgtttgttttgcataataatatgaatataatttaagtctatcaatagtcaaaacataaacaaaagctaattaactggcactgttgtcacctgagactaagtggatgttgttggctgacatacaggctcagccagcagagaaagaattctgaattccccttgctgaactgaactattctgttacatatggttgacaaatctgtgtgttatttcttttctacctaccatatttaaatttatgagtatcaaccgaggacatagtcaaaccttcgatgatgaacattcctgattttttgcctgattattctctgttgagctctacttgtggtcattcaagattttatgatgttgaaaggaaaagtgaatatgacctttaaaaattgtattttgggtgatgatagtctcaccactataaaactgtcaattattgcctaatgttaaagatatccatcattgtgattaattaaacctataatgagtattctta

SEQ ID NO: 392493 - DNA, 4124 bp, Homo sapiens
agggagtgtgtgtatttcctcccgttctttatcagagcccccaaaataagtaggaatgggcagtggctattcacattcactacaccttttccatttgctaataaggccctgccaggctgggagggaattgtccctgcctgcttctggagaaagaagatattgacaccatctacgggcaccatggaactgcttcaagtgaccattctttttcttctgcccagtatttgcagcagtaacagcacagttacataagagcaaaacatgtgtgtgcctagtcactatcacaccctgtcaaaagcagagagcagctggagctgaggtgttttagaggcagctaataattcacttgttgttactacaacaaaaccatctataacaacaccaaacacagaatcattacagaaaaatgttgtcacaccaacaactggaacaactcctaaaggaacaatcaccaatgaattacttaaaatgtctctgatgtcaacagctacttttttaacaagtaaagatgaaggattgaaagccacaaccactgatgtcaggaagaatgactccatcatttcaaacgtaacagtaacaagtgttacacttccaaatgctgtttcaacattacaaagttccaaacccaagactgaaactcagagttcaattaaaacaacagaaataccaggtagtgttctacaaccagatgcatcaccttctaaaactggtacattaacctcaataccagttacaattccagaaaacacctcacagtctcaagtaataggcactgagggtggaaaaaatgcaagcacttcagcaaccagccggtcttattccagtattattttgccggtggttattgctttgattgtaataacactttcagtatttgttctggtgggtttgtaccgaatgtgctggaaggcagatccgggcacaccagaaaatggaaatgatcaacctcagtctgataaagagagcgtgaagcttcttaccgttaagacaatttctcatgagtctggtgagcactctgcacaaggaaaaaccaagaactgacagcttgaggaattctctccacacctaggcaataattacgcttaatcttcagcttctatgcaccaagcgtggaaaaggagaaagtcctgcagaatcaatcccgacttccatacctgctgctggactgtaccagacgtctgtcccagtaaagtgatgtccagctgacatgcaataatttgatggaatcaaaaagaaccccggggctctcctgttctctcacatttaaaaattccattactccatttacaggagcgttcctaggaaaaggaattttaggaggagaatttgtgagcagtgaatctgacagcccaggaggtgggctcgctgataggcatgactttccttaatgtttaaagttttccgggccaagaatttttatccatgaagactttcctacttttctcggtgttcttatattacctactgttagtatttattgtttaccactatgttaatgcagggaaaagttgcacgtgtattattaaatattaggtagaaatcataccatgctactttgtacatataagtattttattcctgctttcgtgttacttttaataaataactactgtactcaatactctaaaaatactataacatgactgtgaaaatggcaatgttattgtcttcctataattatgaatatttttggatggattattagaatacatgaactcactaatgaaaggcatttgtaataagtcagaaagggacataggattcacatatcagactgttagggggagagtaatttatcagttctttggtctttctatttgtcattcatactatgtgatgaagatgtaagtgcaagggcatttataacactatactgcattcattaagataataggatcatgatttttcattaactcatttgattgatattatctccatgcattttttatttcttttagaaatgtaattatttgctctagcaatcattgctaacctctagtttgtagaaaatcaacactttataaatacataattatgatattatttttcattgtatcactgttctaaaaataccatatgattatagctgccactccatcaggagcaaattcttctgttaaaagctaactgatcaaccttgaccacttttttgacatgtgagatcaaagtgtcaagttggctgaggttttttggaaagctttagaactaataagctgctggtggcagctttgtaacgtatgattatctaagctgattttgatgctaaattatcttagtgatctaaggggcagtttagtgaagatggaatcttgtatttaaaatagccttttaaaatttgttttgtggtgatgtattttgacaacttccatctttaggagttatataatcaccttgattttagtttcctgatgtttggactatttataatcaaggacaccaagcaagcataagcatatctatatttctgactggtgtctctttgagaaggatgggaagtagaaaaaaaaaaaagaaagaaaggaaaggaagagaggagagaagaaggcagggatctccactatgtatgttttcactttagaactgttgagcccatgcttaattttaatctagaagtctttaaatggtgagacagtgactggagcatgccaatcagagagcatttgtcttcagaaaaaaaaaaaatctgagtttgagactagcctggccaacatgttgaaaccccatatctactaaaaatacaaaaattagcctggtgtggtggcgcacgcctgtagtcccagctactctggagcctgaggaacgtgaatcgcttgaacccagaagacagaggttgcagtgagctgagatggcactattgcactccagcctgggtgacacagcaagactctgtctcaaaaaaaaaaaaaaaaaaaaaaggaaaaaaaagaaagaaagaaagtcccagcacacctagataatttaccgagctcttcagcaaaaaccatgttacatacagcatattccaaagaaatgaactcttctgcaatttaaattataagtaatatgttattttggatcctagagaaaccattttctctacatttcatgagcattgttagaaaagagtttacaagaattaggaagagggaacaattttaatggtcagaaaagaataaaatttattctagttcaagaagtgcacacaaagaatatgcattaatctaacaactatgagattaaatctttcaaaaaggtcaaaggaggattgagaagtttacagagatgtccacggcattttatatcaatctcaaaggtaaggtctgcatttttataaaccaacttaaacttctgttgagataggatattttgttttcaagccaaaattaccattaatcaaatatgttttaattatctgatttagatgatctactttttatgcctggcttactgtaagttttttattctgatacacagttcaaacatcattgcaacaaagaagtgcctgtatttagatcaaaggcaagactttctatgtgtttgttttgcataataatatgaatataatttaagtctatcaatagtcaaaacataaacaaaagctaattaactggcactgttgtcacctgagactaagtggatgttgttggctgacatacaggctcagccagcagagaaagaattctgaattccccttgctgaactgaactattctgttacatatggttgacaaatctgtgtgttatttcttttctacctaccatatttaaatttatgagtatcaaccgaggacatagtcaaaccttcgatgatgaacattcctgattttttgcctgattattctctgttgagctctacttgtggtcattcaagattttatgatgttgaaaggaaaagtgaatatgacctttaaaaattgtattttgggtgatgatagtctcaccactataaaactgtcaattattgcctaatgttaaagatatccatcattgtgattaattaaacctataatgagtattcttaatggagaattcttaatggatggattatcccctgatcttttctttaaaatttctctgcacacacaggacttctcattttccaataaatgggtgtactctgccccaatttctagggaaaaaaaaatt

SEQ ID NO: 392494 - DNA, 3800 bp, Homo sapiens
agggagtgtgtgtatttcctcccgttctttatcagagcccccaaaataagtaggaatgggcagtggctattcacattcactacaccttttccatttgctaataaggccctgccaggctgggagggaattgtccctgcctgcttctggagaaagaagatattgacaccatctacgggcaccatggaactgcttcaagtgaccattctttttcttctgcccagtatttgcagcagtaacagcacaggtgttttagaggcagctaataattcacttgttgttactacaacaaaaccatctataacaacaccaaacacagaatcattacagaaaaatgttgtcacaccaacaactggaacaactcctaaaggaacaatcaccaatgaattacttaaaatgtctctgatgtcaacagctacttttttaacaagtaaagatgaaggattgaaagccacaaccactgatgtcaggaagaatgactccatcatttcaaacgtaacagtaacaagtgttacacttccaaatgctgtttcaacattacaaagttccaaacccaagactgaaactcagagttcaattaaaacaacagaaataccaggcacaccagaaaatggaaatgatcaacctcagtctgataaagagagcgtgaagcttcttaccgttaagacaatttctcatgagtctggtgagcactctgcacaaggaaaaaccaagaactgacagcttgaggaattctctccacacctaggcaataattacgcttaatcttcagcttctatgcaccaagcgtggaaaaggagaaagtcctgcagaatcaatcccgacttccatacctgctgctggactgtaccagacgtctgtcccagtaaagtgatgtccagctgacatgcaataatttgatggaatcaaaaagaaccccggggctctcctgttctctcacatttaaaaattccattactccatttacaggagcgttcctaggaaaaggaattttaggaggagaatttgtgagcagtgaatctgacagcccaggaggtgggctcgctgataggcatgactttccttaatgtttaaagttttccgggccaagaatttttatccatgaagactttcctacttttctcggtgttcttatattacctactgttagtatttattgtttaccactatgttaatgcagggaaaagttgcacgtgtattattaaatattaggtagaaatcataccatgctactttgtacatataagtattttattcctgctttcgtgttacttttaataaataactactgtactcaatactctaaaaatactataacatgactgtgaaaatggcaatgttattgtcttcctataattatgaatatttttggatggattattagaatacatgaactcactaatgaaaggcatttgtaataagtcagaaagggacataggattcacatatcagactgttagggggagagtaatttatcagttctttggtctttctatttgtcattcatactatgtgatgaagatgtaagtgcaagggcatttataacactatactgcattcattaagataataggatcatgatttttcattaactcatttgattgatattatctccatgcattttttatttcttttagaaatgtaattatttgctctagcaatcattgctaacctctagtttgtagaaaatcaacactttataaatacataattatgatattatttttcattgtatcactgttctaaaaataccatatgattatagctgccactccatcaggagcaaattcttctgttaaaagctaactgatcaaccttgaccacttttttgacatgtgagatcaaagtgtcaagttggctgaggttttttggaaagctttagaactaataagctgctggtggcagctttgtaacgtatgattatctaagctgattttgatgctaaattatcttagtgatctaaggggcagtttagtgaagatggaatcttgtatttaaaatagccttttaaaatttgttttgtggtgatgtattttgacaacttccatctttaggagttatataatcaccttgattttagtttcctgatgtttggactatttataatcaaggacaccaagcaagcataagcatatctatatttctgactggtgtctctttgagaaggatgggaagtagaaaaaaaaaaaagaaagaaaggaaaggaagagaggagagaagaaggcagggatctccactatgtatgttttcactttagaactgttgagcccatgcttaattttaatctagaagtctttaaatggtgagacagtgactggagcatgccaatcagagagcatttgtcttcagaaaaaaaaaaaatctgagtttgagactagcctggccaacatgttgaaaccccatatctactaaaaatacaaaaattagcctggtgtggtggcgcacgcctgtagtcccagctactctggagcctgaggaacgtgaatcgcttgaacccagaagacagaggttgcagtgagctgagatggcactattgcactccagcctgggtgacacagcaagactctgtctcaaaaaaaaaaaaaaaaaaaaaaggaaaaaaaagaaagaaagaaagtcccagcacacctagataatttaccgagctcttcagcaaaaaccatgttacatacagcatattccaaagaaatgaactcttctgcaatttaaattataagtaatatgttattttggatcctagagaaaccattttctctacatttcatgagcattgttagaaaagagtttacaagaattaggaagagggaacaattttaatggtcagaaaagaataaaatttattctagttcaagaagtgcacacaaagaatatgcattaatctaacaactatgagattaaatctttcaaaaaggtcaaaggaggattgagaagtttacagagatgtccacggcattttatatcaatctcaaaggtaaggtctgcatttttataaaccaacttaaacttctgttgagataggatattttgttttcaagccaaaattaccattaatcaaatatgttttaattatctgatttagatgatctactttttatgcctggcttactgtaagttttttattctgatacacagttcaaacatcattgcaacaaagaagtgcctgtatttagatcaaaggcaagactttctatgtgtttgttttgcataataatatgaatataatttaagtctatcaatagtcaaaacataaacaaaagctaattaactggcactgttgtcacctgagactaagtggatgttgttggctgacatacaggctcagccagcagagaaagaattctgaattccccttgctgaactgaactattctgttacatatggttgacaaatctgtgtgttatttcttttctacctaccatatttaaatttatgagtatcaaccgaggacatagtcaaaccttcgatgatgaacattcctgattttttgcctgattattctctgttgagctctacttgtggtcattcaagattttatgatgttgaaaggaaaagtgaatatgacctttaaaaattgtattttgggtgatgatagtctcaccactataaaactgtcaattattgcctaatgttaaagatatccatcattgtgattaattaaacctataatgagtattcttaatggagaattcttaatggatggattatcccctgatcttttctttaaaatttctctgcacacacaggacttctcattttccaataaatgggtgtactctgccccaatttctagggaaaaaaaaatt

SEQ ID NO: 392495 - DNA, 909 bp, Homo sapiens
agggagtgtgtgtatttcctcccgttctttatcagagcccccaaaataagtaggaatgggcagtggctattcacattcactacaccttttccatttgctaataaggccctgccaggctgggagggaattgtccctgcctgcttctggagaaagaagatattgacaccatctacgggcaccatggaactgcttcaagtgaccattctttttcttctgcccagtatttgcagcagtaacagcacaggtgttttagaggcagctaataattcacttgttgttactacaacaaaaccatctataacaacaccaaacacagaatcattacagaaaaatgttgtcacaccaacaactggaacaactcctaaaggaacaatcaccaatgaattacttaaaatgtctctgatgtcaacagctacttttttaacaagtaaagatgaaggattgaaagccacaaccactgatgtcaggaagaatgactccatcatttcaaacgtaacagtaacaagtgttacacttccaaatgctgtttcaacattacaaagttccaaacccaagaaggtagtgttctacaaccagatgcatcaccttctaaaactggtacattaacctcaataccagttacaattccagaaaacacctcacagtctcaagtaataggcactgagggtggaaaaaatgcaagcacttcagcaaccagccggtcttattccagtattattttgccggtggttattgctttgattgtaataacactttcagtatttgttctggtgggtttgtaccgaatgtgctggaaggcagatccgggcacaccagaaaatggaaatgatcaacctcagtctgataaagagagcgtgaagcttcttaccgttaagacaatttctcatgagtctggtaagtttccagaca

SEQ ID NO: 392496 - DNA, 523 bp, Homo sapiens
ccaccaacattgcacttatgtttttgtttaaaaaaaaaaaagtctatggctgcctgcacctgagtacagtgtgaaatcaagaaacggcacagtttttagaaacatctgcttactgattgagcttcattaactcctcatgtgagatcccagtcctgaaccacaggtgctgttgcttacagtgcgtaagaaaaataaatgagttcagcttccaggttagtgctgtgaggttacataaactaatcattaaacatgacagctaagatattttagctactgtttaactttaaaagatttgttaataaataatgctattgcacactggaggccttgaccctgtctctacctgagtcacaaacctttgtgtttgtatagaagttacactatttcctacatttgacttgaaatttagtcacattttcttctcattgtcaattatctactttctctctcattcattcagtcatcaataaacattgaaaatgatgaatgcaacttgagaccaaaagagttgggaaaaatcctt

SEQ ID NO: 392497 - DNA, 223 bp, Homo sapiens
caagactgatgtgtccaacagcagaaaaagctagtccagaagtttaagcacatggtccacttgactaaccaccacgtgggaccctcagggcccctggtccccaggcaatggcagggacaccaaggccaggtctaccctcaaatccttcccaatggcacgacagaccgctgggggaccaagacctacaatctaagaaaatcagattggagctggctagcctggt

SEQ ID NO: 392498 - DNA, 594 bp, Homo sapiens
ggaattggggctaggaaatgccggctgtgtggtgggattgaacaaagccgtggggtgtggttaagggacacgttgtaatcatatctgagtccaaatcaggctcttttactggtagccctgcgagcttggggatagtattcccgtgcctcagttccttcctttgtaaaattggggtaaaattacagccagtcacaggagtcagtgagacggtgcagggaaagggtttcccaggccctggcccgtaaacttcagtgcgttcgactttgaatcatgcgccacaagacagttgtttcttttaaatctgaaggacttctgtccagattccctgtgcacaatgtttttctgtttttattttgttgatgaaaatgtgtcttttcctaccattgctgtacaaattgcatatttcatgttttcatggctgacttcatggggattcgacagttcagtctcatgtcctgcaatttttaagatggtctttttctcctagaaattggagggtccacgtccccacgtccccacggcccccaagccgatggtccgcatttgcctggcaggagggcagaggggagagctgcatgtctgtggaaggagagt

SEQ ID NO: 392499 - DNA, 627 bp, Homo sapiens
tggtaccagatgcaggtaggatacagtagggagactcggctctaccttgtctggtatggttggctctgcattgaagctttcacatagtaaatcgtgagtaaacaggatgttatttgcacagagaaaggggtcaacggaagtagaactttgttagggatattaccataacagatcgcaaagtgagcttcctgaagtcttaagatcataaagcacactcacgtgtaaagaataaagtggaaattctcatttaatcaaaaaccctcctttggcacatctactcctgtgtagtgcacagattagggccctcaacatcatttaggagcttgttagaaaggcagaatctcagatcctaaccctgaactatcaagtaggaatgtatattttcacaagattccaggtaattcataagcacattcaagtttgggaagcactgaacactgcccggccagcacttagtttgatttattgttgataaaaataaccagcaaaacaaaaatgtattacctctgcacaagaagctgggaaaacatttccataatactctccctgtcagattagcttatctcaaacacagttctaatcatgacattcaaaaccttcaatgacttcacctatcaaaaaaaaaaa

SEQ ID NO: 392500 - DNA, 676 bp, Homo sapiens
ttactgaggaaagatcctcgttagtacttagtaccaccgttcatgaattaggacgttttccactttggctgttgataatcgacactattcccagccatgtgtgagtcatgggcactgttttctttattattttcaggtgggtttttccccaagttcgggtagttttgtcacttgcgtgcactgaccagtacttaactgaatacttgacggcgactcttcacatatctccagagttttctctacacgcagctctcttctctccagtattctgcctttttgacttctcttgacctggagctccatctcctcaattcaagagatcaatggtcttttacctaggtttcctctacctgctccaaggcctgaaacttttctccaggcaataagataggatgataggaaggtttacctcatttgtttcccatctttcagggaccgacctttgtccttcattgcctgaaacagtatgtcaagtaacactgtttcatctactttgtctggagtttagttgtttcagctggcagagtatgttcaggtagtagggtaaatctaggatgttattctatctttgtcagaagcagaaatccaaggcattcttaccactttactgtaattctatagtatatttttagtgtaatttagtataattcgataagctaagcaggatcatttgaaa

SEQ ID NO: 392501 - DNA, 439 bp, Homo sapiens
gggagttggtgaaataagagtgggaaaatgttgacacctccgtgagccgggtgacaagctgcttggtggttcactagacagggagttataaattggccgcttttcaacatcgacagataaaaatcaatagccttcccataatgccatcattaatcaattagagtctgtaatgggaaaagcagatgccactcccccacagtttctgggaataaacaaagtgtataaggcctaaaagaagaaagctatagaacttgactgaagcccacatctgtggaaaggcatactatgttcttggagtgggaacatcaacactatagagatggcagttcctctccagttaatctggaagtgcaagtatcgatgagtaaatccaattaaattccaacaagagcctggtctaaaatgtaacaggctgattttacagtatcgctggactccc

SEQ ID NO: 392502 - DNA, 305 bp, Homo sapiens
ttgtggaaatatgaatatagttagtacactagatgatagttgtatagaaatgttaaatttcttgagtgtggtgatttggttgtggttatgtaagagaatgcccttgttctcagcagatatatgctaaagtatttaaaggtaaaatgtcatgatgtcttcaaccaactccatatatatatgcttggagaaagtggccaacgttaaaactggtgaatctaagtgaagcgtctataggcattcatggtactgttcttacaactatcccaaaggcatttttttttttttcagatggagtcttactctgt

SEQ ID NO: 392503 - DNA, 202 bp, Homo sapiens
tctatgcatcatattgctttggcactggtgcgaggatcattttagtggatgtattgcatccacagaattgactgggtgtatgctaaaatatatgtgcaccaaaaatagatttttagcctcatttatcttggtgtgattattacacattgtgtgcctgtatcaaaatatgttgtgtaccccataaatataaacaatctagtag

SEQ ID NO: 392504 - DNA, 426 bp, Homo sapiens
tgcagaagtgaaacatgctttccaagagcagcaacaggcagggtcacccagcacccaggtggatacttgggccgccaaggcttctggaagccaggacaaatggaaagaatattggaacatggaaaggtctgaaaggtggcaatttgtccaaatctacagttgaatcagaagagaagcggtgggtcaggaagagggtgatttgagttctgtttcatcagactcatctctgtttctctttccatctctcaggcggagttagaacattccatttttttatccaaaattatcttttgctcggatttgggaactgacttaatacggagctgggaatggagacaccaaaaacagaaccagacaaagctgagggtttgttctcgcccctcctggacagcgtgagttgctcgctgctttcaggccctgtctgaa

SEQ ID NO: 392505 - DNA, 459 bp, Homo sapiens
tgagatagagtcttgctctgttgcccaggctggagtatagttatgagatctgagctcactacaacctccacctcctgggttcaagcaattcttgggtctcagcctcctgagcaaactgggattaaaggtgcctgccaccatgcccagctaatctttgtattttagtaaagacggggtttcaccacgttggcaaaggcagatcttgaactcctgacctcaaatgattggtctgcctcagcctgccaaagtgctgggattacaggcgtgagctactgcactgcccagcctttttgtctaatttcatcccagccctgatcagattattggctgattctgtgtatggaagtagataccattcctctgaacatgagtatacacagcaatgacaggtgtttggctgtgttaaaacttccaaaccttcaggcgtacgctgcctgaaacactcagtcattcatttcc

SEQ ID NO: 392506 - DNA, 274 bp, Homo sapiens
ggagacaagctacaacggtgtctggccaaacgtcacaatggattattgaatagctgcttcccgtgcactcagaaaggaagtcaatcactaggagcccccaggggctccaaggagaacaagcatgctttcctttttcaggagggccactggcctggaagaccagacagaaggctgcagaggctggtgccgctccacatccactcaggcccaagcctgacaccttggaggacacgctggagacacgtgggtgagtaacccacagctctttggagaa

SEQ ID NO: 392507 - DNA, 700 bp, Homo sapiens
ctccaatttcaataataactgtacatacacacttacactgaaaaagctgtgtaagttgaacaagcatgtcacaaatattgagttttagagatttaccttgatttgatcaaggatcttcgtcacaaatgtgagaggggttcaaagtgacattcacatttttcattcataacttaccagttataactttacatttatttgtgtgattgactaatgttgacctcatcctttagaatatatgaggactttattttatttcgtataccataccactatccagcacatagtcgatgctcaaataatacttaatgaaaaaatgaagtagactcttatcccagacttcctgaatctaaataactaggtattggacccaggcagtatatactgaaaagagaattacactgaaaataaaatagtgagcatcatcctgataaaggcagtaactacattcaagagaacaagagtaggtgggcatggtgcctcatgcctgtaatctcagcacttttggaagccgaggtgggtggatcacttgagttcagagttggagaccagcctggccaacatggtgaaacccgtctctactaaaaatacaaaaattagtcgggcgtggtggtgcacatctgcaatcccagctactcaggaggctgaggcacaagaatttacttgaatctgggaggcagagagttgcagtgagctgagatag

SEQ ID NO: 392508 - DNA, 299 bp, Homo sapiens
actttggctatagttactggcatatgaaactaccagacgcaaatagatcagaagctactagaattggggagaaactgcattgccaaagaaacatgagcctaaaacagtcagtgactgtcaaaacaaccccaggcctccaaacttccacaagcagaaagcaggctgtgggatcttgcagcccctaacccctaagaaagatgtactccctattttagtccattttctgttgcttataacagaataccaaaaactcagtaatttataaggaaaaggaatttacttcttacagttatagaagc

SEQ ID NO: 392509 - DNA, 313 bp, Homo sapiens
aatgttttgtctctggttatcgaagtagtcgtgtggtagaatacctccttggcagggtagtactgaatatagctcataatgctcctgaattgctgatatcacttgttggttggtactcatcttcttttcctcttacttcccttgccttccatcaaatttcttcaagttgcaaattccttcaacttgctgaggatgccccagcaggaatacttgaactggaggctactggtttagggttttagtctgtttcaggctccacccagttactttgagggcagaggggattaatgtctagcaggacacctgggagact

SEQ ID NO: 392510 - DNA, 213 bp, Homo sapiens
cttgagaatgctcccatcagttatggcaaggaccccaggctatgaacagcagtccaaatccaaattggcctctccagggttacctacgtagacagggcttgctttgtgatgtagagagaatccaggggcctgtggactttgaactgagacagtggttgatttccctcataggtcttctaatcactcagccccaagaccctcaagtcacaaaag

SEQ ID NO: 392511 - DNA, 236 bp, Homo sapiens
cattctgatactactgaatgaatgggttgggtgattcaagaaagggagagtaacaggaaggtcaggcaggtagaaagttgatatgatacttaaagcaaggaatgtgaaagcctaccttaaggtagtgttgctggagtggagaagagagaaaggagagatgctaaagtgattaaactgatgatacatggagaaaaaggtggggtcggttgggtagcggggtgaagagaagaaggtag

SEQ ID NO: 392512 - DNA, 404 bp, Homo sapiens
cctcaacactcttgatgaactgggtatattcctataaaagtagtacactacagtgataactttcaagctgggtttgttagtgatcataatggtggctacccatcctcattgattattactgatagaagaaagtaatcaactgtattgaacaatgaaatatagcagatgtaataaatatcgcttgagtgtactctatgataattacaaagttctgagcaggactgaccaagacaagggcagccccatggacatgcacagattgagtctgaatgggcaccacagaacattttcagtagggagctaaaggtaaagataaagtttagcatctaggtaagtcattatgtcaggaaacagtgagttagtggttatctctaagtggtgaatttttaagaaatttttactcc

SEQ ID NO: 392513 - DNA, 478 bp, Homo sapiens
ataggaaggctctggaggggacttaagtcagaggaattccattttctcaggataaagttctggctaattcttttcctctggaaagtaggcttttgttatggagaaggatctaggatcatttcagagtgataactctctctctctgctagagccacagtgagagattcgagatcttaactgtgagaactagtggctttctgagaaaacagtccagaaaagtatgggcttcccccaagattgcagctcagaagttttttattctcacactagtcctcatcagtctattgcattcatcaaagttagcatttaagtatttatattagcttctggctctagcagtttctgctccaggtaagcaggtcttggctgtgcctctttggactcatctgcctctccaaatttcagggttgcaggctgccttatgatgttagctatttgggatacaagataagtcattgattttcactttttccagcta

SEQ ID NO: 392514 - DNA, 566 bp, Homo sapiens
ttatgtagctgtcaagtcccagcccaaatgcccctttctccagtcttccccagctcccctacacagactgaagccccctcctctatttctttttttcttgagaccaagtctcgctctgtcacccaggctggagtgcggaggtacgatcttggctcactgcaaactccccctcccgagttcaagtgattctcctgcctcagcctcccgagtagctgggattacaggcacccaccactatgcttggctaattttttttttttttttgtatttttagtagatagagatggggtttcaccatgttggccagggtggtctcgaactcctgacctcaagtgatccacctgcctcagcctccaaaagtgctgggattacaggcgtgagccaccgtgcccggcctctagtgttatcttattgtgatcagagaagatagttgatatgattttaacttttttgaatttttatttatttattggttcgttcgtatgtttgtttgtaacagagtctcactctgttacccaggctggagtacatgtcatgatcttggatcacctgcaacctccgccttc

SEQ ID NO: 392515 - DNA, 404 bp, Homo sapiens
attggatttgctgatgaaggaaataggagaaatggagttgagatgaggaggggagtgataataaattcgtttattatgaatatatccaataggtattagataagtggttctaaaggacagaggtaaatttttgagagagactgggaaatcatcagtatgtaaatggtaattgaagtatttccgagtttctttccagcccttaaatcctgtggttcaatgaataacatagatttctctttgatgtacgcccatctcagaaagcctaccttcagcagtggcctgtgttaagtgatggttccccgctagcggggaacaatcactggttcccaagtgatggttaagtgattgttaagtgatggttaagtgatggttaagtgatggttaagtgatggtcccgctgggta

SEQ ID NO: 392516 - DNA, 328 bp, Homo sapiens
cctagaacctgtgaatgtgaccttatttggacaaaggatcttttcagatgtaattaagatcttaaggatcttgagatcctgtattacctgggtggaccccaaatccaatggcaaatgtccttatgacacttatgacagaagagaagacacagacacagaggagaaatcagtgtgaagaccaggcagagatcagaatgacatggcttcagactgaggatgctgtcgatcatcagaagctggaagaggcaaacaatggattctccctagatcttctagcgggagtgctgtggccctgtccacacgttcatctcagacttatggcctccag

SEQ ID NO: 392517 - DNA, 273 bp, Homo sapiens
cgggctctgagtgctcttgcccgtccggccccagccgcggcccgggaatctacgtcacccgaaaagcgactataaacgccggcgcctccgtccccagccgcggctcgggaatccacccgaagagtggctataaacgtccgcgcctccattgcgctctcctcttcacttaggacactggtcctcccacgcctgacaccgacgtcgccaggaccgcggggttgggggaacttggctgtcccacgtctttcaaataaagctgttttgtctaactca

SEQ ID NO: 392518 - DNA, 816 bp, Homo sapiens
cgggctctgagtgctcttgcccgtccggccccagccgcggcccgggaatctacgtcacccgaaaagcgactataaacgccggcgcctccgtccccagccgcggctcgggaatccacccgaagagtggctataaacgtccgcgcctccattgcgctctcctcttcacttaggacactggtcctcccacgcctgacaccgacgtcgccaggaccgcggggttgggggaacttggctgtcccacgtctttcaaataaagctgttttgtctaactcaaaaaaaaaaaaaaaaaaaaaaaacgtgtgttgcggccgcgcgcccgggcccccgcggaaaggcttttcagaaacccagtcgcggtgggggcgcgcgggggccccaagaagaggcaagagggaaccagtggggccacaaagggtggttccccagaggagagaaccagcgggccaagagaacaaagaggggtgggattttcctaaccaaattaaaaacggcccgggggggaaaccacgagaggcgttctcggacacaaaaatctccgagaaagggggagatctcgagagagggacacaaacaagggggggacatctatactcaacagaggggggcgtctcccaaagagagggagcgctccgggaatatctcaaaaatatatagcggcccggggaacaacgggggggggggataacagaagcaagaagcgaaagaaaaacaaggaagaccaaaaagcagaagaaagaagggaagacgaacaaacaaaaaaaagacaacaacagacagacaacagagaaacgcacacgcaaaggaaagggaggaaca

SEQ ID NO: 392519 - DNA, 549 bp, Homo sapiens
cgggctctgagtgctcttgcccgtccggccccagccgcggcccgggaatctacgtcacccgaaaagcgactataaacgccggcgcctccgtccccagccgcggctcgggaatccacccgaagagtggctataaacgtccgcgcctccattgcgctctcctcttcacttaggtaggtcctgccgcgttgaccactggcgtctcgctggtggtcttcgagaccggcgttggttgaaaatcgcccccggctttggccgtggccgcgggtgagattcggcgcccagagcccccgggggcctcagctcaccgcgcgctgccccatgtgcggcggtgaaacccaggccccgacaggcgctgccgcctcccccccgggtgcggtcgctcgcgaggtctggcccctgactcctgaccccgactgcagacccctaaccttgttctttctccgcaggacactggtcctcccacgcctgacaccgacgtcgccaggaccgcggggttgggggaacttggctgtcccacgtctttcaaataaagctgttttgtctaactca

SEQ ID NO: 392520 - DNA, 267 bp, Homo sapiens
gcagcaatcaatttatatgtggagacacatacacagatacatacacacacgcgtacacatacacagtaatatggaaacacccaggacacacacttactatgagttggggggagaagtgagaataggttttgcaaaggagttgaaattttggctgaggaggtttccaggtgggcaagtgaggggtggaacattacagccacaaagatctaaagaggcgaggaaagaagggaacatggataatggctgagattgggtgagattaaagtg

SEQ ID NO: 392521 - DNA, 323 bp, Homo sapiens
ggccttctcttagggaatgtggggtgggaggtgagtaacctgctgaggggagtgtggggaccttcccaggccccctggaaggacccaaaatacacaaaaaggggttcagagtgggagggaggctatctgtggggtagaaggaacgtgggctttggagtatgcaggtccgggttcgaattggagttcagccaatgaagtaacttcacctcattagtaacaatgatagcaacaatcatagttttcatttacagggtattactatgcaataggcattgacctaagagttacccatattaactccatttaatccccacagcaatctt

SEQ ID NO: 392522 - DNA, 683 bp, Homo sapiens
aagataggagccctatctttcttgataattatattccaaaggcttggctcccagatccctgagaaagacatttcttagttataaaactgacaagaggttaggaaaagactcacatttcacagggacagggaaatcatttacacttgcaagttttctgaagtaagtgatttaagaaaaggaaagcaaggagcctacagtaaaaaagaaacttgtcgaaagtttattctagctgagaagaacattaaagccatcttgctgattactagcaatggtaattcaaattttttaggtaacatgaaacagtctcatatttaacctggttaagttagatgaagaattattttgatagttggtgtgaagctgtagaaagttctgcctgtggctctctagtggaccacatgtcagggaatgctttctaatttttaggttggtgaaaaagcaatcacagtttttgccataaagtaatggagtttttcactgccatgaagtaatggcaaaaagtgcgattactttttcatcagccaaatattaattctgtgtacccttttcccacaaaatacgtattaatacttagccatgtatttggtgtcagggaaagttgctaccaaaggcaaacagtttttttcccccaccttattattttgacataatgtaatcgttcttatgaatagaattattgggtc

SEQ ID NO: 392523 - DNA, 306 bp, Homo sapiens
atatggtgtagtattcacagcgttgcctcaggggcaaagaggttcactgctgtgctcagcttgctggctgtgatcttgggcaagttacttctgtaagccttggttttcttatcaactctttcaactagtttcttaattattactagggataataacagtaatcaacctcatagattccaagtgaggatgcctgttaatcactcaccacaattgtataaatggctcaatgttcaaaacttgtttatctcttttggaaccgccacttcggtcaaactggtcttcccactgttccttaaatattcggga

SEQ ID NO: 392524 - DNA, 900 bp, Homo sapiens
tgtggtttctaatgattctttgtatttctttcatatttattgtggcatttcctgttgtgtttctatttacattttctcacttttattcttattagtctaggtagtagtttattggtttggtttatctttccaaaaaaatcttttttccttgatttttgtacttttttgttctcagttttgtttctgccctgatctttattatttatttcattttactaatcttgagtttggtttgtttttgttttcctagttccttgagatgcagcattgacttttttatatgaagtctttctagttttttgaggtaggcatctattgctataaaattggctcttcaatactgcttttgctctgacccatagtttttggcatgttgtattacatttatttcaaggaattattaacttccattcttagtttttactttcaaccattggtcacttaggagcatgttgtttaacttccatgaatagtatttgtatagttttgaatgtttctcttggtatttttagttttattccattgtggtcagataaaatacttgattttttaaaaatttttgaggcttgttttatatctgagcatatgatcaatgctggagaatgtttcatgtgctgatgaaaaacaaatgtgtattctgcagctggtggggaaaatgctctgtaaatgtctgttagttctgttctctggtgcagtttaaggctgatttttgttgttgttgttgttgatttactgtctagatgatttgtccaatgctgaaagtgtgagctcaaaaaataaataattggctgtgtgcaggggctcacgcctgtaatcccaacactttgggaggccgaggcgagcagatcacagggtcaggagtttgagaccagcctggacaacatagagaaactccttctc

SEQ ID NO: 392525 - DNA, 238 bp, Homo sapiens
aacagtcccagctactagggaagctgaggcaggagggtcactggaactcaggaggtcgagcctgcagtaagctataatggcgacactgcacttcagcctgggtcacaaagcaagaccctgtttcaaaaaaaatttttttttaatttagccttcccataaatacatacacctaatatgtgcccattaaaaaattaaaaatttaggccaggtacagtggctcatacctgtaatgctagcc

SEQ ID NO: 392526 - DNA, 710 bp, Homo sapiens
aaaatggtgaaagtagtggtcccaagtaccccattaatttgtaagaccatgccagaggcacagtattaatacatcatgtttcttgttctgatgctacattttgaaagcactaacttgtgtggtaaaaggtaggttctaggttctgaggcagagtatgtttagtttactatcagagcctttctttaaagacttgactaaatttagttatcttgaatacatttttgcagtgtctcagtgtgggtagaaaataaaaaccccaatgctttggcatccattgtataccttacttcctctctatggatgacatgtacagtgtacatacatactgtgtactgtgtacaaacatactgtgtactgtgtacaattcttgggagaattgagaaaaagtcaagtcactttcaataaaagagttgtattctcttacagacccccattgagaaaggctggtaggagccaggctatgcactgaattcaggccatggatttctgtcacccaggctgactgcagtggcatgatcatggcttactgcagccttgaccttccgggctcaagcaattctcccacctcagcctcctgagtagctgggactacaggtgcatgccacttgcctggctttttaaaatttttttgtagagttgggggtctcactgtgttgcccaggctggtctcaaactcctggcctcaagcagtccacctggcttggccccaa

SEQ ID NO: 392527 - DNA, 168 bp, Homo sapiens
aaatatagtggatatgtgccaattaggaaacagaactccatccactccatgtgttttttgcaaccgagaaagagagagatcactgtgtactgatgtcataaagaagaggttcatgggggaagcagagcatgaaccaggcaaagaaagatggagagaggatagttactg

SEQ ID NO: 392528 - DNA, 331 bp, Homo sapiens
gtgattagaggatcccaggcgcggtctgaactgcaaggcaggtgtggggaatccagcctggaagtgactgcagcctagctgagagagccgtggtggccaggaccagtgaggcagcagcgtggatggagagagaggagggatgcagagatgtttaggacatgagctggccggtgatggatagcatggggtaggctggtggtggtgagggggtccagggtccagctgccactaggagggtgggtaggtttggggacaaccccttgtctttctgatccttgttcaggtgagatccccctgcacaaatttcacctgctttttttttttcctgagc

SEQ ID NO: 392529 - DNA, 427 bp, Homo sapiens
tgtcttagtgttatccaaataagtttagggaggataagcagtgctttgtgggaaggataaacactgtatagcaggaagtagcaactccaaaatgaaagaattgatgagcagcataccgatttttaatctgagctcagagtttaaagaaaaaatgggaagttaaaagtggtgccaaaataactgaggtattttattgttaataaaaggaaggcgatgccatttaaaaacgttataagtcagatttacaaacactttatagttgcatactctaatggcagggagtaactggcgattctagacaaaaagacaaagtcttacaagggtaaggagagataagagtttgtatacaggaaagagaagtaaatctatttaaaacatgtctagcaaagaagagaatttaagtggagagaacaaaaattggaggtgt

SEQ ID NO: 392530 - DNA, 671 bp, Homo sapiens
cttaatagtcgaaataattaattaaaactatatgaagaattttaagatttattccaaatacttttttcctttctcagttattttgacagtttcttgtgatgtataaacagatattttgcatagcaaaagactttgatatctaatattgttcttcatggactggaattatttaattagcctgaatgcagtctaacttaagtaggctttttatatagttattataatggctatatttgaaaagtatgctttggcatagtagaaactgccagatgcaatgccatttgatctaaaaaggtcacgggaaaagggacatttaaattaagttataaattacaattgaagaacaatattttgatgtgtgagaccagagatgtcagagcagggagatgtaattcatgggttcattatagaacagaggtgcctgacagctgagccatgccaaaaggaaaatttatttgcaacatcacgcagacagaaaatggtagctaagatgagaagccagaatagaaacttgaaaccttgtggtaatacgcagagtttatgctaataagactgcctgagatccagagatgtttaatgactgctgtaatattaatgaggtgcttggacatgtgcacattttcaatcttataaaaattaaggcctcatccttgctctataaaataacatgc

SEQ ID NO: 392531 - DNA, 476 bp, Homo sapiens
gggcacttactctatgggtgtccactgaggccaggtgctgtgccaggttctgaggatacatacggaggtagcagcaggacagactgtttctctctcaagggccttctgctctggaagaggaaggcagacagtacataaggtaaacagtataacaagttcccagcaagatgatactgcactgtgtttagtaggaagaagaaactgatcagggtaatgagatgggggtgcaggcggaaggggttacttcacttgacgtgggaggaggagacatttgaagtctgagggaagcgagttccagggagaaagatcagcaaagacaacctcaccgaagctaaacaagtttggcccgctctgaggaaggagggtcggcaaagctgggactcctttaacaggaggagaggagggagaaatgtgttaggattttaggcaggaaacaaaccttgcagggcctcatggccatagtggagagccgtctc

SEQ ID NO: 392532 - DNA, 273 bp, Homo sapiens
acatatgtaactaacctgcacgttgtgcacacgtgccctaaaatttaaagtataataaaaacaaaaatgaaaagaataaaaatatgcatgaattaaatatcaatgctatcaaaacagttgcaaaataaatgagagacaaaaataaaaaaattaaaaaattaaaaattaatgggttataagacaatattcacaagccttatggcaacctcaaaccaaaatgcaaacaatggatacacacaacattaacagcaagaaaccaaattatatcacgtg

SEQ ID NO: 392533 - DNA, 720 bp, Homo sapiens
gtctatctccttccaggctctgtgaagctggtgaccccggaggggtccccagtccggggacttcgcacacctgagatccccatgaccgaagcggtggaggccgtggtatggttggaggtcagcttcaggccttctggaagcatggagtgcaggtgtgggctctaggctcggatcagcatgcgtacgaggagcatgagagacctttacccctctacattaccagtcgtgctgtggatcgccccaaggttcgagagtgattctcatgcttcgagcctcccaggtagcatgggtttacggggcctgtagtggtggagacactgccctagtggaagtgatcctacgtgtttcccagctagaccttctacatccaggaatgagtccctaggggggtgtcaggaaggctagtccttggacctcgcctccccccatagacacactatggtggtcatggcatgtcctcatctcccaataaacatgactttagtcctctgcatgtaaacatttgattaccctaaaattgttctgacaattgggccagatgtactaagcgaggggcagaaagtgggggatcgaaaagattgaaacaagagtttgaaagagtcgaagaaaggttgtctccaaccagccttgtgttgatggaccgtgaggggatcagtagggcgtgcctgcaagacgggggaatttaacaaaagtgtggacatgaaaggagtcctcatgtga

SEQ ID NO: 392534 - DNA, 627 bp, Homo sapiens
tctcaggttccagttccctgtgtctgagatgcaacagtcaggacggcttcgttggggcctggggtttccccttttccctgatgggccatgggcacagaggagaggattctggtccagaagacaacactttccccaacccaggaattggcacctttctggggcaaggctgccaatgtccaagaggggacatgggaacagagaagcagggagaaaggagggagccgctcggggcggatccggcacccccactcatctttcccacagcctcaccgggtggctccagctgttttccactaggaggtgaggagagagatgtgaggaaatcgtcatcgaggctgcacccgagagcaccaacacttatttaggcaccagtctgaggagaggcctaccccatctcctgggagagaggaccggtttctccctcctctccacctccaaatccctgcccctcctattgcttaatgcctctctatctcctcctatcccctccggactattttgtgtggtgtgggtttttctcgtggggccacacctttctagagtggtggttgatttggggatgcgtctccaccccactggctgttacgagaggaacagaagcctcctgggagtggggataggggggcc

SEQ ID NO: 392535 - DNA, 623 bp, Homo sapiens
gctttgaacaatggagattgaaaggcctcagaaataagctcagaaccaaggcctctctccaacttgcttccttgccctctttcccttctgaagcatgggggtgggctctctctgaaggtccctcatctgacctagggaagttcctctggaaggaatgcatttgtcttagactcccctccctaggatttatattaatcacagaaaattaactcttaacataggagagaaaactcaaagtctccatgcccaggacagacttcacctattctttcaactaaagggctgttacctgagagacttaatctgcataattagacaacctttgttcacagtgcacttccacccctcaccttcccataacttgtcactacctcccccagggcccataggaacttagtcccagtccattgtctgctcttgagtccactcatctcctcattgaggggtccctctccacacagactgatggggctcagagaggcggcccctgcagtccccatgggacagctctgacccggccctctcaggcatgctgtgctccttcccatgcaattggcctcaattttcacttttgtttctgagtggtgatggggggaactgaaatactcaaatgcttgtaaata

SEQ ID NO: 392536 - DNA, 284 bp, Homo sapiens
ctgtaatctctgcactttgggaggccaaggtgggaagatcactggagctcaggagttcgagaccagccttggctacatagggagacatcatctctacaaattaaaataataaaataaaattagcaaggcatagtggcgggcacatgtagtcccagctacttgggaggctgaggttacatttttcaatgtaatcttctaagtcactgtttattccacacggtaagatagctcatcaatttagtttttttgaccaacattaacaagaaacagtatcatcacaagat

SEQ ID NO: 392537 - DNA, 481 bp, Homo sapiens
gtaaaaactcgtgggatgagcaaatgactctgaaacggtcccatgcgggaaatgtccatgaagtcctggattttatctaaaaagcccaggcaggggtggggcgggggcggcggggctacagttccacgctgagctgcctcctggccgctcgtccccgccgcagtgcctgggcggcccgggcgcccgaccttggccgtggacaccttcgcggtgcgtgctgctcctccccatctgccactggaagatgctggggcgacccggctccaggtttagcaggacactgagaaaagggaatggctgcctttcggaggctgggtgagcccttctctgtgcctcacctgcccgccccacagcggccctgcacctcgtcccacggggcccattgccccggtaggatgcgcgcttttgttttgagggtcaggcatcttccctgccgtcgtttctgggaggttgaaaaattgatccagaaagacctaaaaca

SEQ ID NO: 392538 - DNA, 401 bp, Homo sapiens
ccccaggggcctcatcctctccacctgagaaggtgtgtaaggtgtttatcagcctccctgccccagggcagaacccacaagggcgcagaccctaaacacaagggcgctgagtgtgtgggggaggactgtatgttaaagatgccgagcaaactcaaccctcagccaacaaaagttatagagcaacatccaagaaggttcaggccagcctggcgcgggtgacaggcgggtcgccattcccagctgctccagtaaacctgatctcccaccacagggcaggggcaccccaaggtcacctgggagctttcgccagaggggacacactggtcccgctccttggccacggggaccaggccccggaagcacccccagggggcagcggccatgctgcccacccatcctca

SEQ ID NO: 392539 - DNA, 1348 bp, Homo sapiens
taaaaagcaaaagaattcgcggccgcgtcgacacgggcttccccgaaaaccttccccgcttctggatatgaaattcaagctgcttgctgagtcctattgccggctgctgggagccaggagagccctgaggagtagtcactcagtagcagctgacgcgtgggtccaccatgaactggagtatctttgagggactcctgagtggggtcaacaagtactccacagcctttgggcgcatctggctgtctctggtcttcatcttccgcgtgctggtgtacctggtgacggccgagcgtgtgtggagtgatgaccacaaggacttcgactgcaatactcgccagcccggctgctccaacgtctgctttgatgagttcttccctgtgtcccatgtgcgcctctgggccctgcagcttatcctggtgacatgcccctcactgctcgtggtcatgcacgtggcctaccgggaggttcaggagaagaggcaccgagaagcccatggggagaacagtgggcgcctctacctgaaccccggcaagaagcggggtgggctctggtggacatatgtctgcagcctagtgttcaaggcgagcgtggacatcgcctttctctatgtgttccactcattctaccccaaatatatcctccctcctgtggtcaagtgccacgcagatccatgtcccaatatagtggactgcttcatctccaagccctcagagaagaacattttcaccctcttcatggtggccacagctgccatctgcatcctgctcaacctcgtggagctcatctacctggtgagcaagagatgccacgagtgcctggcagcaaggaaagctcaagccatgtgcacaggtcatcacccccacggtaccacctcttcctgcaaacaagacgacctcctttcgggtgacctcatctttctgggctcagacagtcatcctcctctcttaccagaccgcccccgagaccatgtgaagaaaaccatcttgtgaggggctgcctggactggtctggcaggttgggcctggatggggaggctctagcatctctcataggtgcaacctgagagtgggggagctaagccatgaggtaggggcaggcaagagagaggattcagacgctctgggagccagttcctagtcctcaactccagccacctgccccagctcgacggcactgggccagttccccctctgctctgcagctcggtttccttttctagaatggaaatagtgagggccaatgcccagggttggagggaggagggcgttcatagaagaacacacatgcgggcaccttcatcgtgtgtggcccactgtcagaacttaataaaagtcaactcatttgctgg

SEQ ID NO: 392540 - DNA, 1702 bp, Homo sapiens
taaaaagcaaaagaattcgcggccgcgtcgacacgggcttccccgaaaaccttccccgcttctggatatgaaattcaagctgcttgctgagtcctattgccggctgctgggagccaggagagccctgaggagtagtcactcagtagcagctgacgcgtgggtccaccatgaactggagtatctttgagggactcctgagtggggtcaacaagtactccacagcctttgggcgcatctggctgtctctggtcttcatcttccgcgtgctggtgtacctggtgacggccgagcgtgtgtggagtgatgaccacaaggacttcgactgcaatactcgccagcccggctgctccaacgtctgctttgatgagttcttccctgtgtcccatgtgcgcctctgggccctgcagcttatcctggtgacatgcccctcactgctcgtggtcatgcacgtggcctaccgggaggttcaggagaagaggcaccgagaagcccatggggagaacagtgggcgcctctacctgaaccccggcaagaagcggggtgggctctggtggacatatgtctgcagcctagtgttcaaggcgagcgtggacatcgcctttctctatgtgttccactcattctaccccaaatatatcctccctcctgtggtcaagtgccacgcagatccatgtcccaatatagtggactgcttcatctccaagccctcagagaagaacattttcaccctcttcatggtggccacagctgccatctgcatcctgctcaacctcgtggagctcatctacctggtgagcaagagatgccacgagtgcctggcagcaaggaaagctcaagccatgtgcacaggtcatcacccccacggtaccacctcttcctgcaaacaagacgacctcctttcgggtgacctcatctttctgggctcagacagtcatcctcctctcttaccagaccgcccccgagaccatgtgaagaaaaccatcttgtgaggggctgcctggactggtctggcaggttgggcctggatggggaggctctagcatctctcataggtgcaacctgagagtgggggagctaagccatgaggtaggggcaggcaagagagaggattcagacgctctgggagccagttcctagtcctcaactccagccacctgccccagctcgacggcactgggccagttccccctctgctctgcagctcggtttccttttctagaatggaaatagtgagggccaatgcccagggttggagggaggagggcgttcatagaagaacacacatgcgggcaccttcatcgtgtgtggcccactgtcagaacttaataaaagtcaactcatttgctgggccaaaaaaaaaaaaaaaaaaacaaaaaaaaaaattgtgttgggggcgccgctgcggcccccggagaagaggcttttagaagacactgttgttggggcgcgggggcggccccccgacgagactgataaaggtagaacccggtggccccacagggccgggtcccgagaaggaaaaacgccggggacacggagaaaggtggtgtgggatatttcccccccaattaaaaagcggcccgggggggagacagggggggcgcttctgaacgaaaaccgaggaggggagctgcgaagggcacacaagggggacctcactccaacgggggagccagggaagggcggaaaacaaatagagcgc

SEQ ID NO: 392541 - DNA, 1339 bp, Homo sapiens
ctctgtcctggaaacaggcttcaacgggcttccccgaaaaccttccccgcttctggatatgaaattcaagctgcttgctgagtcctattgccggctgctgggagccaggagagccctgaggagtagtcactcagtagcagctgacgcgtgggtccaccatgaactggagtatctttgagggactcctgagtggggtcaacaagtactccacagcctttgggcgcatctggctgtctctggtcttcatcttccgcgtgctggtgtacctggtgacggccgagcgtgtgtggagtgatgaccacaaggacttcgactgcaatactcgccagcccggctgctccaacgtctgctttgatgagttcttccctgtgtcccatgtgcgcctctgggccctgcagcttatcctggtgacatgcccctcactgctcgtggtcatgcacgtggcctaccgggaggttcaggagaagaggcaccgagaagcccatggggagaacagtgggcgcctctacctgaaccccggcaagaagcggggtgggctctggtggacatatgtctgcagcctagtgttcaaggcgagcgtggacatcgcctttctctatgtgttccactcattctaccccaaatatatcctccctcctgtggtcaagtgccacgcagatccatgtcccaatatagtggactgcttcatctccaagccctcagagaagaacattttcaccctcttcatggtggccacagctgccatctgcatcctgctcaacctcgtggagctcatctacctggtgagcaagagatgccacgagtgcctggcagcaaggaaagctcaagccatgtgcacaggtcatcacccccacggtaccacctcttcctgcaaacaagacgacctcctttcgggtgacctcatctttctgggctcagacagtcatcctcctctcttaccagaccgcccccgagaccatgtgaagaaaaccatcttgtgaggggctgcctggactggtctggcaggttgggcctggatggggaggctctagcatctctcataggtgcaacctgagagtgggggagctaagccatgaggtaggggcaggcaagagagaggattcagacgctctgggagccagttcctagtcctcaactccagccacctgccccagctcgacggcactgggccagttccccctctgctctgcagctcggtttccttttctagaatggaaatagtgagggccaatgcccagggttggagggaggagggcgttcatagaagaacacacatgcgggcaccttcatcgtgtgtggcccactgtcagaacttaataaaagtcaactcatttgctgg

SEQ ID NO: 392542 - DNA, 886 bp, Homo sapiens
ctactctaaaatttatttactgaatattccatgagtgtccaggaagtaactgagacttgtgtatttaatttggaaatgagacttctgagacaatcagatgcagacgaaaaattatttgcttcactattatttacttacctgagtgaatggtccttaatgttgtaaatatttcatttgctaactagctttcaaggtggcagaaaaggtgttttacttgaagaatttgaggagagggaagacttactgatttgcattatcagtcagtccccaattaccttggcataatcagtcccattatttagtgttactcatttttaaccagaactgtctgggtgtatcagagcacaattgggaagatgggctcttaatgtagttcagcctcctttaggggcctaatgaaggaagacttataaatacttctcaattatccttcagatgaattagcagcagttagcccttgttccagcgcagtcgattcttcaccagttgacttttccattcttcttgggaagcgcggcttaaaaagaaagtgctggaggtgagatgtgcgaattaggtctttccttgcaagtcatagatgctcggcaaagtaagtgtgcccggaactctgtccctacctctgcaggctccacacacgtttggagaccccacccccagcttgtggaacctattgcagtatatcatgtcccatgttgaacacaatcgtatataaggataaggacacaagagtggtggctgcctaactgatatggtggtatgttctgtagcagttgaaaaagcattgaaaaagcaattttgaaacgttctatttcggagccagtaaattttgtcttcatctcatttctgaggggcctgaagagttaaagggccctgggtgctccacctg

SEQ ID NO: 392543 - DNA, 241 bp, Homo sapiens
cctgtcttgggggactcggagagtaggagctgggaaggggagaggggctccccggacagagtcgtctcatagggaacagcacctccagccaggctcggcactacaccaccccaacctggccttggcagggaccctggtgctgagccctgcttgtcctgaggcctcattctgccctgtcgctgctggcaacgcccatgtctggggtgttgtgaagaccccaaagccccttgtccagagcctt

SEQ ID NO: 392544 - DNA, 646 bp, Homo sapiens
gaactaatcaggtacacctaagagcttcctggatatttccaccaggttgtcacaaggaatctcaaacgtaagaagtcaggaaagatctcataatctccccttattttattttattgggtaattgtcaccaccatccatttatttggtcaaaagaagtgttgaaaacatcccgacttgtacctatttcttagatctttaccctgccttctccttctgactcctgtccttcactaacagtatctaatcagtaaccaagactcattcattgtatttccttatgtttgtttcctgctctcagctcttgcagccctacctttggtcctcaattttctcttgcttgaattattccaatagccacaatgtaaaaatcacccagtgctggtcttgctcttctccaaaccattttcacagtgcgaccaaacctatctcactaatctcttacctctcacatcaaaatccttcattttccacagcacaaagtaaacactcaataactacagataactaaacacatttgcattgccatgtgaagtctcctgaatctggtcctggtttgtgtttgtccctatttgtcagcacacgtctctggaatgacagagtcgtagctactaggaagagagtaaggttacgggaacatggcgaaacg

SEQ ID NO: 392545 - DNA, 346 bp, Homo sapiens
ggctggtctcaaactgctggtctcacacagtcctctcacttcaggctcccaaagtgctgggattacaggcgtgagccatggtttcagctgaaggttgcacttttgatctgttctgttggtgtgtttcccagcatgcattcattttctaggggtgactactgtttgtagtatcttttttctcaggatagcattgtatgggatttgatctcagggctgttctgttgctcatttttatgtgaaattagttttcctagtctttcagaaggaggatggttcggggcagcttttcgacttcatggtgctccctcttggctgtgtgtgtgtgtgtgtgtgtgtgtgtgtgcag

SEQ ID NO: 392546 - DNA, 362 bp, Homo sapiens
tggcccagccctggatcaggacttttcaggtcccaggcagggctggcagtcccctcccattaagaatcttcaagtccgggcatggttgctcaggcctttaatcccagcactttgggaggctgaggtgggtggatcacctaaggtcaggagtttgagaccagcctggccaacatggtaaaaccccgtctctactaaaaatacaaaaataataataataataattagctgggcatggtggcaggcgcctgtaatcccagctactcaggaggctgaggtgggaaaattgaaccaaggaggcagaggttgcagtgagccaagtttgcaccactgcactctagcctgggcaacagagcaagactgtc

SEQ ID NO: 392547 - DNA, 370 bp, Homo sapiens
ccagtcgcttgttgggagagcaaggtgggtacagagggtaatggaagataacaagggaagaacaggcccacctggactgagaagtgctttcgaatacttgcttaagttctatggcaggcaagaggagccaatgataattgagcaggggcaagatgctttgctttaggaagcttgagcagaccacaatgcacagaatgagatgggatcatatactcaaatgccttcaggagctaggcagagaaaataaatgtgtaattgaggtcacataaaacaaagaagagtactgggctaagaaatggagtgtgcaagtcctgaccacaggcgctaaaaattaaattcctgaaaaatgtcttggccaacaagcgcctgg

SEQ ID NO: 392548 - DNA, 386 bp, Homo sapiens
gacatgaggacagggatcataggccaagagtcctatacaggctgaaaccacagtcatggtaggtaagcaagtagcaatgaactgtggccaaggcaccaaagcatagcaacaggaaagaatggtacaaaaaaacagatgagagaggtaggaaaaggacccagagtgatgagccagacccaaggtggagaagactattcatgacaataactgctatggagaagtcaggtaagaggaagtcacaagatgggccaccgggcagtcaggtaagaggaagtcacacaagatgggccactgggcatgagtaggtggccagggacctctaggagagccagctggagtgagagtgggctgggctgaaacgctccactgttgttgagctggcaagg

SEQ ID NO: 392549 - DNA, 890 bp, Homo sapiens
  misc_feature (790)..(790): n is a, c, g, or t
  misc_feature (807)..(807): n is a, c, g, or t
aagcagtggtatcaacgcagagtgcccattacggccgggggaagttactgcagccgcggtgttgtgctgtggggaagggagaaggatttgtaaaccccggagcgaggttctgcttacccgaggccgctgctgtgcggagacccccgggtgaagccaccgtcatcatgtctgaccaggaggcaaaaccttcaactgaggacttgggggataagaaggaaggtgaatatattaaactcaaagtcattggacaggatagcagtgagattcacttcaaagtgaaaatgacaacacatctcaagaaactcaaagaatcatactgtcaaagacagggtgttccaatgaattcactcaggtttctctttgagggtcagagaattgctgataatcatactccaaaagaactgggaatggaggaagaagatgtgattgaagtttatcaggaacaaacggggggtcattcaacagtttagatattctttttattttttttcttttccctcaatccttttttatttttaaaaatagttcttttgtaatgtggtgttcaaaacggaattgaaaactggcaccccatctctttgaaacatctggtaatttgaattctagtgctcattattcattattgtttgttttcattgtgctgatttttggtgatcaagcctcagtccccttcatattaccctctcctttttaaaaattacgtgtgcacagagaggtcacctttttcaggacattgcattttcaggcttgtggtgataaataagatcgaccaatgcaagtgtactatganttccatggccgagttcnacggtgtaaacaccgggggaagcgggagacaatcagaaccacggaagactctaggaattatggggccacaagattgtccacaa

SEQ ID NO: 392550 - DNA, 157 bp, Homo sapiens
attcaagcttctaacgatgtacggggacatgcagaaatgaatacaacagaacactgctctttttgattttatttgtactttttggcctgggatatgggttttaaatggacattgtctgtaccagcttcattaaaataaacaatatttgtaaaaatca

SEQ ID NO: 392551 - DNA, 1225 bp, Homo sapiens
agcgggagtgacgcgaggcgtagcggaagttactgcagccgcggtgttgtgctgtggggaagggagaaggatttgtaaaccccggagcgaggttctgcttacccgaggccgctgctgtgcggagacccccgggtgaagccaccgtcatcatgtctgaccaggaggcaaaaccttcaactgaggacttgggggataagaaggaaggtgaatatattaaactcaaagtcattggacaggatagcagtgagattcacttcaaagtgaaaatgacaacacatctcaagaaactcaaagaatcatactgtcaaagacagggtgttccaatgaattcactcaggtttctctttgagggtcagagaattgctgataatcatactccaaaagaactgggaatggaggaagaagatgtgattgaagtttatcaggaacaaacggggggtcattcaacagtttagatattctttttattttttttcttttccctcaatccttttttatttttaaaaatagttcttttgtaatgtggtgttcaaaacggaattgaaaactggcaccccatctctttgaaacatctggtaatttgaattctagtgctcattattcattattgtttgttttcattgtgctgatttttggtgatcaagcctcagtccccttcatattaccctctcctttttaaaaattacgtgtgcacagagaggtcacctttttcaggacattgcattttcaggcttgtggtgataaataagatcgaccaatgcaagtgttcataatgactttccaattggccctgatgttctagcatgtgattacttcactcctggactgtgactttcagtgggagatggaagtttttcagagaactgaactgtggaaaaatgacctttccttaacttgaagctacttttaaaatttgagggtctggaccaaaagaagaggaatatcaggttgaagtcaagatgacagataaggtgagagtaatgactaactccaaagatggcttcactgaagaaaaggcattttaagattttttaaaaatcttgtcagaagatcccagaaaagttctaattttcattagcaattaataaagctatacatgcagaaatgaatacaacagaacactgctctttttgattttatttgtactttttggcctgggatatgggttttaaatggacattgtctgtaccagcttcattaaaataaacaatatttgtaaaaatca

SEQ ID NO: 392552 - DNA, 1541 bp, Homo sapiens
aagcagtggtatcaacgcagagtgcccattacggccgggggaagttactgcagccgcggtgttgtgctgtggggaagggagaaggatttgtaaaccccggagcgaggttctgcttacccgaggccgctgctgtgcggagacccccgggtgaagccaccgtcatcatgtctgaccaggaggcaaaaccttcaactgaggacttgggggataagaaggaaggtgaatatattaaactcaaagtcattggacaggatagcagtgagattcacttcaaagtgaaaatgacaacacatctcaagaaactcaaagaatcatactgtcaaagacagggtgttccaatgaattcactcaggtttctctttgagggtcagagaattgctgataatcatactccaaaagaactgggaatggaggaagaagatgtgattgaagtttatcaggaacaaacggggggtcattcaacagtttagatattctttttattttttttcttttccctcaatccttttttatttttaaaaatagttcttttgtaatgtggtgttcaaaacggaattgaaaactggcaccccatctctttgaaacatctggtaatttgaattctagtgctcattattcattattgtttgttttcattgtgctgatttttggtgatcaagcctcagtccccttcatattaccctctcctttttaaaaattacgtgtgcacagagaggtcacctttttcaggacattgcattttcaggcttgtggtgataaataagatcgaccaatgcaagtgttcataatgactttccaattggccctgatgttctagcatgtgattacttcactcctggactgtgactttcagtgggagatggaagtttttcagagaactgaactgtggaaaaatgacctttccttaacttgaagctacttttaaaatttgagggtctggaccaaaagaagaggaatatcaggttgaagtcaagatgacagataaggtgagagtaatgactaactccaaagatggcttcactgaagaaaaggcattttaagattttttaaaaatcttgtcagaagatcccagaaaagttctaattttcattagcaattaataaagctatacatgcagaaatgaatacaacagaacactgctctttttgattttatttgtactttttggcctgggatatgggttttaaatggacattgtctgtaccagcttcattaaaataaacaatatttgtaaaaatcatactaatgcttattttattttaattgtatagaaagaaaaaaatgcctaaaataaggttttcttgcataaatactggaaattgcacatggtacaaattttttcttcattactgtacagtgatgatgttaatgactttgaagcactgaaagttactgaagtgccttctgaatcaaggatttaattaaggccacaatacctttttaatactcagtgttctgtttttttaaaaacttgatattcctgtatggtgcatatatgatacagttacctaatcatgttgaataaatgggcatgccaaaaa

SEQ ID NO: 392553 - DNA, 1211 bp, Homo sapiens
aagcagtggtatcaacgcagagtgcccattacggccgggggaagttactgcagccgcggtgttgtgctgtggggaagggagaaggatttgtaaaccccggagcgaggttctgcttacccgaggccgctgctgtgcggagacccccgggtgaagccaccgtcatcatgtctgaccaggaggcaaaaccttcaactgaggacttgggggataagaaggaaggtgaatatattaaactcaaagtcattggacaggatagcagtgagattcacttcaaagtgaaaatgacaacacatctcaagaaactcaaagaatcatactgtcaaagacagggtgttccaatgaattcactcaggtttctctttgagggtcagagaattgctgataatcatactccaaaagaactgggaatggaggaagaagatgtgattgaagtttatcaggaacaaacggggggtcattcaacagtttagatattctttttattttttttcttttccctcaatccttttttatttttaaaaatagttcttttgtaatgtggtgttcaaaacggaattgaaaactggcaccccatctctttgaaacatctggtaatttgaattctagtgctcattattcattattgtttgttttcattgtgctgatttttggtgatcaagcctcagtccccttcatattaccctctcctttttaaaaattacgtgtgcacagagaggtcacctttttcaggacattgcattttcaggcttgtggtgataaataagatcgaccaatgcaagtgttcataatgactttccaattggccctgatgttctagcatgtgattacttcactcctggactgtgactttcagtgggagatggaagtttttcagagaactgaactgtggaaaaatgacctttccttaacttgaagctacttttaaaatttgagggtctggaccaaaagaagaggaatatcaggttgaagtcaagatgacagataaggtgagagtaatgactaactccaaagatggcttcactgaagaaaaggcattttaagattttttaaaaatcttgtcagaagatcccagaaaagttctaattttcattagcaattaataaagctatacatgcagaaatgaatacaacagaacactggtctttgattattgacttggcggattgggtttaatgggctgtctgtccactctaataacatttgttcatccc

SEQ ID NO: 392554 - DNA, 1487 bp, Homo sapiens
aagcagtggtatcaacgcagagtgcccattacggccgggggaagttactgcagccgcggtgttgtgctgtggggaagggagaaggatttgtaaaccccggagcgaggttctgcttacccgaggccgctgctgtgcggagacccccgggtgaagccaccgtcatcatgtctgaccaggaggcaaaaccttcaactgaggacttgggggataagaaggaaggtgaatatattaaactcaaagtcattggacaggatagcagtgagattcacttcaaagtgaaaatgacaacacatctcaagaaactcaaagaatcatactgtcaaagacagggtgttccaatgaattcactcaggtttctctttgagggtcagagaattgctgataatcatactccaaaagaactgggaatggaggaagaagatgtgattgaagtttatcaggaacaaacggggggtcattcaacagtttagatattctttttattttttttcttttccctcaatccttttttatttttaaaaatagttcttttgtaatgtggtgttcaaaacggaattgaaaactggcaccccatctctttgaaacatctggtaatttgaattctagtgctcattattcattattgtttgttttcattgtgctgatttttggtgatcaagcctcagtccccttcatattaccctctcctttttaaaaattacgtgtgcacagagaggtcacctttttcaggacattgcattttcaggcttgtggtgataaataagatcgaccaatgcaagtgttcataatgactttccaattggccctgatgttctagcatgtgattacttcactcctggactgtgactttcagtgggagatggaagtttttcagagaactgaactgtggaaaaatgacctttccttaacttgaagctacttttaaaatttgagggtctggaccaaaagaagaggaatatcaggttgaagtcaagatgacagataaggtgagagtaatgactaactccaaagatggcttcactgaagaaaaggcattttaagattttttaaaaatcttgtcagaagatcccagaaaaagaacactgctctttttgattttatttgtactttttggcctgggatatgggttttaaatggacattgtctgtaccagcttcattaaaataaacaatatttgtaaaaatcatactaatgcttattttattttaattgtatagaaagaaaaaaatgcctaaaataaggttttcttgcataaatactggaaattgcacatggtacaaattttttcttcattactgtacagtgatgatgttaatgactttgaagcactgaaagttactgaagtgccttctgaatcaaggatttaattaaggccacaatacctttttaatactcagtgttctgtttttttaaaaacttgatattcctgtatggtgcatatatgatacagttacctaatcatgttgaataaatgggcatgccaaaaa

SEQ ID NO: 392555 - DNA, 1183 bp, Homo sapiens
aagcagtggtatcaacgcagagtgcccattacggccgggggaagttactgcagccgcggtgttgtgctgtggggaagggagaaggatttgtaaaccccggagcgaggttctgcttacccgaggccgctgctgtgcggagacccccgggtgaagccaccgtcatcatgtctgaccaggaggcaaaaccttcaactgaggacttgggggataagaaggaaggtgaatatattaaactcaaagtcattggacaggatagcagtgagattcacttcaaagtgaaaatgacaacacatctcaagaaactcaaagaatcatactgtcaaagacagggtgttccaatgaattcactcaggtttctctttgagggtcagagaattgctgataatcatactccaaaagaactgggaatggaggaagaagatgtgattgaagtttatcaggaacaaacggggggtcattcaacagtttagatattctttttattttttttcttttccctcaatccttttttatttttaaaaatagttcttttgtaatgtggtgttcaaaacggaattgaaaactggcaccccatctctttgaaacatctggtaatttgaattctagtgctcattattcattattgtttgttttcattgtgctgatttttggtgatcaagcctcagtccccttcatattaccctctcctttttaaaaattacgtgtgcacagagaggtcacctttttcaggacattgcattttcaggcttgtgtgttctagcatgtgattacttcactcctggactgtgactttcagtgggagatggaagtttttcagagaactgaactgtggaaaaatgacctttccttaacttgaagctacttttaaaatttgagggtctggaccaaaagaagaggaatatcaggttgaagtcaagatgacagataaggtgagagtaatgactaactccaaagatggcttcactgaagaaaaggcattttaagattttttaaaaatcttgtcagaagatcccagaaaagttctaattttcattagcaattaataaagctatacatgcagaaatgaatacaacagaacactgctctttttgattttatttgtactttttggcctgggatatgggttttaaatggacattgtctgtaccagcttcattaaaataaacaatatttgtaaaaatca

SEQ ID NO: 392556 - DNA, 1334 bp, Homo sapiens
aagcagtggtatcaacgcagagtgcccattacggccgggggaagttactgcagccgcggtgttgtgctgtggggaagggagaaggatttgtaaaccccggagcgaggttctgcttacccgaggccgctgctgtgcggagacccccgggtgaagccaccgtcatcatgtctgaccagggctctgtggattagactcacctctgcttcttggtgtgtggggcctcagctgagatgactcaagtggctgggggctggaacagctagttgtcaggaggcaaaaccttcaactgaggacttgggggataagaaggaaggtgaatatattaaactcaaagtcattggacaggatagcagtgagattcacttcaaagtgaaaatgacaacacatctcaagaaactcaaagaatcatactgtcaaagacagggtgttccaatgaattcactcaggtttctctttgagggtcagagaattgctgataatcatactccaaaagaactgggaatggaggaagaagatgtgattgaagtttatcaggaacaaacggggggtcattcaacagtttagatattctttttattttttttcttttccctcaatccttttttatttttaaaaatagttcttttgtaatgtggtgttcaaaacggaattgaaaactggcaccccatctctttgaaacatctggtaatttgaattctagtgctcattattcattattgtttgttttcattgtgctgatttttggtgatcaagcctcagtccccttcatattaccctctcctttttaaaaattacgtgtgcacagagaggtcacctttttcaggacattgcattttcaggcttgtggtgataaataagatcgaccaatgcaagtgttcataatgactttccaattggccctgatgttctagcatgtgattacttcactcctggactgtgactttcagtgggagatggaagtttttcagagaactgaactgtggaaaaatgacctttccttaacttgaagctacttttaaaatttgagggtctggaccaaaagaagaggaatatcaggttgaagtcaagatgacagataaggtgagagtaatgactaactccaaagatggcttcactgaagaaaaggcattttaagattttttaaaaatcttgtcagaagatcccagaaaagttctaattttcattagcaattaataaagctatacatgcagaaatgaatacaacagaacactgctctttttgattttatttgtactttttggcctgggatatgggttttaaatggacattgtctgtaccagcttcattaaaataaacaatatttgtaaaaatca

SEQ ID NO: 392557 - DNA, 1430 bp, Homo sapiens
aagcagtggtatcaacgcagagtgcccattacggccgggggaagttactgcagccgcggtgttgtgctgtggggaagggagaaggatttgtaaaccccggagcgaggttctgcttacccgaggccgctgctgtgcggagacccccgggtgaagccaccgtcatcatgtctgaccaggaatcacttaaccctgaaagtcttgtgagaagacatggcgagaagtggagtcaagcacacaccatgatggcagataaaggaagagaggccgataatcttttttttttgagacggagtctcgctctgtcacccagtctggagtgcagtggtgccatctcgactcgctgcaacctccgcctcccaggttcaagaggcaaaaccttcaactgaggacttgggggataagaaggaaggtgaatatattaaactcaaagtcattggacaggatagcagtgagattcacttcaaagtgaaaatgacaacacatctcaagaaactcaaagaatcatactgtcaaagacagggtgttccaatgaattcactcaggtttctctttgagggtcagagaattgctgataatcatactccaaaagaactgggaatggaggaagaagatgtgattgaagtttatcaggaacaaacggggggtcattcaacagtttagatattctttttattttttttcttttccctcaatccttttttatttttaaaaatagttcttttgtaatgtggtgttcaaaacggaattgaaaactggcaccccatctctttgaaacatctggtaatttgaattctagtgctcattattcattattgtttgttttcattgtgctgatttttggtgatcaagcctcagtccccttcatattaccctctcctttttaaaaattacgtgtgcacagagaggtcacctttttcaggacattgcattttcaggcttgtggtgataaataagatcgaccaatgcaagtgttcataatgactttccaattggccctgatgttctagcatgtgattacttcactcctggactgtgactttcagtgggagatggaagtttttcagagaactgaactgtggaaaaatgacctttccttaacttgaagctacttttaaaatttgagggtctggaccaaaagaagaggaatatcaggttgaagtcaagatgacagataaggtgagagtaatgactaactccaaagatggcttcactgaagaaaaggcattttaagattttttaaaaatcttgtcagaagatcccagaaaagttctaattttcattagcaattaataaagctatacatgcagaaatgaatacaacagaacactgctctttttgattttatttgtactttttggcctgggatatgggttttaaatggacattgtctgtaccagcttcattaaaataaacaatatttgtaaaaatca

SEQ ID NO: 392558 - DNA, 1165 bp, Homo sapiens
aagcagtggtatcaacgcagagtgcccattacggccgggggaagttactgcagccgcggtgttgtgctgtggggaagggagaaggatttgtaaaccccggagcgaggttctgcttacccgaggccgctgctgtgcggagacccccgggtgaagccaccgtcatcatgtctgaccaggatagcagtgagattcacttcaaagtgaaaatgacaacacatctcaagaaactcaaagaatcatactgtcaaagacagggtgttccaatgaattcactcaggtttctctttgagggtcagagaattgctgataatcatactccaaaagaactgggaatggaggaagaagatgtgattgaagtttatcaggaacaaacggggggtcattcaacagtttagatattctttttattttttttcttttccctcaatccttttttatttttaaaaatagttcttttgtaatgtggtgttcaaaacggaattgaaaactggcaccccatctctttgaaacatctggtaatttgaattctagtgctcattattcattattgtttgttttcattgtgctgatttttggtgatcaagcctcagtccccttcatattaccctctcctttttaaaaattacgtgtgcacagagaggtcacctttttcaggacattgcattttcaggcttgtggtgataaataagatcgaccaatgcaagtgttcataatgactttccaattggccctgatgttctagcatgtgattacttcactcctggactgtgactttcagtgggagatggaagtttttcagagaactgaactgtggaaaaatgacctttccttaacttgaagctacttttaaaatttgagggtctggaccaaaagaagaggaatatcaggttgaagtcaagatgacagataaggtgagagtaatgactaactccaaagatggcttcactgaagaaaaggcattttaagattttttaaaaatcttgtcagaagatcccagaaaagttctaattttcattagcaattaataaagctatacatgcagaaatgaatacaacagaacactgctctttttgattttatttgtactttttggcctgggatatgggttttaaatggacattgtctgtaccagcttcattaaaataaacaatatttgtaaaaatca

SEQ ID NO: 392559 - DNA, 787 bp, Homo sapiens
aagcagtggtatcaacgcagagtgcccattacggccgggggaagttactgcagccgcggtgttgtgctgtggggaagggagaaggatttgtaaaccccggagcgaggttctgcttacccgaggccgctgctgtgcggagacccccgggtgaagccaccgtcatcatgtctgaccaggaggcaaaaccttcaactgaggacttgggggataagaaggaaggtgaatatattaaactcaaagtcattggacaggatagcagtgagattcacttcaaagtgaaaatgacaacacatctcaagaaactcaaagaatcatactgtcaaagacagggtgttccaatgaattcactcaggtttctctttgagggtcagagaattgctgataatcatactccaaaagaactgggaatggaggaagaagatgtgattgaagtttatcaggaacaaacggggggtcattcaacagtttagatattctttttattttttttcttttccctcaatccttttttatttttaaaaatagttcttttgtaatgtggtgttcaaaacggaattgaaaactggcaccccatctctttgaaacatctggtaatttgaattctagtgctcattattcattattgtttgttttcattgtgctgatttttggtgatcaagcctcagtccccttcatattaccctctcctttttaaaaattacgtgtgcacagagaggtcacctttttcaggacattgcattttcaggcttgtgctaacacgtggatactttacttctgggctggggct

SEQ ID NO: 392560 - DNA, 963 bp, Homo sapiens
  misc_feature (19)..(19): n is a, c, g, or t
tgacctgaggatccccagntctttcccctcaaagaatcatactgtcaagacaggtgttccaatgaattcactcaggtttctctttgagggtcagagaattgctgataatcatactccaaaagaactgggaatggaggaagaagatgtgattgaagtttatcaggaacaaacggggggtcattcaacagtttagatattctttttattttttttcttttccctcaatccttttttatttttaaaaatagttcttttgtaatgtggtgttcaaaacggaattgaaaactggcaccccatctctttgaaacatctggtaatttgaattctagtgctcattattcattattgtttgttttcattgtgctgatttttggtgatcaagcctcagtccccttcatattaccctctcctttttaaaaattacgtgtgcacagagaggtcacctttttcaggacattgcattttcaggcttgtggtgataaataagatcgaccaatgcaagtgttcataatgactttccaattggccctgatgttctagcatgtgattacttcactcctggactgtgactttcagtgggagatggaagtttttcagagaactgaactgtggaaaaatgacctttccttaacttgaagctacttttaaaatttgagggtctggaccaaaagaagaggaatatcaggttgaagtcaagatgacagataaggtgagagtaatgactaactccaaagatggcttcactgaagaaaaggcattttaagattttttaaaaatcttgtcagaagatcccagaaaagttctaattttcattagcaattaataaagctatacatgcagaaatgaatacaacagaacactgctctttttgattttatttgtactttttggcctgggatatgggttttaaatggacattgtctgtaccagcttcattaaaataaacaatatttgtaaaaatca

SEQ ID NO: 392561 - DNA, 1193 bp, Homo sapiens
aagcagtggtatcaacgcagagtgcccattacggccgggggaagttactgcagccgcggtgttgtgctgtggggaagggagaaggatttgtaaaccccggagcgaggttctgcttacccgaggccgctgctgtgcggagacccccgggtgaagccaccgtcatcatgtctgaccaggaggcaaaaccttcaactgaggacttgggggataagaaggaaggtgaatatattaaactcaaagtcattggacaggatagcagtgagattcacttcaaagtgaaaatgacaacacatctcaagaaactcaaagaatcatactgtcaaagacagggtgttccaatgaattcactcaggtttctctttgagggtcagagaattgctgataatcatactccaaaagaaggggggtcattcaacagtttagatattctttttattttttttcttttccctcaatccttttttatttttaaaaatagttcttttgtaatgtggtgttcaaaacggaattgaaaactggcaccccatctctttgaaacatctggtaatttgaattctagtgctcattattcattattgtttgttttcattgtgctgatttttggtgatcaagcctcagtccccttcatattaccctctcctttttaaaaattacgtgtgcacagagaggtcacctttttcaggacattgcattttcaggcttgtggtgataaataagatcgaccaatgcaagtgttcataatgactttccaattggccctgatgttctagcatgtgattacttcactcctggactgtgactttcagtgggagatggaagtttttcagagaactgaactgtggaaaaatgacctttccttaacttgaagctacttttaaaatttgagggtctggaccaaaagaagaggaatatcaggttgaagtcaagatgacagataaggtgagagtaatgactaactccaaagatggcttcactgaagaaaaggcattttaagattttttaaaaatcttgtcagaagatcccagaaaagttctaattttcattagcaattaataaagctatacatgcagaaatgaatacaacagaacactgctctttttgattttatttgtactttttggcctgggatatgggttttaaatggacattgtctgtaccagcttcattaaaataaacaatatttgtaaaaatca

SEQ ID NO: 392562 - DNA, 1168 bp, Homo sapiens
aagcagtggtatcaacgcagagtgcccattacggccgggggaagttactgcagccgcggtgttgtgctgtggggaagggagaaggatttgtaaaccccggagcgaggttctgcttacccgaggccgctgctgtgcggagacccccgggtgaagccaccgtcatcatgtctgaccaggaggcaaaaccttcaactgaggacttgggggataagaaggaaggtgaatatattaaactcaaagtcattggacaggatagcagtgagattcacttcaaagtgaaaatgacaacacatctcaagaaactcaaagaatcatactgtcaaagacagctgggaatggaggaagaagatgtgattgaagtttatcaggaacaaacggggggtcattcaacagtttagatattctttttattttttttcttttccctcaatccttttttatttttaaaaatagttcttttgtaatgtggtgttcaaaacggaattgaaaactggcaccccatctctttgaaacatctggtaatttgaattctagtgctcattattcattattgtttgttttcattgtgctgatttttggtgatcaagcctcagtccccttcatattaccctctcctttttaaaaattacgtgtgcacagagaggtcacctttttcaggacattgcattttcaggcttgtggtgataaataagatcgaccaatgcaagtgttcataatgactttccaattggccctgatgttctagcatgtgattacttcactcctggactgtgactttcagtgggagatggaagtttttcagagaactgaactgtggaaaaatgacctttccttaacttgaagctacttttaaaatttgagggtctggaccaaaagaagaggaatatcaggttgaagtcaagatgacagataaggtgagagtaatgactaactccaaagatggcttcactgaagaaaaggcattttaagattttttaaaaatcttgtcagaagatcccagaaaagttctaattttcattagcaattaataaagctatacatgcagaaatgaatacaacagaacactgctctttttgattttatttgtactttttggcctgggatatgggttttaaatggacattgtctgtaccagcttcattaaaataaacaatatttgtaaaaatca

SEQ ID NO: 392563 - DNA, 1143 bp, Homo sapiens
aagcagtggtatcaacgcagagtgcccattacggccggggggagaaggatttgtaaaccccggagcgaggttctgcttacccgaggccgctgctgtgcggagacccccgggtgaagccaccgtcatcatgtctgaccaggaggcaaaaccttcaactgaggacttgggggataagaaggaaggtgaatatattaaactcaaagtcattggacaggatagcagtgagattcacttcaaagtgaaaatgacaacacatctcaagaaactcaaagaatcatactgtcaaagacagggtgttccaatgaattcactcaggtttctctttgagggtcagagaattgctgataatcatactccaaaagaactgggaatggaggaagaagatgtgattgaagtttatcaggaacaaacggggggtcattcaacagtttagatattctttttattttttttcttttccctcaatccttttttatttttaaaaatagttcttttgtaatgtggtgttcaaaacggaattgaaaactggcaccccatctctttgaaacatctggtaatttgaattctagtgctcattattcattattgtttgttttcattgtgctgatttttggtgatcaagcctcagtccccttcatattaccctctcctttttgtgataaataagatcgaccaatgcaagtgttcataatgactttccaattggccctgatgttctagcatgtgattacttcactcctggactgtgactttcagtgggagatggaagtttttcagagaactgaactgtggaaaaatgacctttccttaacttgaagctacttttaaaatttgagggtctggaccaaaagaagaggaatatcaggttgaagtcaagatgacagataaggtgagagtaatgactaactccaaagatggcttcactgaagaaaaggcattttaagattttttaaaaatcttgtcagaagatcccagaaaagttctaattttcattagcaattaataaagctatacatgcagaaatgaatacaacagaacactgctctttttgattttatttgtactttttggcctgggatatgggttttaaatggacattgtctgtaccagcttcattaaaataaacaatatttgtaaaaatca

SEQ ID NO: 392564 - DNA, 793 bp, Homo sapiens
  misc_feature (722)..(722): n is a, c, g, or t
aagcagtggtatcaacgcagagtgcccattacggccgggggaagttactgcagccgcggtgttgtgctgtggggaagggagaaggatttgtaaaccccggagcgaggttctgcttacccgaggccgctgctgtgcggagacccccgggtgaagccaccgtcatcatgtctgaccaggaggcaaaaccttcaactgaggacttgggggataagaaggaaggtgaatatattaaactcaaagtcattggacaggatagcagtgagattcacttcaaagtgaaaatgacaacacatctcaagaaactcaaagaatcatactgtcaaagacagggtgttccaatgaattcactcaggtttctctttgagggtcagagaattgctgataatcatactccaaaagaactgggaatggaggaagaagatgtgattgaagtttatcaggaacaaacggggggtcattcaacagtttagatattctttttattttttttcttttccctcaatccttttttatttttaaaaatagttcttttgtaatgtggtgttcaaaacggaattgaaaactggcaccccatctctttgaaacatctggtaatttgaattctagtgctcattattcattattgtttgttttcattgtgctgatttttgggggtgatccaaagggccttcaaggttcccccctttccacttaattttaaccccctttcttccccttttttnaacacatttacgttgttgccccggacgcagggtccacccttttttcccaggcaccttttgcccttttttcc

SEQ ID NO: 392565 - DNA, 641 bp, Homo sapiens
  misc_feature (333)..(333): n is a, c, g, or t
aagcagtggtatcaacgcagagtgcccattacggccgggggaagttactgcagccgcggtgttgtgctgtggggaagggagaaggatttgtaaaccccggagcgaggttctgcttacccgaggccgctgctgtgcggagacccccgggtgaagccaccgtcatcatgtctgaccaggaggcaaaaccttcaactgaggacttgggggataagaaggaaggtgaatatattaaactcaaagtcattggacaggatagcagtgagattcacttcaaagtgaaaatgacaacacatctcaagaaactcaaagaatcatactgtcaaagacagttcnctactggtcaaagacaagcgggttggtttccccaaagttttgggaaaaaatttttttcccaaaaaattttttccccaaaaaagggggggggaatttttaatgtaagtaacaaaaagagttttcacacaaattattttaaagttaaaaattgtgggggggggaaaaaaaaagaggggggagaggaggagaggggaggattttttccacaaaaaaagagggggggaaaaaaaagggggggtgcacagatcagaaaatatttttttgagaaaaggggggggggaaaaaaataattttagggggggagaaaa

SEQ ID NO: 392566 - DNA, 184 bp, Homo sapiens
gaatgggtcaattttgcttttgtttcttggccaggaatcacttaaccctgaaagtcttgtgagaagacatggcgagaagtggagtcaagcacacaccatgatggcagataaaggaagagaggccgataatcttttttttttgagacggagtctcgctctgtcacccagtctggagtgcagtggt

SEQ ID NO: 392567 - DNA, 1240 bp, Homo sapiens
aagcagtggtatcaacgcagagtgcccattacggccgggggaagttactgcagccgcggtgttgtgctgtggggaagggagaaggatttgtaaaccccggagcgaggttctgcttacccgaggccgctgctgtgcggagacccccgggtgaagccaccgtcatcatgtctgaccaggaggcaaaaccttcaactgaggacttgggggataagaaggaaggtgaatatattaaactcaaagtcattggacaggatagcagtgagattcacttcaaagtgaaaatgacaacacatctcaagaaactcaaagaatcatactgtcaaagacagggtgttccaatgaattcactcaggtttctctttgagggtcagagaattgctgataatcatactccaaaagaactgggaatggaggaagaagatgtgattgaagtttatcaggaacaaacggggggtcattcaacagtttagatattctttttattttttttcttttccctcaatccttttttatttttaaaaatagttcttttgtaatgtggtgttcaaaacggaattgaaaactggcaccccatctctttgaaacatctggtaatttgaattctagtgctcattattcattattgtttgttttcattgtgctgatttttggtgatcaagcctcagtccccttcatattaccctctcctttttaaaaattacgtgtgcacagagaggtcacctttttcaggacattgcattttcaggcttgtggtgataaataagatcgaccaatgcaagtgttcataatgactttccaattggccctgatgttctagcatgtgattacttcactcctggactgtgactttcagtgggagatggaagtttttcagagaactgaactgtggaaaaatgacctttccttaacttgaagctacttttaaaatttgagggtctggaccaaaagaagaggaatatcaggttgaagtcaagatgacagataaggtgagagtaatgactaactccaaagatggcttcactgaagaaaaggcattttaagattttttaaaaatcttgtcagaagatcccagaaaagttctaattttcattagcaattaataaagctatacatgcagaaatgaatacaacagaacactgctctttttgattttatttgtactttttggcctgggatatgggttttaaatggacattgtctgtaccagcttcattaaaataaacaatatttgtaaaaatca

SEQ ID NO: 392568 - DNA, 1773 bp, Homo sapiens
aagcagtggtatcaacgcagagtgcccattacggccgggggaagttactgcagccgcggtgttgtgctgtggggaagggagaaggatttgtaaaccccggagcgaggttctgcttacccgaggccgctgctgtgcggagacccccgggtgaagccaccgtcatcatgtctgaccaggaggcaaaaccttcaactgaggacttgggggataagaaggaaggtgaatatattaaactcaaagtcattggacaggatagcagtgagattcacttcaaagtgaaaatgacaacacatctcaagaaactcaaagaatcatactgtcaaagacagggtgttccaatgaattcactcaggtttctctttgagggtcagagaattgctgataatcatactccaaaagaactgggaatggaggaagaagatgtgattgaagtttatcaggaacaaacggggggtcattcaacagtttagatattctttttattttttttcttttccctcaatccttttttatttttaaaaatagttcttttgtaatgtggtgttcaaaacggaattgaaaactggcaccccatctctttgaaacatctggtaatttgaattctagtgctcattattcattattgtttgttttcattgtgctgatttttggtgatcaagcctcagtccccttcatattaccctctcctttttaaaaattacgtgtgcacagagaggtcacctttttcaggacattgcattttcaggcttgtggtgataaataagatcgaccaatgcaagtgttcataatgactttccaattggccctgatgttctagcatgtgattacttcactcctggactgtgactttcagtgggagatggaagtttttcagagaactgaactgtggaaaaatgacctttccttaacttgaagctacttttaaaatttgagggtctggaccaaaagaagaggaatatcaggttgaagtcaagatgacagataaggtgagagtaatgactaactccaaagatggcttcactgaagaaaaggcattttaagattttttaaaaatcttgtcagaagatcccagaaaagttctaattttcattagcaattaataaagctatacatgcagaaatgaatacaacagaacactgctctttttgattttatttgtactttttggcctgggatatgggttttaaatggacattgtctgtaccagcttcattaaaataaacaatatttgtaaaaatcatactaatgcttattttattttaattgtatagaaagaaaaaaatgcctaaaataaggttttcttgcataaatactggaaattgcacatggtacaaattttttcttcattactgtacagtgatgatgttaatgactttgaagcactgaaagttactgaagtgccttctgaatcaaggatttaattaaggccacaatacctttttaatactcagtgttctgtttttttaaaaacttgatattcctgtatggtgcatatatgatacagttacctaatcatgttgaataaatgggcatgccaaaaaaaaaaacaacacagacgccgacacccaacagaacaccaatctctgacagacgaaaacaacaacaaacaaaaaaaaaacaattttgtggggcgccaacggccgccaccaggaaaaaagacttcttaaaaacacaccatcgtgttgggcgcgccgcgcggagccacagagatgatagagcaacaaggggtgacagacggtgtgtccccaagagaaaaactcgggccaacaacaa

SEQ ID NO: 392569 - DNA, 1203 bp, Homo sapiens
aagcagtggtatcaacgcagagtgcccattacggccggggggagaaggatttgtaaaccccggagcgaggttctgcttacccgaggccgctgctgtgcggagacccccgggtgaagccaccgtcatcatgtctgaccaggaggcaaaaccttcaactgaggacttgggggataagaaggaaggtgaatatattaaactcaaagtcattggacaggatagcagtgagattcacttcaaagtgaaaatgacaacacatctcaagaaactcaaagaatcatactgtcaaagacagggtgttccaatgaattcactcaggtttctctttgagggtcagagaattgctgataatcatactccaaaagaactgggaatggaggaagaagatgtgattgaagtttatcaggaacaaacggggggtcattcaacagtttagatattctttttattttttttcttttccctcaatccttttttatttttaaaaatagttcttttgtaatgtggtgttcaaaacggaattgaaaactggcaccccatctctttgaaacatctggtaatttgaattctagtgctcattattcattattgtttgttttcattgtgctgatttttggtgatcaagcctcagtccccttcatattaccctctcctttttaaaaattacgtgtgcacagagaggtcacctttttcaggacattgcattttcaggcttgtggtgataaataagatcgaccaatgcaagtgttcataatgactttccaattggccctgatgttctagcatgtgattacttcactcctggactgtgactttcagtgggagatggaagtttttcagagaactgaactgtggaaaaatgacctttccttaacttgaagctacttttaaaatttgagggtctggaccaaaagaagaggaatatcaggttgaagtcaagatgacagataaggtgagagtaatgactaactccaaagatggcttcactgaagaaaaggcattttaagattttttaaaaatcttgtcagaagatcccagaaaagttctaattttcattagcaattaataaagctatacatgcagaaatgaatacaacagaacactgctctttttgattttatttgtactttttggcctgggatatgggttttaaatggacattgtctgtaccagcttcattaaaataaacaatatttgtaaaaatca

SEQ ID NO: 392570 - DNA, 1544 bp, Homo sapiens
aagcagtggtatcaacgcagagtgcccattacggccgggggaagttactgcagccgcggtgttgtgctgtggggaagggagaaggatttgtaaaccccggagcgaggttctgcttacccgaggccgctgctgtgcggagacccccgggtgaagccaccgtcatcatgtctgaccaggaggcaaaaccttcaactgaggacttgggggataagaaggaaggtgaatatattaaactcaaagtcattggacaggatagcagtgagattcacttcaaagtgaaaatgacaacacatctcaagaaactcaaagaatcatactgtcaaagacagggtgttccaatgaattcactcaggtttctctttgagggtcagagaattgctgataatcatactccaaaagaactgggaatggaggaagaagatgtgattgaagtttatcaggaacaaacggggggtcattcaacagtttagatattctttttattttttttcttttccctcaatccttttttatttttaaaaatagttcttttgtaatgtggtgttcaaaacggaattgaaaactggcaccccatctctttgaaacatctggtaatttgaattctagtgctcattattcattattgtttgttttcattgtgctgatttttggtgatcaagcctcagtccccttcatattaccctctcctttttaaaaattacgtgtgcacagagaggtcacctttttcaggacattgcattttcaggcttgtgtgttctagcatgtgattacttcactcctggactgtgactttcagtgggagatggaagtttttgtggtgataaataagatcgaccaatgcaagtgttcataatgactttccaattggccctgacagagaactgaactgtggaaaaatgacctttccttaacttgaagctacttttaaaatttgagggtctggaccaaaagaagaggaatatcaggttgaagtcaagatgacagataaggtgagagtaatgactaactccaaagatggcttcactgaagaaaaggcattttaagattttttaaaaatcttgtcagaagatcccagaaaagttctaattttcattagcaattaataaagctatacatgcagaaatgaatacaacagaacactgctctttttgattttatttgtactttttggcctgggatatgggttttaaatggacattgtctgtaccagcttcattaaaataaacaatatttgtaaaaatcatactaatgcttattttattttaattgtatagaaagaaaaaaatgcctaaaataaggttttcttgcataaatactggaaattgcacatggtacaaattttttcttcattactgtacagtgatgatgttaatgactttgaagcactgaaagttactgaagtgccttctgaatcaaggatttaattaaggccacaatacctttttaatactcagtgttctgtttttttaaaaacttgatattcctgtatggtgcatatatgatacagttacctaatcatgttgaataaatgggcatgccaaaaa

SEQ ID NO: 392571 - DNA, 1180 bp, Homo sapiens
aagcagtggtatcaacgcagagtgcccattacggccgggggaagttactgcagccgcggtgttgtgctgtggggaagggagaaggatttgtaaaccccggagcgaggttctgcttacccgaggccgctgctgtgcggagacccccgggtgaagccaccgtcatcatgtctgaccaggaggcaaaaccttcaactgaggacttgggggataagaaggaaggtgaatatattaaactcaaagtcattggacaggatagcagtgagattcacttcaaagtgaaaatgacaacacatctcaagaaactcaaagaatcatactgtcaaagacagggtgttccaatgaattcactcaggtttctctttgagggtcagagaattgctgataatcatactccaaaagaactgggaatggaggaagaagatgtgattgaagtttatcaggaacaaacggggggtcattcaacagtttagatattctttttattttttttcttttccctcaatccttttttatttttaaaaatagttcttttgtaatgtggtgttcaaaacggaattgaaaactggcaccccatctctttgaaacatctggtaatttgaattctagtgctcattattcattattgtttgttttcattgtgctgatttttggtgatcaagcctcagtccccttcatattaccctctcctttttgtgataaataagatcgaccaatgcaagtgttcataatgactttccaattggccctgatgttctagcatgtgattacttcactcctggactgtgactttcagtgggagatggaagtttttcagagaactgaactgtggaaaaatgacctttccttaacttgaagctacttttaaaatttgagggtctggaccaaaagaagaggaatatcaggttgaagtcaagatgacagataaggtgagagtaatgactaactccaaagatggcttcactgaagaaaaggcattttaagattttttaaaaatcttgtcagaagatcccagaaaagttctaattttcattagcaattaataaagctatacatgcagaaatgaatacaacagaacactgctctttttgattttatttgtactttttggcctgggatatgggttttaaatggacattgtctgtaccagcttcattaaaataaacaatatttgtaaaaatca

SEQ ID NO: 392572 - DNA, 1217 bp, Homo sapiens
aagcagtggtatcaacgcagagtgcccattacggccgggggaagttactgcagccgcggtgttgtgctgtggggaagggagaaggatttgtaaaccccggagcgaggttctgcttacccgaggccgctgctgtgcggagacccccgggtgaagccaccgtcatcatgtctgaccaggaggcaaaaccttcaactgaggacttgggggataagaaggaaggtgaatatattaaactcaaagtcattggacaggatagcagtgagattcacttcaaagtgaaaatgacaacacatctcaagaaactcaaagaatcatactgtcaaagacaggtttctctttgagggtcagagaattgctgataatcatactccaaaagaactgggaatggaggaagaagatgtgattgaagtttatcaggaacaaacggggggtcattcaacagtttagatattctttttattttttttcttttccctcaatccttttttatttttaaaaatagttcttttgtaatgtggtgttcaaaacggaattgaaaactggcaccccatctctttgaaacatctggtaatttgaattctagtgctcattattcattattgtttgttttcattgtgctgatttttggtgatcaagcctcagtccccttcatattaccctctcctttttaaaaattacgtgtgcacagagaggtcacctttttcaggacattgcattttcaggcttgtggtgataaataagatcgaccaatgcaagtgttcataatgactttccaattggccctgatgttctagcatgtgattacttcactcctggactgtgactttcagtgggagatggaagtttttcagagaactgaactgtggaaaaatgacctttccttaacttgaagctacttttaaaatttgagggtctggaccaaaagaagaggaatatcaggttgaagtcaagatgacagataaggtgagagtaatgactaactccaaagatggcttcactgaagaaaaggcattttaagattttttaaaaatcttgtcagaagatcccagaaaagttctaattttcattagcaattaataaagctatacatgcagaaatgaatacaacagaacactgctctttttgattttatttgtactttttggcctgggatatgggttttaaatggacattgtctgtaccagcttcattaaaataaacaatatttgtaaaaatca

SEQ ID NO: 392573 - DNA, 1196 bp, Homo sapiens
aagcagtggtatcaacgcagagtgcccattacggccgggggaagttactgcagccgcggtgttgtgctgtggggaagggagaaggatttgtaaaccccggagcgaggttctgcttacccgaggccgctgctgtgcggagacccccgggtgaagccaccgtcatcatgtctgaccaggaggcaaaaccttcaactgaggacttgggggataagaaggaaggtgaatatattaaactcaaagtcattggacaggatagcagtgagattcacttcaaagtgaaaatgacaacacatctcaagaaactcaaagaatcatactgtcaaagacagggtgttccaatgaattcactcaggtttctctttgagggtcagagaattgctgataatcatactccaaaagaactgggaatggaggaagaagatgtgattgaagtttatcaggaacaaacggggggtcattcaacagtttagatattctttttattttttttcttttccctcaatccttttttatttttaatggcaccccatctctttgaaacatctggtaatttgaattctagtgctcattattcattattgtttgttttcattgtgctgatttttggtgatcaagcctcagtccccttcatattaccctctcctttttaaaaattacgtgtgcacagagaggtcacctttttcaggacattgcattttcaggcttgtggtgataaataagatcgaccaatgcaagtgttcataatgactttccaattggccctgatgttctagcatgtgattacttcactcctggactgtgactttcagtgggagatggaagtttttcagagaactgaactgtggaaaaatgacctttccttaacttgaagctacttttaaaatttgagggtctggaccaaaagaagaggaatatcaggttgaagtcaagatgacagataaggtgagagtaatgactaactccaaagatggcttcactgaagaaaaggcattttaagattttttaaaaatcttgtcagaagatcccagaaaagttctaattttcattagcaattaataaagctatacatgcagaaatgaatacaacagaacactgctctttttgattttatttgtactttttggcctgggatatgggttttaaatggacattgtctgtaccagcttcattaaaataaacaatatttgtaaaaatca

SEQ ID NO: 392574 - DNA, 788 bp, Homo sapiens
  misc_feature (698)..(698): n is a, c, g, or t
aagcagtggtatcaacgcagagtgcccattacggccgggggaagttactgcagccgcggtgttgtgctgtggggaagggagaaggatttgtaaaccccggagcgaggttctgcttacccgaggccgctgctgtgcggagacccccgggtgaagccaccgtcatcatgtctgaccaggaggcaaaaccttcaactgaggacttgggggataagaaggaaggtgaatatattaaactcaaagtcattggacaggatagcagtgagattcacttcaaagtgaaaatgacaacacatctcaagaaactcaaagaatcatactgtcaaagacagggtgttccaatgaattcactcaggtttctctttgagggtcagagaattgctgataatcatactccaaaagaactgggaatggaggaagaagatgtgattgaagtttatcaggaacaaacggggggtcattcaacagtttagatattctttttattttttttcttttccctcaatccttttttatttttaaaaatagttcttttgtaatgtggtgttcaaaacggaattgaaaactggcaccccatctctttgaaacatctggtaatttgaattctagtgctcattattcattattgtttgttttcattgtgctgatttttggtgatcaagcctcagtccccttcatattaccctctccttttttgtggngataaataagaacgaccaatgcaggggtcaatatgactttccaattggccctgaggtctaagatgggatacctaacttctgaactgggat

SEQ ID NO: 392575 - DNA, 1092 bp, Homo sapiens
aagcagtggtatcaacgcagagtgcccattacggccgggggaagttactgcagccgcggtgttgtgctgtggggaagggagaaggatttgtaaaccccggagcgaggttctgcttacccgaggccgctgctgtgcggagacccccgggtgaagccaccgtcatcatgtctgaccaggaggcaaaaccttcaactgaggacttgggggataagaaggaaggtgaatatattaaactcaaagtcattggacaggatagcagtgagattcacttcaaagtgaaaatgacaacacatctcaagaaactcaaagaatcatactgtcaaagacagggtgttccaatgaattcactcaggtttctctttgagggtcagagaattgctgataatcatactccaaaagaactgggaatggaggaagaagatgtgattgaagtttatcaggaacaaacggggggtcattcaacagtttagttttaaaatttgagggtctggaccaaaagaagaggaatatcaggttgaagtcaagatgacagataaggtgagagtaatgactaactccaaagatggcttcactgaagaaaaggcattttaagattttttaaaaatcttgtcagaagatcccagaaaagttctaattttcattagcaattaataaagctatacatgcagaaatgaatacaacagaacactgctctttttgattttatttgtactttttggcctgggatatgggttttaaatggacattgtctgtaccagcttcattaaaataaacaatatttgtaaaaatcatactaatgcttattttattttaattgtatagaaagaaaaaaatgcctaaaataaggttttcttgcataaatactggaaattgcacatggtacaaattttttcttcattactgtacagtgatgatgttaatgactttgaagcactgaaagttactgaagtgccttctgaatcaaggatttaattaaggccacaatacctttttaatactcagtgttctgtttttttaaaaacttgatattcctgtatggtgcatatatgatacagttacctaatcatgttgaataaatgggcatgccaaaaa

SEQ ID NO: 392576 - DNA, 531 bp, Homo sapiens
aagcagtggtatcaacgcagagtgcccattacggccgggggaagttactgcagccgcggtgttgtgctgtggggaagggagaaggatttgtaaaccccggagcgaggttctgcttacccgaggccgctgctgtgcggagacccccgggtgaagccaccgtcatcatgtctgaccaggaggcaaaaccttcaactgaggacttgggggataagaaggaaggtgaatatattaaactcaaagtcattggacaggatagcagtgagattcacttcaaaggtgttccaatgaattcactcaggtttctctttgagggtcagagaattgctgataatcatactccaaaagaaaccgggagatcttggctggggtgcagaccttaccagtgtaggtcttgagccccgccctggagtttattctactggcaaccccacctttcttctcactggttttatcggcaaccgttttgtatttttcctagttgcccctcgggagactgttttcaaggccgcctttcttaccttttctgggacg

SEQ ID NO: 392577 - DNA, 477 bp, Homo sapiens
agttccccacctgcccctcattggagatgagaaaggaaggaaaaacagagctgggcttctgtggtctttgtcctgtccccaaagccctctggaaggaatagagagaaatcataggatgaggctttctactcagaccccatgtaactgcccggccaaaatgggccaaggtaggcagcatcccgctcaggtcctgcagatgctcacacaccctgctcccacctggccaagagcacccctcctgttcctcggaggactggggagtcccaacttccagtcgctcttcccttaggactcacatgcctttgctcccctccctgtggcttcgctggtgcttctcaccatacccaaagctccaccaccttactgagtcacgcatttacattgtgcagtactgctctgggaccaggaaaatgacccactaatagcttacaaccgagcatgggccaaggtatggttgtaatgcaggtgaaatgtgaa

SEQ ID NO: 392578 - DNA, 327 bp, Homo sapiens
ctcagagcccctccatgtgatctcttcagcagggtagtcggacttcttaaatggtgactcagggctctaaaaaaaaccaaagcagatgtgaccagtccttttaaattgtagtcctaaaactagcatagcatcactttgaccatgctctaaaggtcaaaatgtaataggccagtcatagatcctacctctcaacaggaggaatatcaatgaatttgcagtcatctgtaatctgccacactctctggttcaggattttcaagggggcaaggtctgatgcatacatccaagttgttctccttctgctcctctactgtgtgggccaatttt

SEQ ID NO: 392579 - DNA, 361 bp, Homo sapiens
aatggataaaaatgcaaggcccaatgagctgttgcctaaaagaaacacacttcatttataaagatacaaatagactgaaaataaatgaatggaaaaagatatttcatgccaatgaaaacaaaaaaagagcaggagtagctatacttatatcagatgaaataggtttcaagagaaaaactgtaagaaaacacatataacgtcactatataatgataaaggggtccattcagcaagaggatgtaacacccagatataaaggaaatattattaagagctaaagaaagaggctgggcgcggtggctcacgcctggtggctccgcatttgggaggccaatgcgggcagatcacgaggtcaggagat

SEQ ID NO: 392580 - DNA, 429 bp, Homo sapiens
ggggggagaaaaggtgtaagaattaagaagccaccctcatgctgtgataaacatctgcaagcttcagcaactgtcagctgaagcaatctgaatactaaacgtttttgtgtcagaagagagttacactgaaggcctttgacagtggtgcaaatgtgggaggcataaagctgatacttggggaccggatgagagttgtgactgggcctgcatccaaatgcctgctgtcaccagtgattcagaaacagtggactcacacaagagctgagaggaggtttgggccccatcagtactgaccacatcttaaaaggaaacctgatttgtggctcctagcaacctaaaatcatagactgttcaaagaaactagaaatgtttctagaaaggaagcttagggccccacataaacatcctcgccagggaaagaaactggga

SEQ ID NO: 392581 - DNA, 1989 bp, Homo sapiens
  misc_feature (1)..(1): n is a, c, g, or t
  misc_feature (269)..(269): n is a, c, g, or t
  misc_feature (1249)..(1249): n is a, c, g, or t
  misc_feature (1251)..(1251): n is a, c, g, or t
nggtatgtgaatttcacattaataaagtcataaaaaatgaattccaggaccattaaatcaggtgactgagccaatagttacaggaacatagaaagattttcacccattctgtataattagacaaattctgttactatctgtccaacagtttagcaagagtcactctgagattgaagagaggaagggaacgttggaaccaatgctgatgagccattcataggctctggctcactatatatgtctaaaattcacatgcccctaaccctcanataatgaccattaataatctggcaggagaggaaagacctgcagctcttctagtccttatgctatctcattgtctcatggatttttaatatgtctttgcatcccttagaaatttgcacttttcccccctttttccattaaaacacacctgcgtgcaaacgtccatacacacccatgtacacacagacacacacacacatgcatgcgatctgtaaaaagtcacaaaggccaaagttttaaaggaagaaaataaaaatcacctgtagtcctatcattcagagataaccactgtatgtttatttacattagttttgattacattagtttagaatgaaattttaaatacactagtatatgtaattaaaattgtatatacgttttagtcaaccatcagctgacttattcatgttctgtggactctatggtgggtggggtccaagcctccctgaagcagatctctatcctgtcaccctgctggaaatgaaacacttaggggttagaaggggatcaaggaaagtccgagagttggttgtgattatcttcagtcagaaagtgcctacttttccaagcatccagactgcaacctgtctttcctactcaaaatggtttttatggattctattcttatttggcaattgcctggactacagtcaccaacacaagtttatacgcaagaagtgcacacagccctccctcccagctcatccggtaacaatttagatgaaggatgtaaaataggattcatttcatgacccaagtctggtcaattgaaacagccgattgaagtgctgtgttgaaaaggattttgacactgcgcatgggctcgttgggaaagggtgtcatgatgggttactgattctgcggtatttttgtggacgtggggagtggtggcctacttacagtgcatcgcccactctgatttagatgagcaagagctgctgagttgtagatttctagtttctaaacaacaataagtcttgcncncagatagcctcttagcagagccaaaagccagcagagagaagactcagcatttgctttggagtaagtttgtgtgtgtatgtttatctcccttttactcatgggctcttttttcccaaataactgaggggccagcacatttggagaacatgggatttatcattgacgtcagtgccttgggagtctatgtttatgtgagcttaaaggttttggaagctgaatgacacagatcaaagtctctccactgatctgtcttccagtcctccaggggacttcttccatcaactacaaatcattgatcaaagtattggtctgtcacctgtccatgtgtaaggccaggcctaagtgctctgacagggcatgactcaatcctcaaacaggaagggggaaattgctttccgtctcctaaccctaagatcctggatggcaggtaatctgcttcctcaagattctgttgatacacattcaggactctggtttctgttttgcttgatgacaatgacccagtttctttgactaaataaatgtatagacacacattacttcttttcattctaagaatcataagtttttcaaactttagaatcacaaggtccattaaaggacatctcccctgaccttcccattttgtagatgggaagactaaggtccaagcttgaatgacctgccatcatggggataaccggaattgatacaatgtcttgattcaagattcagagctcattttttctgtgtcagatt

SEQ ID NO: 392582 - DNA, 545 bp, Homo sapiens
gccgcagccgggcagaaatatccactagtcagcactccggcgaggaactccaagaggccaagtggaggatgagagctgctgcgaagactgagtggggactgactgggggcggacttaaaaaccaggcagaccggaaggagtggaaaggcaaaggccaaggttggaggtgtcagcgtcctgctggggcgtactggagaatggctcggtggcaggtgggcgggtgggatccactactccaggcagagccaggcggcagctgaatggcagtagtgtgtgcgcgcgtgtcaaccccgctcgtctcccggataagccgcagctccgcggcagacacctgatggcaaaggtagaagaaacaagagccgggttccggagggcgcagagccacggccggcccccggcggtctcccactagtggttcgtccttctcaaagtgcagcaacttttcccaggctttgaattccgtcccccaaggccacagtggcggtacccctgccggcgtggcgacgccgcccggctcctggcgctgcacctgacgcggcggccgc

SEQ ID NO: 392583 - DNA, 364 bp, Homo sapiens
tggtggttgcatagtgattgcagatcccagcttcttctaccttccattctgaagactgcctcatggtccaagatggcaactggaaatccagccatgaaatgtccacatttcagacaaaaaagaaaatgctgtaggacgagagtctggggaagcacacaggatacgcctcccaagagtaactcatatagaaagttccctgagagcatcaccaagtgacttctgcctatagccccttggcaacccctaactgaaaagaacaggaatgcagtacatgtgctgtgcaccctgtcacatctgggttctataaatacagaagggacaatagatactgggtagtgcattaatcatgtttattttctgtatt

SEQ ID NO: 392584 - DNA, 147 bp, Homo sapiens
atagatcgagccggtaccggttcgcatgttccccaaccctctttctcatcagactacactctgcttgcccttcaaggctcagcttaaatgacactttctcagcaaaacctttactgacctcccagacaaaattagagcctgctgtta

SEQ ID NO: 392585 - DNA, 441 bp, Homo sapiens
ctgatgaaatccatggaaagaatgtggggttagaaggtggtcatgagtgcaaattctggatctgctctttactgctgtgtgatcttgggcaattaaccttttttgagccttggtttcttcttagaatgggagtgacaccttctatgattgttgtgaagattaaatataatgaagatgtaactgcctggtccctgataaactgtcacaatatgttgagacatattgtctcaacatacgtcacatatgttgagacaatatgtgagacagagtctcactctgccccccaggctggggtgcaatggtgcgatctcggctcactgcaacctctgcctcccgggttcaagccattcttctgcctcagcctcccgagtagctgggattacaggcacctgccaccacacccagataatttttgtatttttagtagagatgggatttcac

SEQ ID NO: 392586 - DNA, 172 bp, Homo sapiens
tgccttggcctcccaaagtgctgagattataggcatgagccaccacgcttggcctagaccaagcttctttaacacagagtatttctaatgcttagtaagatcataatacttgtgagtgcagtgtataacacttgcatgaagctcctcgtacgtacacaatgctgttcaattc

SEQ ID NO: 392587 - DNA, 360 bp, Homo sapiens
gtggaataagttcaatggtagacgcacgctcagcaggctttgcgggcacagcacagcccttcggccaggccggaaggtcagggaaggctgtccagaggacgccatgtatgagctcgctcttgtagacaagtaggaactagccaagcaaaactgagaagtgtgttcaaaggaagggcccagttcaacaagcgcacagagtttggtccaactggcgtgtcggggttggagagttactcaaatgtctgacctggtgggggcacagtgtgccgaactcaggaactggaccttcatgataaaggctgtgtgggaggagtgagttagggtcctagggctgctgtcacaaaggaccacacaccaggg

SEQ ID NO: 392588 - DNA, 534 bp, Homo sapiens
tcaacgctttatacttcgtatgacttccctcatgccctggcataaaggcacctttcttagaaaagccctgaagtgtgggaaaaggacaggtctcttgttattttctctcaaaccaacggaattttcattgtgattctgattatttatgtgagtctttcccactatggtaagtttgatgagggaagggtcacatttgttatggtttactgttacattctcaaagtctagaactgtgcccaataaataggtgtttcttaaatttgctgaacaaattaaatatgaattttaattatgtatatagcgttaaaacataacgatgcctttatgggcaactcgtgaagctcagtaaaagaccatccaatcatcaggattcaattgccttagctacatctccccttttgggagggaggtgggaggaggacttctcaaatggtgagacggtgtacaatatgctgtctaattctaacgtgaaggataatttgtgaaatcaatcggcttaatgtgaactaatcagttcaaaatctcagggaagta

SEQ ID NO: 392589 - DNA, 464 bp, Homo sapiens
  misc_feature (83)..(83): n is a, c, g, or t
  misc_feature (99)..(99): n is a, c, g, or t
  misc_feature (114)..(114): n is a, c, g, or t
  misc_feature (117)..(117): n is a, c, g, or t
  misc_feature (126)..(126): n is a, c, g, or t
aactcctgaccttgtgatcctcccgcctcagcctcccaaagtgctgggattacaggcgtgagccactgcgcccagccgtgtcnagttgagtttttaaanacaggaagtgaccanaanatcggattnaatgttttaggaggatacctctgaggcatctggcatttgtattagagaggtctaaggacaagctctaaaatgccattttgatacatctgtttcaacattctacaaaaattcaaattataccctagggttgagaactattggaatagtaagaagtccacacttactgcccttcagactaaaagagaaaagcaggaatctaacccttgaccctaaacaagaaagtcctggactgctgaggccagtgattaggaaaaagaacttgcaatacattgaaccctttataacttttctttattgattgtttctgttttcctttttctttatttttttttattttt

SEQ ID NO: 392590 - DNA, 1285 bp, Homo sapiens
cactgctcacaattcatagtccagggaaagaatgtccagtaggcctgatgtaggtcatgttcccatctcttgtttaggagtgagtgtgaacctgattaattgtcccacaagactgtatcccatgggggagaggtagcccccaaaaaggtaatgaggataatggatactggtaccaagaggaaaggactcaatgataggtagtcagaaatcatagattgcccatcacatccatttgctgagcatttcttcaggttgggaagcatctgatcactgatcacacaaagaaggggaaattagaaagggagattcttcagcttaggtcaggctacggactgggtgggagcagtggctggaagaaactcagtaagtttaggtcaggctacagagtgagtgggaagcagtggctcactattgtcttcctaagagagtagacctttctactgtatttctggatcacttgggtaaagttgaggcaaaatgtctcttctggttctttgtcatactgtgattaaatgatttgataaggcttttgtagctcattatagtcatgatgtattaggaagctctttattttttatagtttcaagaagttatatctggccaggcgtggtggcttatgcctgtaatttcagtactttgggaggccaaggtgggtggatcacctgaggtcaggagttcaagaccagcctggccaacatggtgaaaccctgtctgtactaaaaatacaaaaattagccgggtgtggtggcggacacctataagcccagctatgtgggaggctgaggcaggagaattgcttgaacccaggaggtggaggctgcagtgagctgagatcgcaccactgcactccagcctgggcaacagagcgagactccatctcaaaaaaaaaaagaatttatatctgttttctcgggagtcttttcctatttaatttggtagttgttgtaatttggttggcatgtaaaatctgtccctcagtattatatctatctagcagtaaagacaagttacgcaaacctgttgggtgacctttatgtgactgtacttcctggccctctttgttgccagaacttccgtttgtttttccacttacactttattgaatgggtatgctgagtcatggtgggtatcctaatctaccagcaccaatcgcaggcttgtcacgaggcccacgtaaatagcactatagtcatagtttaattaactgatcttaacattttatattaattatttcaaccattggaaacatgcctttataaaactctttaaatccccaagtttaata

SEQ ID NO: 392591 - DNA, 437 bp, Homo sapiens
cagggttggttacctgggttttctatcagtttttgtgtgtgtgtgagtgtgtttttaaacctagtataagttaggtaaagtttatttattcatttatatgtttggagacagagtttcgctctttgttgcccaggctggagcgcgatggcgcgatcttggctcaccacaacctccacctcccgggttcaagtgattctcctgcctcagcctcccgcgtagctggcattacaggcatgcgccaccacgccccgctaattttgcatttttagtgcacaccgggtttctccatgttggtcaggctggtctcgaactcccgacctcaggtgatccgcccgcctcggcctcccaaagtgctgggattataggcgtgagccaatgggcccggcatggtgtatcttactaccattccagtagcctccagatgggccctcctgcct

SEQ ID NO: 392592 - DNA, 181 bp, Homo sapiens
tatttttcatttggaaaagtcctcaaaccccaaaaatgagggcaatgaaataggatgaatatctgagtgggatgagaatcacttcttcctgggtgcaggttaccttctgatgtcccccttcttacctggtgccccagagcaccccaaccaggggggtagacagcagaactgctaaatctca

SEQ ID NO: 392593 - DNA, 132 bp, Homo sapiens
cattaaagctgagtgcggtatggggggaacctccagtgcagtctttagagtgactccatcacttcaatctgaagttttgaattttaattccatcatccaacatcttaatccttttagtcaagacaaccaaaa

SEQ ID NO: 392594 - DNA, 701 bp, Homo sapiens
ggtcttctaggatcttaaatttatttatagacatctggcactgaaggaagtttgagctaaaataactaccaaattctcaacagtgtcacgcatgttacacatgcacagcaaaattacaactagaaaccaaggctcctatccctacatttcaaatagcatttctctcacaattgattatgtattaaggcttgtcaacgaaaaggaaacttttttctctcagaatttctagaacttttttctttaaaaagttttttattctgtagccagaaaaatttaaagtttgtgctgggttgctttggttatagaactaatgaagcttgagtaatagtttcagacattctcagggtttttcttctgcagccagattttacacttctgttatctcagctgtcttataaatgtattccctccatcacacaatataattagaatgtattgatgaacagatgtaacttcatcactagagagacgttaaataaattatgtgttggtatcatgacttttatcaaatcatgaaggatgccatcacttttatgtgatagtccattggtatagtactaaagtttgtaagtaaagaatgtcagatagataacaagataacttcattttcgagatctcataacctgggccttagtatagttaaattgctatcagtctgttccctgtaatctccaattgaagtagacagttaaacaatgaga

SEQ ID NO: 392595 - DNA, 644 bp, Homo sapiens
aaaaaaaacggaaatggcaaaggcccaggcctagctcctgggtgtccctgtaagttaggtttggtaggcccaccagaggcctctccttaaaggagaacatttagaagctgtgcccactgttggacatttttggccatggtttatctgggcaagggaggggactgggctgggggctttcccagagcccctgccatcagaggctctagaaaggactttgggagccattaaagcatcttcaattgggaagttgtagtgtgtgtgatctggctgctatggggagacaaactgtgggtttgagggcaaataaacggagaccaaggtagaagcaactggactggtctaggtgagtcctggcagggcactggaggcagtggaggttatgagatgtggctgattctagagtgttttggaaatggtatatatggaccttaaatcaagagcttaagggtaattcggatcacattagccatgtaggtcacgataaattgttaatttgtagagattttggtgccttaatgtcagcaagtgttgcacaatgagtttctttttatttattttattttatttttttgtgatggagtctcttgtcatccaggctggagtgcagtggcgcgacctgggctcactgcaacctccacctccca

SEQ ID NO: 392596 - DNA, 780 bp, Homo sapiens
ggaatttaagaacaacaacataggtagcagaagagatagctatccctgattattttgtactagaactttaaaatagctgaatttttgtgaaaccccccatggtgagaaaccaaccttgcttctcactccttaattactgttttagcatagcttatttgaaaggtgtatccaaaaatatgttttcctgataccatgcttgtgttattttttttaaatattactaacacaagctgctgtttttatttctaaagtgtagtgttttgtccttttaaagtacatcttcaataaataactttatacttgattttgtaatcaaagaaaaaaaacacacacacacaaccaagaattaaaacacagaaggggccagggtagggtagttcatgcctgtaatcccagcattttgggagggtgaggcaggaggatcgcctgaggccaagagttccagaccagcctgggcaacatagcaagaccttatctctacaaaaagaaaaaattcgccatgcagagtgggatgtacctattcaataggctgaagtgggagaatcacttgagcccaggaggtcaaggctgcaatgagccgtgattgtgccactgaactccagcctaggtgacagagtgagattctggttctgaaaataaaataaaataaaataaatcacagaaggaataaatgagaactgaaattagtttctgtgaagtgactgatggttctgaaagtatatcttaaacactattaatgaatggttttatttttcacatcaatttttgataacttaagaa

SEQ ID NO: 392597 - DNA, 301 bp, Homo sapiens
gtacgcttacatatgagtgcccagtcagtattactccggaaccattggaaataattttcgactaacttcctcatagcccaggtttggtcctaggcacacagacagcatatgatgaatgttagctatagagattccagggctaaacagttatgtgcaacctgaattactaaacacagtgggaatctcctcaagtgggcccggaaacacagtgggcacaggtctcctgtgtgcctcttccagtaccctgcactgtagctgggcaggtgttaagcttcagggggcaaccatccctctcttcaga

SEQ ID NO: 392598 - DNA, 282 bp, Homo sapiens
ttgtttgggaaagtatataaagtggcttccaggaattcacacaattaaaataaggaaataggggctacatggaggaaaatgggggtaaaataaaaatattaggaggagggtttttcaaatgcagatatgtaagccataggatcctacatatgtcctacaatttggctactagcttctggtagccaaaggtaaaagatgttattgctgatttaatttgtgttgtttgtcagggaaaaagcaaacaagttatgtgggaggaattatggttttactgcatgtagt

SEQ ID NO: 392599 - DNA, 432 bp, Homo sapiens
tgggcctccttggaagcagacccaccagccccagttgaaccttcagattagggcagccccagcccacacccatctgcagtctcatgagaggagagaatctaagccagacttcccattcaaaaagatccaaaatttgcaacctacagaaacagagacaatacatgcttattgttatttcaagccactaaattttgaagtaatttgttcctcagtaatggcttctaagtggaggaactgattcctccactaaccccacttggggtttcttgttgcctctccagtgtgccagtgtgaaaaatagcaagataccttgggcttctgactcaaacagtaagaaaaaaattgtaatttcacataacaagaattcaagatgtagagagcatctagggtagattaacaaagcagcccagtgatctcactcaggccccagat

SEQ ID NO: 392600 - DNA, 378 bp, Homo sapiens
  misc_feature (115)..(115): n is a, c, g, or t
  misc_feature (189)..(189): n is a, c, g, or t
aagcaggctaacctggtaacgcgacggcgatccgacccgatacgctgcatctattctcacgcccagatcctgagggctgtgagggtccttagtcactctttttgttaattcacantgcagtacccttggactcagtgcccccagggaaggggtgcccacggcaagggactcaagtcagatggttccccncaaagggattcgagttccccttgagacacaaagttcagctctggccatgaacatcctcagtgacccagtgacccaggggcagaataaacaaccttctgggacaaacccactctaaggaaagagatatgactcctgagttcgagtgcagttttgctgttgaattgctgtgggacctagcaagttactgga

SEQ ID NO: 392601 - DNA, 223 bp, Homo sapiens
ccagtgtatacagagcatgttctgagaaacttatacagaaaacagaagtgacctatacacgctttcatttattttgatgattaatttttaaaaagtggcctttctgaggcaagtctataatctacaccctaaagaagtcttctcaagtgacagggaacttcaaactcagggcaagcaagttttggagaatgactgcctcttcacgattcgggctctggtcttc

SEQ ID NO: 392602 - DNA, 356 bp, Homo sapiens
tgcacatgttctttgtttcttatcccctctttttctgctttctctggttttatttgagtattttctctcctgttttagcatatcagtcatacttcagaatttttttagtgattgttctagagtttgcaatatacatttttaactaaatttagtgtttaaatgacactgtattgcttcatgtgtagtgcaagtccctcagaatattctcagttcatcctttttgtcccttatggcatggctgtcattcatctcacttatctatatgctataatcatccagtgcattattattactttaaacagttgtattttatatcaattaacaataagaaaaataattgatattatgttatcttc

SEQ ID NO: 392603 - DNA, 373 bp, Homo sapiens
ctgcctcagctaatttttgtatttttagtagagacggcgtttcaccatgtgggccaggatggtgtccatctcttgaccttgtgatgtgcccgcctcagcctcctaaagtgctgggattataggcgtgagccaatgcgcccggccatctgatttatggttgataaaatactataatgtattttaaacttagtaagtgttacatatgttaataaaagtaagggaaaaaaacctaactgggtaagtgtgttttattcctgtggctaagaataaaataaaaggacttaacgattattattttcttttggctgcagaaacccttcagtagatcttcttaagttaccttgggtaacaggatataattatacccttggtc

SEQ ID NO: 392604 - DNA, 341 bp, Homo sapiens
tactaaaaggccaaaatggttctctctctcatgagtgggattggaaatatttttttcttatctgtgctttctatagctgtcctgaataaatgtcacaatcagacttggaagaaacactgtccttggcaaagaataattcctactaaggataggcagtttaaggctcaagccctgagctatttctgctgagcccccatgggatcagagaggaaaattcagcaccacagagacctggctcagctcagcaggcagctgggtcctcactatggtccctacctggcccccacctgttggagtggctcagttcagagaaaaacgacacatcctgcgctctcttgtct

SEQ ID NO: 392605 - DNA, 634 bp, Homo sapiens
atggaggaaaaatgatcgattataaagcaaagatggaaaaagaaaagaactcagcaatgatgcagaataatctgtatggcctctaccaatgtctcaaagtgtaaaatatggagaacttgtcatcagaatctcctgagatattagttcaaatgcagaccccctatttcagatctatggaatctgaacctgtaaacgtggggctgcaaaactcatttttaaaaaaatcctgttttgagacttgcagctagagagaaagatttacaattacatttcatctaacaaatccagggaaaaacaattactttgatctgaaataacactcagctttacattcttgataggagcctataatattatacaaactgagtagaagctcacatgttcacatcacattttgtaaaataaacttacttacttcaaagtagaataaatatatccagcctggacagtacagtgagacctcatctctataaaaatgaaaaaaattagttgggcatggtggcacatgcctctagtcccagctactggggaggctgaggcaggaagatcacttgagcctgggatgggaaggctgcagtgagccaagagcacaccactgcattccagcctgagcaacagagtgagaccctgtctc

SEQ ID NO: 392606 - DNA, 487 bp, Homo sapiens
atggaggaaaaatgatcgattataaagcaaagatggaaaaagaaaagaactcagcaatgatgcagaataatctgtatggcctctaccaatgtctcaaagtgtaaaatatggagaacttgtcatcagaatctcctgagatattagttcaaatgcagaccccctatttcagatctatggaatctgaacctgtaaacgtggggctgcaaaactcatttttaaaaaaatcctgttttgagacttgcagctagagagaaagatttacaattacatttcatctaacaaatccagggaaaaacaattactttgatctgaaataacactcagctttacattcttgataggagcctataatattatacaaactgagtagaagctcacatgttcacatcacattttgtaaaataaacttacttacttcaaagtagaataaatatatccagcctggacagtacagtgagacctcatatcgggacctctagacacctcc

SEQ ID NO: 392607 - DNA, 661 bp, Homo sapiens
gctgtgttcgattacccaacggtgccgcttttacttttaataagactttactattttttaaagtaggtaatacgaatacatggtacaaaattaaaaataaacagaaggttaaaaatgttaggaatcctcccatacaaaagtattttaaaactctgaaaactttagctagtttggaagcagagattcaactgaagtctgtgttgaagtgctaaattcaattcacatgaagaccacagctatgctgctaagtccttcaaggcagcaggcaccaagtagaaccaagttagccatcgaatgcagtctttggcatagccaggtcataacacatctctggagtcaactaagataactttctgaagtacagtacaattttgtttatacacatctttttaaatttctagaaaacccagtccatttaattgcttctccagttcttggttttctaagggggagagaacttatcacgagagtattttgggtgcaggcgcacagacatactaacacccatatactacatggtacctcttaatttatggctgtatttacatttttgtttaaaaaataagatcttgaaattttgtcccagagtatatgggaacttccacatatcctaaccacctttactatcagataataaagctgaatacggtcatgtttctca

SEQ ID NO: 392608 - DNA, 331 bp, Homo sapiens
  misc_feature (142)..(142): n is a, c, g, or t
  misc_feature (196)..(196): n is a, c, g, or t
  misc_feature (285)..(285): n is a, c, g, or t
  misc_feature (295)..(295): n is a, c, g, or t
  misc_feature (319)..(319): n is a, c, g, or t
ggttgccagtgatctcctttcttatcacctatagacagcttgcctacaggaaaaaagaaagccaaacacagacaagcagtatgagatacaatgagcgcccttgggccattaaaatatgattgtgtgcccaaggtcgcctggnctgcaaacagctctccagaacctgcagccagcacagaccaaagtcaggtttgtntcctcttctgttgatgaacaaaggttgattccatatcgtggctattgtgaatagtggcagtaaacatggcagtattgtatgaaaatatnacagattagnccctttaaatatgtgcactatggntgatctatcaaa

SEQ ID NO: 392609 - DNA, 465 bp, Homo sapiens
caccccctgcctctctctgggtatcagcaacatcctttcaggcaggctccaaacagcttcctttgactcccaagctctgttttcagtcccaccttgaaatagggataaacagacctggtttctggattctgggaaagggctcttggtggcctagcttagatagttgtccatccctggaccaggaccttggccattttggatgtctacccatacccaatctgagatggagtgggacagggcttgtagaagatgttagctttccctcaaaccataatgtcagagtgagtgaaggagcatttctagaaaagagaggaagagatatttggtaggaaaataaagccccagaggtgagtgggtgagtggaaggagggatgcatgcctcctcaggaccaggtgctgaggtggcagaggggagatggagagaggggagaaggaaagtctcagccttcctggaactcacagtct

SEQ ID NO: 392610 - DNA, 284 bp, Homo sapiens
ggccagctgcgtaaggcacctggtggtgctctaggcactgggttagcgtcccttatgccgagctctaaaccttcagaatgcccttgccgcccctggctgagttcacagtggctgaagctgttcccataagaccctgaatctagcagccactgtgtactatacctggagcagtccaactgggtggactgtgctcagcatccgaacatctagacaggcagaggtttcagtgaccttggactgtgccactgcattccagcctgggcgacggagtgagactctgtctc

SEQ ID NO: 392611 - DNA, 578 bp, Homo sapiens
cctgtaatctcagctactcgggaggctgaggcaggagaatcacttgaacctgggaggtggagggtgcagtgagctgagaacgcgccactgcactccagcctgggtgacagagagagactccttctcaaagagaaaaaaaaatcactcaggaacgggccttatctaccacccagttttcactggagggtcactatgtgactgaagcccttcctgggaaagggaggagacacagcagaagattcaagtggggactgtctacaacataaccaggtgggatcttcaaacatggtaactgagcagaactagtgtgatagcgagcccagccaccagaaatccctacttttgtgaaagttttatcctgccttagctattgagcaggacacttcttgggtcagtgcgaagatgcgactctaaggaggaaatgagtccagggggaaatagacacagacatgggcacattccctctgcccacaactgggacagatcctcctcctcaccttcagtatctctctgctcctactctggggtgcagggaaaagccatcacagcagtggaaaggctgggttttatttgaggtt

SEQ ID NO: 392612 - DNA, 356 bp, Homo sapiens
ggatgcatacccttcctgaaatgactcccttctgaatgaatgacaaagcaggttacctagtatagttttcccaaacttcttcccatcatagcacatgtagaaaataatatttttatggcacactgggataaacaagcaagattgctcacttctggaagctgcatatgactagaggcctcttgtgactggaggtaacaaccctgcccagtaactgtgggagaaggggatcaatattttgcacacctgtaataggccatggcacaccagccaagatgctctgctcacagtcagtatgtgtgaagatccctggtgcgtggccttcaccacgcatcttgagcaaattaggaaaatgtacc

SEQ ID NO: 392613 - DNA, 535 bp, Homo sapiens
gggttgattagaacagttttactcttgaattcagggtagttttttgtaagagtgaactacattttcgttaaagatgaaacaattctggatgaatatttcaagatttttctatagaaatagtattgaaaggaagatagaataatgttcaagcaaaaaccttcctcagggtgcttttttttttttttaaacaaccatattgaggtataattgaaatccaatgaattgcacgtacctagagtatacagttggatcagttttgacatacacagttgtgaaactatcaccacagtgccatcactctcccagtttttttggtacctgtttgcaacacatccctttcgttatccttatctctaggaaattattggcctgctttctgtcactatcaattagcctaccttttagacaattttataaaatggagtcatgtaatatgtacttttttctacccactttcagcatgattatttgagatttattcatattattgcatatatttattccttttttattttatcatttgtttatccattca

SEQ ID NO: 392614 - DNA, 310 bp, Homo sapiens
gaggaatggtattttattctagcatgggcatcgaagaaggtgtctctaagaatgggcatctctaagacatctctgaggatggcatctctaaggatagtatctctaaggatggcatctctatggatgggcatgtctaaggatggatgtctctaaggatggcatctctatggatgggcatgtctaaggatggatatctctaaggatggcatctctatggatgggcatgtctaaggatggatatctctaaggatcgggctactttcgctacatcacagtgaggagattgtcccaccatcgagctcctctgaca

SEQ ID NO: 392615 - DNA, 424 bp, Homo sapiens
cctataagagactgagaatgctatccttatcaaaattccagtggcatttttcacagaaataggaaaactatcctaacatgtatatggaaccacaaacaccctgaatagccaaagcaacgttgagcaaaaagaacaaagctgggaccaggcgtggtggctcatgcctgtaatcctagcactttaggaggccaaggtgggaagatcacctgaggtcaggagttcaagaccagcctggccaatatggcacaaccccatctctactaaaaatacaaaaattagccaggcacagtgacaggcacctgtaatcccagctactcaggaggctaaggcaggagaataacttgaacctgggatatggagcttgtggtgagccaagatcatgccactgcactgtagcctgggcaacagagtgagactccatctc

SEQ ID NO: 392616 - DNA, 230 bp, Homo sapiens
gcggccgcctactactactactactgctcgaattcaagcttctaacgatgtacggggtcatgcctgacctgatgaaaacacccttaaaaaatcaaccatccagtagtccaaagccaatttcaaaactgctttatttgcataagcaatatttagaaccctggataccaaagatccacatcattgccagtggagaatggcttttttgccctctatgctggaacaataaaaaa

SEQ ID NO: 392617 - DNA, 488 bp, Homo sapiens
caaacagacaaaacactgaaaaacatgtcactgaaatggagaaggaaaatgccagctctgtcgagcttgtatgagaagaaaagggaggtccaggctttgccacaggattaggaataaaagcagatgaaaggtgggactctatccaggaacaggccgtattgaaagggaattttatcaaaattgcagtaaacagttgccctctcttcagccttggaaagaaaaaagagagagagagattggagtgttacctacaagggtgagagttgatttttcttttaacttttcagctaatctgtcaccttctatgtaataaagggctgaaaaataaaaatctatcaaacacctgattgagagaggagtctgataaacgaagctgaactcactgctcctcagaaaactgcaaatgaacacaaccagaagccatttcttacccatcagattggaaaagaaaatggtagtgggtgagagtgtggagaattctcacgccc

SEQ ID NO: 392618 - DNA, 398 bp, Homo sapiens
tatctccagggtgttggcctcttgtgctaatttaagaagagtgaagttttttggaaatttgagaaaatggaaattcatttcttatttatttattcaatagaaacggggtttcaccatgttggccaggcccctgagaagggaaattgtcttgccatcgctaaaacaagattggttcttgaagagagtaatttttcccttctatagccttcactttttatgccacttgcagattttcttggactgtatttgttcttctgcctcttggtcaggaagtttgagtttatgatttggtttcccttaagctaggtgcagacatgagccctgaactggaggcagagataaagggtttgtaatttacttatgttcgtagggtaaggtgtgtggagtagagagcattc

SEQ ID NO: 392619 - DNA, 502 bp, Homo sapiens
cgtttataaaaattgtggctgtactaaacatacacggtgctgtggtgactgaaagcagatgagatgcagcctattttgtgtgtaccttgcagatatgcagcctccaatgatgatgtgttatggggaggtcacaaaatatacgtgaaatctacaaggccgagcagcccttggctgatacctattgatcatatttttccctctgcagtttatcgtattcatgattcaaaggaacaaaccaagctggccaagagagtcttccaaagttagtaaaaaagattcaatctgtgagacataagtttgcctccctctttttatgtatattaatgccatactgccgaagcacctggctgttgaaatgaaagtgagccagcatatggatttaacagatttggaatcctcccaaacaagcattttcttaccaagtcaataagagtaaatgcaggtaccaaagggaacctagaataaagacatctaggataaaacaatacttaattcttgagaa

SEQ ID NO: 392620 - DNA, 237 bp, Homo sapiens
ttatatgagggcagtgatctgggaagtatccaaaagcagaggtatcaactatcaagaaaaaatgatgaaatatacttatttggggggctttatagaaaggaggaattctgtgctacacctattatatatctaactcaaaagtcacttattcagttccttttatatgcaatggactatgcttctaacagacttttcagccacatgcaacaaaaaaccaagtaggaaggaccaaggaga

SEQ ID NO: 392621 - DNA, 598 bp, Homo sapiens
tcaaaatccatgcatactcaagtcctgcagccagccctgtgaaacagacatatacaaagaaggctccacaccaacctatattatatgtgagtatcaaaattcatattttcaatctgcctttagttgaaaaaaatgtatattaagtggacctgtgagtcaggcatggtggcacatgcctgtagtcctagctaccaggaaggctgagatgggagaattattggagctcagggttttaacaccagcccgggcaacatggtgagacacccatctcaaaaatattttttaattaaaaaatattaacaactggtggggcgcagtggctcatgcctgtaatcccagcactttgggaggccaagacaggtagatcacgaagtcaggagttcaagaccagaccagcctgaccaagatggtgaaatcccatctctactaaaaaatacaaaaaaaattagccgggcgtggcagcatgcacctgtagtcccagctactcaggaggctgaggcagaagaatcacttaaaccagggaggcggagactgcagtgagccaagatggcgccactgcactccagcctgggcgacagagcaaaactccgtctcaaaa

SEQ ID NO: 392622 - DNA, 614 bp, Homo sapiens
gttgtccaccctcgcccactcaacgctggaactggatgcagagcacctggatggccagtcccagagtgtctctgacactcccagtcacctcatcccttagaccaggataagatgcgggatcccaacctcgagcctcccatgggctccattccatgtgctcccataagccactgggcccacctcctggctccagggctgtctggccatttggcatcttggtttcctcatctgtacaatgaaaataatagtcccagccttctcgaggagttacaagatgcctttcgtgtgaaaaactgggatttggtaccagactatctggatttgaattttggccctacccctcctaacctgtggctttgggccaatctggcctccctgtcctcagtttccccatttatagagccatctcattgagttgctgggaggatgaacataaggaagtgtactcatgtgcccagagcattgtgattttacttattattaccaaacgaggcacacaataagtgcctaatagatgctcagtgtcatttcacggattctgtgtgccttgtgtgtctccagcagccaagctctggaggtggggaagctgttgacgagttgcacgaggtaattag

SEQ ID NO: 392623 - DNA, 116 bp, Homo sapiens
aaattatctgtcttttgaggactgacataattcttttgtggactgagcctaggttgattcttttaaagaggtaattcaaagacaactttcctgttcttccccgtggcattttctct

SEQ ID NO: 392624 - DNA, 136 bp, Homo sapiens
tctgatcgtcatctccaagacctaatgatttgatgacctgtggagccattcaaattcacttgctttgggttgcaagtgagtcctttctcacggttaaccttgccttgcaattcctgggttatggagcctggcaggg

SEQ ID NO: 392625 - DNA, 827 bp, Homo sapiens
gccatccttggccctaggtggactttgacacaaaatgaaagttgagggaaaggattgaggggtggaggggcaggtttaacgtggctggtagcttactagctgttccccagagagggccccatgtccccgctgtgcccatggtgcggcagttcacctgcctctccagatggccctttggacagcccattccagagttcagaaggtggcagcagatggagctaaggcgcatctgggattgcagggtttcggctattctagagaagatggtaatgccctgcccctcccttctacccccttcttggaagagggtcttcctccttaatgaagctaattgacaatgtgcattttttcctggaagcttttgagaattgccaaggctggtaaatataatcctgctattagggggggaaatggcccgtaggaatgcttagatcaggagcctggatgcagcagagcaggagatttgtgagtttttcagcaatgtctgcctgcttcccagacccaactcaaaacaagaaaggatttgttcgtgtaattagaaaaggggtctgattacggggagggatttttgcctggggtcatatgccttacgctggcccattagggttggcaattctaggtggtctggagaaatcagaccccatgccaccctccctggttcaggcaggagaggagttgcagaggtaaatatgaatagatgcctcttttgaggatagacagacttaaaagaaacttttcgagaaacatcagggaaattttatgccccaattttttaaaacagaattatttcggtgactttgcaaaagcccttcaaaaaaatctgacag

SEQ ID NO: 392626 - DNA, 750 bp, Homo sapiens
catatgttcatataatattttctatacttagagaatgctcattgcaaattcaacaaaaaaattattaaaaacccttcagtgaatgataaaacacagcctataaacctgctcctggtgttatgattttatatcaccttaggaaatgctgaagcaaatgtaaaatcagtatgttcagctcagtttttattttatttattaatttattttgagatggagtctcactctgttgcccaggctggagtgcagtggcacaacctttgctcacagcaacctctgcttcccagattcaagcgattctcccaccttagcctcctgagtagctaggactacaggcatgtgccaccatgcccggttaatttttgtatttttagtagagacagggtttcaccatgttggccaggctggtctccaactcctgacctcaggtggtccacccgcctcagtctcccaaagtgctgggattataggcaagagccaccacgcccggccctcagctcagtttttttgttttcttttctccccccgcccagcatgatcttggcttgctgcaacctccgccccatccccctggctgaagcgattctcctgcctcagcctccagagtagctgggattacaggcgcccaccaccacgcccggctaatttttgtatttttagtagagacgggtctcaccatgttggccaggctggtctcgaactcctgacctcaggcgatccacccgcctcagcctcccaaagtgctaggattac

SEQ ID NO: 392627 - DNA, 287 bp, Homo sapiens
ttctttgggaagagaagaaggggaatgttgggagtgtttgctgaggctgtcggaggaagcgaggctagagctgatccagtcccatggtgtggtggggacaagatggaggagagtgttcagcgcagggaagagagtctgtacaaaggcattctgttttatgtttttaagtgaaatgtgtttgttttactttcttaaaataataagctatctaggcttcatatgtgttaatgtatttagtctgaataaaacaacttttaatcatctgatatgatctcatagttgaacta

SEQ ID NO: 392628 - DNA, 259 bp, Homo sapiens
gcagattacatagtggaggaaacaaaaatctgggtgcgctttgcttgccctcactgttctcacaataggtgctccccggctggccaacgcgttatccatatggctttgtctccaaggctccaaaaattttctgacagcaaatagtatattatgtccactcaaactttggtttataatgggtttattattccatatcacatagtaatttttttttttatttttggccgggtgcggtggctcacacctgtaaatcccagca

SEQ ID NO: 392629 - DNA, 500 bp, Homo sapiens
caaggtcacttttcccatctgaggaaacgtttgtcgtgtgctccgaccgaagcgttggcactgacccgtctagaattctgtgtgcggagtggaggtgagatgctgaggctgtgcctcagcctatcttgggtccccctctgcctacaggcagtgagtgtggcctgggaggcaggtggccctgtggggtgactgagctgggcgttgtcctttcctcttcctggtgtgtgtagcgagcctggtcagagcatggcgtctggagtcaggcggcctggctacgggtcttgggtctgccactcaccagcctggtgtgggcagccattttagcctttctgggcctcagcgtcctcctctgtggatgggggacagtgcctgagcgccgggggctgcacatggtgcctgtctctctgcgttcttagtggaggtggcccctgtggtggtccctgttgatgccgacctgctagcctgctccatgctgtccaggagagtactggggccttgcc

SEQ ID NO: 392630 - DNA, 737 bp, Homo sapiens
ggatctccacatttaagcagtgggtaagggagtcaggtataacgctttaattgaaagtcaggatctttaagaagttataatatctgatgtggaaaaaaaactgcagccaactttattgaagtaaggttgtttaggatgcttgctgtttattaataattcaaccttattttctatcaaacagtatgattttgtttagtatttgtgattttttaattttattttattgtatactaacaaaatataaaaattcaggccagtgcagtggctcgcttatgcttgtaaaccccagcactttgggaggctgaggtgggagaatcacttgaggccaagagttcaagaccagcctggccagcatagcaaggacccatctctacaaaaagtactaaaaataaaaataaaaatattagctaggcatggtggcatgagcctttagtaaaggcccagctactcaggaggctgaggtgagaggatcgcttgagcccaggagttcaagactgaagtgagccatgatcaccactgcattccagcctgggttgacagaggaacaccttgtctcaaaaaaaaaaaacacaacccatacaaaaaaaaaacattttttggggccgcttggggccctggaaaaagttttcttaaacacattcgcttttggggccggggccccctggtgttcggccaaccggggccacaggtggtcccaagggaagacccgggcggacaaaggggtttggtttttccca

SEQ ID NO: 392631 - DNA, 500 bp, Homo sapiens
gtacgcatctaacgtgtatttacgtgtatactgagttagggtgtacaacttttccctgaggctgtatctcaaaaactttggaagctgaagaatttgtccaaatctatgttcctttttgtttgtaaatcacctgatgatggtgatatagctgtggccaacgaaatgtcaagggaagtctgctggggaaggtagacgtaggataggagtatgggaaaaaattattcactcaaaagcatgatgcacagaggagctatgatcttttcttgttttcctcactggatgttgtcatgtctgtatgtacttcctggaactgtggcaccatcttacaaccatgaaaggagctcacatgaaatcatgttgaacatagcagagcgggaagatggaaggaatccgagatctatgtttgatgttaagcgatgatgttaaaaacttaaaaaactccagaactctcttacccctgggcttgttataataaaaagataataatcctcttagtgttt

SEQ ID NO: 392632 - DNA, 353 bp, Homo sapiens
aaataaaagacttatatacagggtactcctaggtagcagcaggacagctctagagatcctcgccacctcccatcgctaagctgcttttaagctaattttctggctctttgcctactatgtgtgtgcacgatgggactgttttccttggtagtttctcagatcttctctgggatgttggggttctcagggacacctgttccttggctgggcaccatggccttggctcactgcctagccttcagggtttaggcagcagacatacacccttaagtaaggtaggtgacctgtcacatttcaccccatgtcaaagaggaaacgagtcagataatttgtggttgtcctaagattttggt

SEQ ID NO: 392633 - DNA, 571 bp, Homo sapiens
gcatcaacgatggcaatagaaactccaccatgaccaagtggaatttagcccaaaaatgcaagaatggttcagtatacacaagtcaataaatgtcatacatcacatccatagaataaaggatgaaaaccatatgatcatctcaataggtatagaaaaagcttttgataaaatttgacattgttcatgataaaactcttaataattaggtatagaaggttaatacctaaatatataaaggccacatatgacaaacccacagctaacatcttactgaatgagggtgaaagctttttctgtcagaagtggaacaagacaagagtgtctactcttaccacttctattcagcatactactagaagttctaaggagagcaattaggcaagaaaaaaaaaaaggcatccaaattggaaacaagtcaaattgtccctgtttgcagatgacataatcttatatgtagaaaaaccagaagcatatattcaggggaagttgaatctgtgctctcaggaaataaaatgttattattaaaaaaagacataagaaaaatctaaagactgtaccaaattactcttat

SEQ ID NO: 392634 - DNA, 481 bp, Homo sapiens
atgcaatattttttgtgctgtgttgttagagatacacaaatgtaatatttgagaatgtgacataacaaaatatttcttaactgtgatattgatgaaaggttgaataaagaggacatctggaaaacactgaagaaactttagttctagacagtagtttgaggagacctttgactctaataatagccagtggtaggatagaggacaaggtagatgtcaaaaaccaacagggcttggtaacagagggattttaattagatttgtttatttaagatggtaattgaagaaattgagtcaatgacagaaatagagtaatgccaaacacaaggatttgaataacagctaatatattaagaatgtctatgtccttatttattttcaagtgaaaacaggaaatccaggtaaaattttcccatggccagttggaagcattcaaggttgaattagaaatcagggtttgagctaggtgcagtggcttacacct

SEQ ID NO: 392635 - DNA, 746 bp, Homo sapiens
acccacgcgtcgctttgctcctcctttggcttccgcgatgattgtgaggcctccccagccatgtggaactcacttctccttcctgtcaccatgtgaagaaggacgtgtttgcttccccttctgctatgattgtaagcttcctgaggcctccccagccctgcagaactaaatccaaagaagccactatgctgaaaatactttgagtgggttagagtttcgctcaaggaagtgctgtagtagaaaatggccatttctctgtgctgtgttcagagtaagagacatgggtgaaagagttatccggaatggaatgctgaggagaccctaaagggaatttccgggtggatggccagcactgtcactcgatgagtggaggattgacaaacttgccaaatactgcaagaaaagatgttgctgatcacggataggaaatactccaagtcccaggagatagtctgttcttaggagacttccacaccaagtctgctgaccagagaaggaccagtcaaccaccacactctccgctggagcccactcagcaccagaaggaaacagatggaaaaacctagacttgctcccttagatcagtgctattatcaatatcatcctctgagagacaaagctgttaaattactttgcccagatgacatggccagtgagtatggagacagaccggaaattaaggctctgttctagattctcggaatatagcagtgaacaaaacagataaaacgtgcctgcccctgtgg

SEQ ID NO: 392636 - DNA, 255 bp, Homo sapiens
tataacttgtaaacaaatcatagttacatctacaattggcaaactatgtttttcagcataccattatttttttctcctgctctcctctacttacttccttctctatcccatggggttagaaattactttgaacagattggtgaataagggtaatattccacaagctacagcatccactctttttatggtttggattttttttctctatctctgtatctctatatacttctgaaatctgtaattcttgtgtgtttt

SEQ ID NO: 392637 - DNA, 598 bp, Homo sapiens
ctagagcatacccctagggaatggtggtgaggaatcatcagcaggggggtggaactgaagcatttaatcagggcagtgctgagcagagaggagggctgaggaatggcctgtggggcattagaaagtactaggtgttgtgaagtaaagggaaaatactggtagctcccatttagcttagagtgtcacccataagggaaatccttgtttgacccactgtgttagtttcccagagctgccataacaaatcaccacaaactgggtggcttaaaacaaacagaagtttattcttgcacagttctgcaggatagaagtttgaaatcaaggtgtcaccaaggctgtgctctctgaagaatctaggggagaatctctcccatgctggtttaggataaggaatatcttatcttggttcccagtttctggcacaaagcttcaaacatctttggaatatcttcagtgataggagtgtctttattatgctaatatggtgactcataatggggcgatagaaagcttgaggatgagggctggtcaccagaaaggacaaccatgtgacaaatgggttagaactttgagtcaccccaacttctggggaggggtc

SEQ ID NO: 392638 - DNA, 492 bp, Homo sapiens
gatcctggctgtattatcagctattagataacacaattttaaagtgcctgttgccctctggacaccgaagactcaacatttattgcttgagcattgcctttgttttgaatatggctttgtaaagacaaaaatccaggctgggtgctgtggcttatgcctgtaatcccagcactttgggaggctggagtgggcggatcacttgaggtcaggagtttgagactagcctggccaaatggtgagacccccttctctattaaaaatacaaaaaattagccaggtgtagtggcacactcctgtagtcccagctactcaggaggctgagtcagcagaattgcttgaacccaggaggcagaggctgcagtgagccgaggtcgtgccattacactccagcctaggcagcaagagcaaaactccatctcaaaaaaaaaaaagacaaaaatctgagctcttcttttagaacagaggagagtaatactctaagttatgatcatt

SEQ ID NO: 392639 - DNA, 387 bp, Homo sapiens
atgacttatcagcaacaactgatccaaatgaaaactgagtgatatagtcaaagtatccatccaaaatgttattatttgccatagtatcaattaggagaaagaacaaaataagaacgtttaaaatgttcaaaccctgagtctattacacacagactttcattaaaaggcctataaaagggtgtatttaaacataagtgtgagatatgaaatagacgaaacaataatgaaacacacaggaattcataaaatatgttggtaaatttaattaaacatctccctttaaaatctgatattttcgtgttaaagggcaaactaaaattctaaataataataacaaaaaatagcataagtatctcaatgcctaaagtccttatccatggttggggg

SEQ ID NO: 392640 - DNA, 221 bp, Homo sapiens
gtgcctgtagtcctagctactggggatgctgaggtgggaggatcttaagcctaggagttcgaggctgcagtgtgctaacaaggtgccactgcactcctgcctgggcaacagagtgagatcccatctcttaaaagaaagacagaaaaggtaaaagtctatgtctactttacttgttgccttaaaaaatatgaatcccaggaagagggctcaatgtgaaacac

SEQ ID NO: 392641 - DNA, 563 bp, Homo sapiens
ggatggcttacacaacaaaaattggtttctcacagttctggaggtgggaagtctaagatcaagatgccagtcgggttggtgtttggtgaagactctcctcttgggttgcctacatcctcttccttgctgtgttgtcatgtagcagagagagaaagagagcatgagtgagctctctcgtgtctcttcttacaatgacgttactcctattggattagggacccactcttaggaccgcatttaaccttaattacttccttagaggctccctctccaaatactaatgatagggcttcaacataagaattttgggtgtatgcaaacatttggtccattacagtcatcaacaacaaaaacagaatacctctattttacgtataaggaagtttaaaatcttttgtttaatgagaaagtgggcaagaaaagtttagcaactagttttgcttaatcatcagctacagaaactaatttaattatctagttataataaattcacacagggatttttgtttgtttttgagacagttctcactctgtcacccagactggagtgcagtggtatgatc

SEQ ID NO: 392642 - DNA, 253 bp, Homo sapiens
gtgtaagagcagaggaaagacagtttgagtgtttttcctacacaccagccaagtgattgttagcttggaggttagaataaaagttctttaagcacgaaaggtctcaagaaattgaggccaggcacggtggctcatgtctgtaatcccagcacttagggaggctgaggcaggcggatcgcctgagtccaggagtttgagacaagcctgggcaaggtggcaaaactctgactccactgaggagactgaggtgaaa

SEQ ID NO: 392643 - DNA, 101 bp, Homo sapiens
caattcagaggagtctcctgtgcttccaagaagtcctagtgaaactgagctctactgtctatggcagtggcctcatttgagtgccctgatattggctttct

SEQ ID NO: 392644 - DNA, 576 bp, Homo sapiens
gtgactggtctaagagaaaccaatggattcgtattgatgtcagggtgatgttgatggggaatggagttggtgtgactagggccatggtttctgttcatgggctaccctctgaggggatggacaagcgaggagcaggtaaagccacagaatagccaacagtagattgcctggcactgaggtctgcatgtgtgggcccagtttgtcagtttatcataaaatcccatacacttcaagatttgccctctttctggcatcctcagtatctgacatgtttcaaatcttaaaaaaaaggttagttgaggaagctagctttaggttagaacatttgacagattagcaaatggagccccaagtcgaagaactgccatctgataagaaggagataacagcagcaaaaggatcattctgagtcactctggccgttcttttgaggcccaggaatcctgccagcttctagggcccttggagtgtcactcggccacgggaggtgtcattacagatgttcataatgaccttgagcatccatgaaaagctgttacttgaggctccttagtttttcagtcacagccagagtaa

SEQ ID NO: 392645 - DNA, 525 bp, Homo sapiens
  misc_feature (314)..(314): n is a, c, g, or t
cacaaatgtgttatttagaaatatggagacaaacagagaagaaacagctgtgagatttgaaacagactgtctctagacaggagtcagaggccaaagaaaagtgaggcaggagaatgctgttttgtttttaaggacacacctcgcaaaaatattcaacttttaaaactacgtaccggacaaatggagcaacagagaccaggttcaccctaacacctaacataaccccctccccccaccagaaagggagaaaatacgtgagacgcatggttttcaatgaggggtagcgcctgctgtgcacaggaaagcgagcgagntgggtctgcaccagctcggtgcctcaagggcttagggggcctgccagaacccgaggtgcagaaatgggggccgagagtctggggagatcgccgtctagctggccggacagagtagcagagaagagagggctgtacacagagaactccagaaatgggtggcaggtttcctgggtagtcagcagagtcctggttggcccgtgtgtgtgtgtgg

SEQ ID NO: 392646 - DNA, 2449 bp, Homo sapiens
ttaatgttggttaaaacatgccaaattgcttttgcttttagatattagtcttttgaaaaagttctactttcctgaaaattcaaagtgagggtctaatgtacaataaggtaaagacccccctattgtttcttatgttttttttatgaaatataatggtgtgttttttcttgtctgtgcttttgatttgtgtgttttagagcatctgaaaagtcaactatataaacataatagtgaaagagaaatttcactatcaaaagatttgcacaccataagaaaaacattagttacatagctactgaactaggttagtacactggtttttgctttggtctttctatgcctggccattttaccagataattatttcagtgaatttgaatttagtgtatttgtcacttaaggaagcttataggcttgggccatatacttcttttttggatatgttaaagaaaaaaaatgttttaggcttgttgtacccctgaagttggagcattgagaactttgtttatatttgtatattaaaattgttcccacccccaaattattaaattggtgattaccttttttccctctccaggaagtatttatccatgtagataatacgttttgaagggctttggatatcaggggctgtgtatgaatccctatcttgtcaaagaaattatttttttaaaactttattttgaatttttataattctagttattcagctgaaactgagggattctattgccagcttttatgtaattggaaagatttaaatcagcttgtgttttaaaaagtaatgttgctactgtaagcagatgtactgtaagttagtgattatgtttgaccaccccctccaattacatgggtatagctatttaaaagaaaaaaacaaaaacaagcaaaaaaacttactaatacaataaatgtccatgtaacaaaggtatctgttgcagtgttcattttgatttacattattgcacacacactgggctagatttcttttttaaagactctggtcttccaccccaaattctgggcctttgctcatttggggtattgatactgaacatatacagccaattaatgtattcaaatggagccctaagatccactttgcagtactagatgtgtagatttacctatctttagcctaatacctttcttcatttatcatgtattcttagtcgcaggagctgctcagctcctgatttctgttattactgcccaggcatcctcccttcataagacatgcctatgaaatggacacaaaaatttggaacacaacaaatctaagacttatcataatagttttttgttttattgttaagattttgtcatgtcctgtcatcttttcataggtaagtttcagatcagattcttgttcagctcttaactgctgtgttgtgctttagtgcctgtataaatggcagtaaataggttctacacagcttgcttagaaatcggatataaatgactttttagatgtctctatgattgaacagcaatctagatatgtgcttctctacctttctttaggttgtaaagaaagcagcctaatagatgcttagggaaggaattctggtcagttgtgggaaataatcaccactgggccagcattctgcattatagactaacatagcttcagcttgaaatctgatattttaatacacctctgattggaattagcaattacctgtgttattttctttttgtgacccccagtttcccatagttttagtggtggtatgactggcaacattgttaacaacaaatagacccatgccagactgaaaataacttgaaggatttcataaattttctttttgcatactattcatggaaataatctactctgcacttccctatgaatggatcatgatgcaaggctgtccaaaaaaaaagaaaaatatttctttatgaatcaagtctcaaggctgatagtataaaagacttatggaaatggaatttgcatatttttaaagtaattttactgagctcacatatcaagaatatgaaatcatgagatagagataagttctctcaattctcattagaattggttggaattaattccagattattttcctgggagattttattttaagatgtgaatgttacaaccattacagttacctgtaaggcttgagatctgcatccccaaagtatgttcctttgttagtgttagttatttgagattcacagaaaatgcccagtagcaacagtctgtgctgtctttcaaaaaaaaaaaaaaaagttttcattttttaagataggcttataaccaacacatgtatttttagcaggatgactagtaatcacttttgggttgaagtataagaatttcagtgcatagttttggggtgttaatttttttataaaaatctaaaacacttgttcaaatttgcagctctgttgcttattctaatatattaaagttagatgcatgaaaaaattttattct

SEQ ID NO: 392647 - DNA, 790 bp, Homo sapiens
gtaaggggtgccacctaaaagccaaacaataaaacaccaggactaacaaacgctcagtgcattgctgaacacttggcatgatagaacactgttagaaaacctttcagatcctatagccttgaagcactggttttttcaagaaaattcagtgtcatcatctccttgacttcagagaccagctcaaaccttaagtttaattaggactccaggttggtcaagtccaagtaccatcacaaaaattctacatctttagaaataagcgttcaagtgtttttcaatgtgtatgactactggatcaacacagacaaaatgaactagaaaagcaaggagaaattctgaatcattaaaacccagagagtctttttcaccaggtatgttcaaatagctaaagcaaaaatcaaagttgtggcctctctgcttttaagggagtacaggactccattaagccactgggggatgatccattgtgatcatccatggagggagaactaggatgaaaaaggagacggggcaggaagacacactttactattacatcctgatcacagataaattcatgaaacatttcacactttcaaagccaaggccaggtcaagttaagttccctctctgaagccttcccacactattccaggactcctttctctttactcaagactcaaattacaattttaaatcagcagcacactgtttatccctaagtgtgtaagtctcatctccccagatgaaccatccagatgtcagggttatggctcatccttctcttagggacctcaccggatagcccagg

SEQ ID NO: 392648 - DNA, 360 bp, Homo sapiens
tgaaggcattcaagccttaatagctagctggatgaatgtttaacttctaggccaggcactactctgtcccaacaataagccctgtacattgggaaaggtgccgagacatgaactttggtcttctctgcaatccatctggagcattcactgacaacatcgactttgaagttgcactgacctggccagccctgccacttaccaggttggctctgtatggctaagcgttttctcctaaaatcccttgaaaactgtgagaagaccataagaagatcatatctttaattctatttcacaagtcacacaatattccaatcaaatacagatggttgagaaaagtcatccatcttccctccccaccct

SEQ ID NO: 392649 - DNA, 202 bp, Homo sapiens
tacatatggcccaaagacatgttgaaacatatactgaatatactctacaaaattttaaatatatatgtgaaaaattctcgtgaatatgtgacatataaggtaaaatgaaaattgcctttttgtaatattaatctggtaagaagtggacattaggaaatagttcattcgtttttttgatgcatatgctaataagcctttaggg

SEQ ID NO: 392650 - DNA, 360 bp, Homo sapiens
ccaggagatggaggctgcggtgagccaagatcgcaccattgcactccagcctgggcgacagagtgagattctgtctcaaggaaaaggaaaaaaaaaaaaaagatggtgtcatgctgaattagagaaggtcctaaatccaatgatttgtgtccttctaacaagagggaaggacacacagacacacacacagaaagagaagaaggccatttgaagatgggggcagagactggagtgatgaagttgcaagccaaggaacaccaaggatggccagaagccaccagaagctagaagagcctggaaggattctctccagaggcttggagggagtatggccccgacaacatcttgagtttggacttc

SEQ ID NO: 392651 - DNA, 337 bp, Homo sapiens
aaggaatgaagtactgatacatactacaacatggatgaatgtttaaaacattaagttaatcccttcagggtaaaggcgatggggaacccaaaacattatctaagagaaagaagcagttacaaaagaccacatattatacaattccatttacaggaaatgtccagaacacaaaaacctacagaaacagaaaggcgattactggtgctcagggttgaggtggaagaatgaaagaattggtgaaatgataaagggtaaggtatacttctgcggtgtggaaaatgttctaaaattgattgtggtgatgattgcacaacttggtgaatatactaaaaaccat

SEQ ID NO: 392652 - DNA, 303 bp, Homo sapiens
gagaaccgacagtgtcttagtcggccagggctgcccaacagcgtatcacagacccaggagctggaacagcaggagctgattttatcagtctagaggctggaagtctgagatcaaggtgctggcgggcttggttcctcctgagggtcatgagggaaaaggggtcagtccccaggcctctctttggcttgcaggtggctgtcttgtctctgagtcttcacatcgtcttccctctgtacctgtcagtggccacagttgttctgcttataaggatccggtcacactggattcagcccaccctcatga

SEQ ID NO: 392653 - DNA, 127 bp, Homo sapiens
tggatgtgtttgccttgcttggaggaggcgaccctgtgcccgtccaggcacacaggcgaggggaggggctggcttgctaccgaggagcgggcaggtggtggccatctccacccatgggggctgctca

SEQ ID NO: 392654 - DNA, 441 bp, Homo sapiens
aggagcctcctggctggggcggcaacaatagtcagttccagatttggatctttatgctgagtgtaagcaggagtcacggaagggtttaagcaggagagtgctatgaggcagtctattttggaaagatccctctgactggggcagagtggatgcgggaggctgggctgtggttgatcacagaggtgggaggagattcgaggctggagactccagtaaatgacaggctgtggtgatggattagctatgggtggcggcttgggagggagagggaggtgccaaggatgagtccaaggttcttgactcttaaaactgccagtgcaccccacagtggaaacattgggagaacactgagtttgcttgtagttggaagttggctgaagtgtatctgatgttcttgaaagaccatattgatgtttcagtgtcaaagagagtgcagaaggc

SEQ ID NO: 392655 - DNA, 434 bp, Homo sapiens
tgcaagaaaaaattgaaagtgtgaacagctgttggtacattgcatttgcatttctgaaatttcaagtgaagataaaacattaacagctgtgatagattcctgcagttgacctagtgcctcaggatgtgcaatacattgatgttgtcaggctgtcagggtcctggtgagaactgtagagagagggagaatctgagagggaaaacatgtttgttattcttttaaatatttttttttaattaaatctagagagtcctactgcaatctagcaatcctctattgtcactaaaagagtctttgatttaggaattccagtggttgattgtccttagaccatgcatgtcttaaaaataatgaagtagttaacttcctcatggattgctcatctttttattttgtattttctgagttgtatgtcgttaagagacttcaattct

SEQ ID NO: 392656 - DNA, 222 bp, Homo sapiens
ttcgtgagcagctactgtggaggggcttaggatacgcaggggacaatcctgtccttgcccacgtgatcttgcagtgtggtctgctctgacagtcagctgaagtgtgagctgcatcttcatgtgcctgtttcccctactggcctgtgagcctcccgagaacagggatggtgacctgtccacagaggccaccactgtatccccagcaccagcccagcatccggg

SEQ ID NO: 392657 - DNA, 153 bp, Homo sapiens
ctgatttaaactacaaccaggagactctgtcagattaacactacaatctgaagaactacagagactctcaaaaaactagtgtatagtctacagtagatattaacctttgtttttcttctgttttcatagaaacaccttttattaaaaatctgt

SEQ ID NO: 392658 - DNA, 637 bp, Homo sapiens
tcaaggtaagagctctcaaaaaacaacattggcctcaaatattcacccaaaacctagctgtatgattactgcttgaccaagtgcctttgacaaaatctatctaaaaaaaatcagaccttacctcccttttccagtggagccttttaaggtattcacagctttcattctaatttattgtgaccccatatatctacaagtgtaattggactcttaaagtttttagaccaatccaccactagtagcatagtagaatgtatcatgcggtaccgtgaaaaataatgggaactgaaataagaaagacattcatttatatcctgtctaaatcaattactctcttggagacttggttttctttaatggggattaaaatgctttccattcaagatgtactgagtttaaaataagcatcatacaaataatatcttggtgtatggtaggtttccataaattttatctagcttccttcaaataacattatacaaataacatactacattcctactagatttccatcagttttagttgaatcctttcaatctccttcttttcatttatcaatcataacaatgtgttagacaacagaaattttttttagttacaaaatactttcttcaaacagaacaggactgtgtttttt

SEQ ID NO: 392659 - DNA, 402 bp, Homo sapiens
agagctggaatagactttagggataattgcttccaacgtctcacgtatagtttattgttattgtaaagtactttatagtactttatcaaactgaggtacagcttacatctaatctgtaaaaggatttgctcaaacagatgattttcatgattctagttttttgtggttttttttttttttggttttttgttgtttgttttttgtggttttttgtggtttttttttttgagacggagtctcactctgttgccaggctggagtgcaatgggcgatcttcactcactgcaacctccgcctcccgggttcaagcgatgctcctgcctcagcctcccgaatagctacaggcgtgcgccaccacgccctgctaattttttgtatttttagtagagattgggtttcacc

SEQ ID NO: 392660 - DNA, 489 bp, Homo sapiens
gtatctcagctctgtaacttagtaattacctagacaagacaattcttagggctctcagtctcagctctgtcatctgtacaaagtaaattttactgggatctacctcactgggtttataagtgacgagctcagagttttgattacaggtgtttattcatttacctaacacaatattaactgagcacctactatggaccaagtcctgatctaagcactgaggacatagaaacaatcaaaacagacagaaggccttgtccccatagagctcacattagagtctgtggtatggtagcaggtaatacaagctaaaagaaaataacagagctgtgggtagtgattttaaaaacaggccaggtgtggtggctcatgtctataatcccaacaccttgggaagccgatgcgggtggatcatgaggtcaggagttcgagaccagcctgaccaacatggtgaaactctgtctctactgaaaaaaaaaaaatacaaaaatt

SEQ ID NO: 392661 - DNA, 312 bp, Homo sapiens
cttccatctttcctgtcaccagattaatcttcctaagggacaactctgtggcccacctgtttaaaaaaaaagtcaacagccttcccggccttctgaatgtagcccaaacctgaatttatatcactataaagaacttctataaataaccactaaattatccttccttttgccaatatcaaaactatttcaaccaaagaggatacatactgcaaatcaaggacaagcaaaacaaaaactaaaagaaccaaagggaaaagacatccaactcggtgtgatttctgaacaaagaataaaataaacacgactaccact

SEQ ID NO: 392662 - DNA, 361 bp, Homo sapiens
tgttcggaaagcattggaggactatgaatcatacttattgccactgaaatgtcctcatttgaatttacatcctatctcccttctttatgaagctttcagaggcttcctgtgccctcacaaatccacttctgggcacatgaagtcgtaaaaaaagaacaatgacaaaaataaacaccgaatgctcagcttgtcattttcagcgcctaccactgtaccctgactctggtcttcctaccacctcttccttctcaactgctacccttgctttctgtacagcgttaagctgctgttctgatcaggccactctgctcatcgtctgttcatctcatcttgggcttccctttgcccttggcattgagtt

SEQ ID NO: 392663 - DNA, 1794 bp, Homo sapiens
  misc_feature (743)..(743): n is a, c, g, or t
  misc_feature (852)..(852): n is a, c, g, or t
  misc_feature (1683)..(1683): n is a, c, g, or t
tcaagataaccaagatgtactaaaagaaacagtattttttatacagctagagagcaaggactcctggtataaaaggaaaggaatccttccctttcctttccttgggagtacttgttaactgggtctgttcagcaaactttagaagcaagcgtgtttttaaataaataagtctgagaagtaaaaagcaccactggaccactacacagaagtgcacagcagtttcctacaacagagcaagcacaattaaaatatgcctaatcgcagggatgcacaatgctcaatacaacgcccccaaaaccaaatggctaaagatatatgcacttccagaaaaatattggttttactcaaaaacaatttctattgcaaaactgcccttgaattacatgagctttgatttatgggaggtttttaaaatatattgcggacataaaatgggacttccccataaggaaaaaataaataaaactggaaataacagtagtaaataaaatgcatgcctttaaggctatcctgctgactagagatggatcacaattttggccatgagcttcccagcagtaaacataaagaggaaaactcaatcatatacatgatttgctagtatcaaaggctaacgaagtgttagagacaagtacaactttctctggaataaagaccagagagaaataattcttctgagtcttaaaagaaagatgtatttccatgaacagcatcctaaatactaccttcacaataaacatgtnacttttatgaggttacttcttaaaacagtcttaaatttaagtcattgtcatagctgtgtgctaaatgagcggagtcaatttacgaaaggaagaaaacgaaacaagtcantgaagaaaagcagttctctagcaatggaaataactgaaagctaaaactgaaaggacattaagaaatgaatagaagaaagaaggaatcgtgacatcaaagtaaattatctgacaaatacatggaatccagatatttgatgtcgcatttgatgatgtaactgatgcaggagtaccggtgacattgcttcctaagagctgaggaacccaaccaagagagaagcttgaagagaaggctctccaccccgcagaggagccataagtatctgcctgcaatcctgagattctgcagcacagatgctgacttttgttaactttcatctgcaaaacttatgaagcagaagttagaaaatattattgttagtaataacacattgctgacgaagcaaccacagatcatctacattacccaaagaattacccatagaatttagaaatacttccaaatcccagcaagataactttggtggaacatgagggcgtatctcctatctccacatgtgccttagtaaattgttggtttattagcaaatacagtataagagaaattttctaaaataaacacttcggctttagatgaattgatatgacttctagctgtctttccatgcagaacaaattgatctagcaggactatcgcactattaaatcttacttttacagctgggcatggtggctcacacctgtaatccctgcactttgggtggccgaggcaggtggatcacctgaggtgaggagtttgagaccagcctggccaacatgatgaaaccccgtctctactaaaaacaaaaaaagtgagccgggtgtggtggcgggtgcatgtaatcccaattantcagtaacctgaggcaggagaattgcttgaacccgggaggcggaggtcacagtgagccgagatcacaccactgcactccagcctgggcaacaagagagaaactccatctcc

SEQ ID NO: 392664 - DNA, 226 bp, Homo sapiens
tttaattcaacataatatttgtatctttgtctttatgcagagatattaaacaaatgcaaatttccataagcttagttacattatttgtcatacataagtaatagtatgaccatgttgtatttgttaaatgagctcaatagtctttttatgatataatgctgtataatgtaagaaatgagctactaataattacaaaaatactgttatcaaacttgtggtttacaga

SEQ ID NO: 392665 - DNA, 184 bp, Homo sapiens
tagtactcaacatcttatgttgtcaaagacctgtgtgcaggttgaagagccctcttattgactgggtgcagtggctcatgcctgtaatcctcgcactttgggaggccgaggcgggtggatcacctgaggtcaaaagttgaagaccagcctggccaacatggtgaaaccccgtctctactaaaaa

SEQ ID NO: 392666 - DNA, 160 bp, Homo sapiens
cccttgacttttttttttcaatcacctctattcttccacttgcaaattctgatttataatttatgtcagtcagtaactaagcaattctcccccagcctttgactggttgacgttattggccaattataataacactgacaaattgctactcaaattccct

SEQ ID NO: 392667 - DNA, 779 bp, Homo sapiens
tgcatcaagtacagtatatagtatattcatagcccttcaggcttaaatgttaacacatttttgttctttaaaacaagttgtgatgaatattaaacagtatgctaataactaaggatgatgtcttttgatgataatcctttggttaaaacatctgtttcaaacacaatagtggttgtttgttatactaaaaagggttaaatttttgcctatttttggctcaataagaactggcaaattttatgtgaactaatgattttggtaatgaatactcaaaaataaaatcaaaacaatagaagacttttggcttgatgacttagattgatctaaaatctgattcaaaaattcttttgataagtctaaattccttctagttaagtgtagttaattaagctagtttatagtctctagaaagctttcgcttcctcacagataccccaaaggggtctttcctggtctctgtttctttctcttaacatcaagccagaccaggttaatttaaaaaaaaaaaaaaaaagcaagcaagtggagctgatgattgtccctttttctctggaggataatttgaatcatgggaaacttatttaagtttgtgtgatggttttaacttaatattttattttaatagtcttttgccaacataaatttttatttttctttctctaaaactattcatgcccagtcttttttttttttctcccaggctggtgtgcagtggtgcaatctcagctcactgcaacctccacctcccgggttcaaatgattctcctgcctcagcctcc

SEQ ID NO: 392668 - DNA, 333 bp, Homo sapiens
cccgcaggagtgagggcactggccagcatgctccctctttcactgcttctccgatttggcttaccgtctataaaataaggacagtacttgctccacagttttcttatgaggattaaacaggttataacaattttactatgtatgatccagattacttgtctttaattcctatctctgttcattttgaccctgggtaagtcccttaacctccccacacccagtttcctcatttgtaaaatgtggcgaataagagcacctaccccaaggactgatgtaaggttaaagacttcatgcgaatgggtgtcatcatgcatgatgcttaggcagcgctcc

SEQ ID NO: 392669 - DNA, 384 bp, Homo sapiens
tagctggacacaggctgagtggaccttctttggcaggccctgctgcaaaccaagctgttttccagggccttgatgattctcagtggggaggcagcggctcagaccgaatggcaggagctatcagccccaaagtgtctgcacctcttctgaattccaagtcaagtcccaggggcaggggctgagtagtgaggggggtgaagaagagagccaccggctacccgaataagcccagaacacaactcccatgtttgagctgacccatcagttgtgaaaaccagagcccatgcagaggggagcattggcaatgggtgacatgggccctttgtggccttggagagtcacttcaccgctcagagacatgcctgattctgacattgggattta

SEQ ID NO: 392670 - DNA, 284 bp, Homo sapiens
aaagttcacccatttgaagtgtacaattcatttctttgcatctttgcaaagttgtgcgaccttcacataatctaattttagaacacgtaataagtttgtttgtttttttgaaacgagtctggctctgtagcccaggctggagtgcaatggcgcaatcttggctcagtgcaacctctgcttcccaggttcaagcaattctcctgcctcagcctccggagtagccgggattacaggagcgcgccaccacgcccggttaatttttgtatttttagtagagatgggtt

SEQ ID NO: 392671 - DNA, 342 bp, Homo sapiens
tcaatgcaagctgtccatgcggccttggggtgcagatccagaggcaccggccgagctccatgtggtagataagggtctctactgctccatgccggggaccctatccagtgggcccagacagaggggtcctcagaggagtaacagcagagggcacagtggggccccagggacgagacctgttcctttcaccgtcttcctgactggggcactaacacctgctgctggatgagtccctccctcagaggccccacctcctttcccacttagtcctcatgccccgcctcctttcccaccgcatccctcaggccccgcctcctttccactgcatccttcaggccccgc

SEQ ID NO: 392672 - DNA, 280 bp, Homo sapiens
gcatatcacctgtggcttggaagtacataaaatgtaggctcctctttctttttcattattgtaaagtcagagaaaaagccaacttagagccatgcccacagtacaaaatctgttcaacaagattagattgtcttttgttatttcttccttcctttgtcttcattttataaacgtatgcatgcacacagcttttaaacaagaggctaattgattaggaaaccagtgttgatttgatgtaagcaacaatccaaaaagtagaaaatattattattgtttacta

SEQ ID NO: 392673 - DNA, 589 bp, Homo sapiens
agcgcggaacaatcacttgaacaatcacgaacaatcacttgaacaatcacttgaacaatcacttgaactaagtgatggttccccgctagcggggaacaatcactttctgcgtatttgtaagttgagctccaatttcggttaggaaaggttgtctctaccatccttgaccgtgactggcatggggacagcacacactgatcatatccacacaggatacagcctctgacacctggccgacatgtaggcgggcagaagtaaacaaatgagacattctgccaggagaacaggctgaatccggcaaactgaatgttaatagggagaaatgtgaagtattgaaattaagccttaaaaacgaatggcacaagtgagatctattatttatttatccagagcttcagtggatttgaaactcactaggaatccacacctggaaaactggagcctccactcacataaatagatattcaaagcccagggccaaggaagtggtgctgccccgttccccaccaagcggttcttttgttttgttttttgttttgagacgagtttcactcttgtcgcccaggctagagtgcaatggcatgatctc

SEQ ID NO: 392674 - DNA, 385 bp, Homo sapiens
ttcagtagtttaaatgtttactttgcaacattacatattgccttctttagtgagacatttttctgcaaggaaaaacctcaattcaggaggaaaaacccaaactcagcttatacctaaaagtttatgccttttgcattagtaagattcaaattgatatggtttcgttattttaaaaacacatacaacagcagcctttttggtcaaggcacaaatgtgggctactcagagaaggaggttacttagggttggtgctcaagtattcatccaattggattgcactgctaatcagtaatgaatttatatctgtggaggtgagggttgatgggtttaagttattgatctatttcctgtcttcattattttcactgaaagctatatttccatc

SEQ ID NO: 392675 - DNA, 356 bp, Homo sapiens
ggagtatgtctttgggaaccattatcagtttaccacaccttcctaacacaaggtaacctgatggtctaataacatgtttgctggagtactagctagcatgtccacatgtcctgccagaagaaggaaagagaagagcaaaatggggtttctcccagctggctcatctttgtaaacagtcttccttgaaatcctacctgatgctggctcacctctcattggctctgtggacctagctgccaaggaggctgggaaatgcaattatttatgcacttaattgcactagggtgctaaagcataattttctccgctattgttgttgtttgagacggactcccacccttatcgcccaggctgga

SEQ ID NO: 392676 - DNA, 472 bp, Homo sapiens
tgtcacagcaagaactgagcggagaccttgctctgaagttcatgggttaagaaacgcccctccccacaccaaacacaaacatttcacgctcactcgtacatgcacacacatgcacacaagcatctatgcacacatgcacatgtgcacagctcacgaataaacatatatgcacacacatgcagtacactcacatgcaaacaggcagatgcacaggcatgggcacacatgcacaaggcatgcatgtgcaggtctgcagacacacacatctgcatgcacatacacggacgtgcacctgcacacacacaagtgcacataggcatcaaagacacacatgctcgtgcacgcgcatacacacagacatgcacacttatgcatgcacacgccatgacaggatggcacgggaacaaccttgcacatggagcctgttctgtgtgtatcgagagcctgcacctcttactgtctgcatgactgt

SEQ ID NO: 392677 - DNA, 505 bp, Homo sapiens
agcacaataggaagtatttgtgtatctaaacatagaaaagccgtagtaaaaactatagtattataattctaaaggcccattatcatatatgcagcccatccttgactgaaatgttgttatgctacacgtgactgtacttatttggcacgtccacatagggcttttttctcaaatattaaatgttgtttaaactactgacataagagttatgctagacaaagaaaaactagtgtaaatgtgatgaaaaccaaatgagactttttaaaactccacatcaggctgtgtgtgtgtgtgtgtgtgtgtatgcgcaggcgtgcacatgtgtattttgtacttattccctgataaccttttatctctcagacacttaatttgtcatttaggatatctgtggttaggaatggaaggcccattttgtaattggtcactatgccagaggtgaaagccattgacaccgagcctccggggacggagaactcttggcaaggcttgctaccagtgggtg

SEQ ID NO: 392678 - DNA, 872 bp, Homo sapiens
gaaattttaaatagcaaatgatttttttctgtctaaagcattttaatcactcctggaagcttcttcctcactcttcacaatggatccattctccctatgccaaaaacagccactttctgattgccatcagattaggtgtacatgtgtttgggcttcatataaatccatgcacactgcatatgttcttttgtgtttgctttcttttactcaacctaatgcttttgagattcattcatgtttttgcttgtatcagtagtttattcacttttctttgctgagtagtagtccattgtatgaatatctgttgttcatttctattacaataatattacaattttgtacaatattagaacatttctacttagtaaggaacatggtcattatattggatgaatattcactgttcatttctattacaataatatcttacaactgtacaatattagaacattactactaaataatgaacattgtcattacatcatacgaatattcattgttcattgatagtattattactactaagtaataataatttttcttgttattcttatttttctaagtattctagttactaaggaaagtagcttggccctcttcatcaaggtaattttttgtgaatagtattagcatattgcaactatgtttctggagccagcctgccaataaatgcttcttggctgtggggaaaagaacacccaaaaaaaaaaaaaaaaaaaaaaaattttgggggcgccgcgccaaaaagtttaaccttctttggcccggcccagtaataaaggccagcgccgagaaccgccaagggggttcccaaaaccgggccggttggaaccggttggtccgcttcgcttccccccccccgcgaaagaaca

SEQ ID NO: 392679 - DNA, 400 bp, Homo sapiens
attcggccagtgggagttcccccaagctggttcctgtgtcctgtgcatcacccatcttctttctcctttacttctttcttaagccacttcctttctggcatgacagcgtgttccaggatcatcttgtacttgcacctgccctgccctggccctagaatcagccaattctttgaggcatcctgcttccttttagtgggggaatgatttgagaacaaaatatactactacatgatactacattctgacaagaaaaaaaacacagccataagaaataaagccatggccgggcacagtggctcctgtaatcctaaccctttgggtggcggaggttggaggattgtttggggtcaggaattcaagaccaacctggcccgcatagtgaggcctcgtctgtattaag

SEQ ID NO: 392680 - DNA, 861 bp, Homo sapiens
ctattggccgagttctgtgagcaggggcttctgtccggaggctgtttgctccctctctgtcttagaggttttgctcctggtctctggctggcctgcccagtccctcaccctgagaagggctcagagctatttccagtccctgctgtgctcattttctctctgtaaattccctggagtggaaacagccccggcaaggcagggtacagctttttattgttttgaaaacgagtcacagctctgggcctttagactggggatctggtgtgggagttctggaaggccaatagctgggcccctgggagagctctgtgtggggtctgcaccaggccctgcagccccgggtagtaagcactcaccgaagaccatgctgccctgcactgtgctggggcagccctctaaaaggtggttggcagagggagcccaatgtgtaacaaatatgtgcaagacagtgccctacttgtggtggaaacagagggccctaaaggggcccagaggacaataggaacaacagtccgtttattgagcacttactgtgtgccaggcacagttcaaagcgctttcatgaattactgtatttaattttcctaccacccagtgtggtgggggctgtcactgtctgcattttgtaggggaggcagcagagagtggaacagctgagttttgaaccagtaggtctgacctcagagcccatgctcctcccccataaccctggggtgctggaagtcgtcttggccctgaaggacgaggggtgctccacctatgaaggagaaggagggcgttccaggtagagggaactccgggcagatgtggaggtctgagctgcctcacctctcagacgcagacgcgccttgaactgcctgt

SEQ ID NO: 392681 - DNA, 271 bp, Homo sapiens
tctcactgtgttgcccaggctggtctcaaactcctgggctctagctatcctcctgcctcagcctcccaaaaggctgggattatgggtgtgggccaccaggcctgtaatgtaatgttgcattatggcctagtaatgtactgttgcattacattaaataatgcatggatggagcagtgtggaaaagaacttgacaatgactacatctgtgacctccagccctctggagaagtgcactttacataggagaccacagatgtctttgagaagtatt

SEQ ID NO: 392682 - DNA, 463 bp, Homo sapiens
tgacccttttaggtaccaagtcacggagtggccagtggcatgtgacctcggagctgctgactggggcaaagcactcaacagccaccgtggatgtggcctgggctcagagcacacccctgccccccagggagggccagggccccttggagatcttgcagctggactttgaaatggagaacttcaccagccagtcagtcaagcggaggatcatgtggcacattgactaccgtggccacggcgccctgcctgacctggagcgggcagtcactgagctgacggtcattcagcgggatgtgcaagccatcctgcccctggccatggacacagagatcatcaacacggccattctgactggccggacagtggccatccctgtcaaggtcattgccatcgaggtgaatggcctcgtcctggacatctccgccctagtggaatgcgagtctgacaatgaagacatcatcaa

SEQ ID NO: 392683 - DNA, 319 bp, Homo sapiens
ccccacttccaagatgtggagatggtaggcacacggggtcctggcactaggctgggaggtgacagagctggggtcccgtcctgagaggctctaccatctgcaccaagctccccctctccccatggcttgtgggtcagatccaatgagacggtgaacatggaagtgctccaggccatgctccctgaaagcagctgctggcactgtcatccctgcactatgaggaccattcccacagggaagtccaaggcagcatgagcgccaggaatgatagggagccgtgaggagggcccaggttcctgggcggacgctgcagacactc

SEQ ID NO: 392684 - DNA, 765 bp, Homo sapiens
ctgtggctggctacttttgatagcttaatccctatagcaacttcgtaaagtagatataatccccattttacatatggggaaactgagtctcagaggttttatattttgtccagggccacagagtaaattgtatagtctggattcaaactcaggtttctgactgcactgcccattttaactattttgactcagtgtgtttcatcgcttaacatggcggaaaaattgtaatggaagttgtgggaggtagcatgaggatgggaggggaatgtgcatattcatcatttttagttggggtgggaggcaatagaggttaagaagttaagggaagagtagaagcattttatagctgctaaaaaggtggatagtattataggtaccaaaagtgccccacagatagctacaaattctttagctggtatctgagatttaacaacatggatgtaggtgctcaccagagaggaagatgccaattaagaactcaggttataatttcagatagagctgtttctcattctgtaaccagaggcagagtaatccggcataagttactttaaactttggagtcaggaatatgtgatatttaggaaaaaaggatcctgtaattatgagtctcttttgttgtctcttccaagcagcgtatggcctattgggctttttttggacaagggcacctgagaagctccgtgtgatacaggagcagtagtacaatcatattggttctattacctagtcatttctgtaatactggctattagaaaaaaagaa

SEQ ID NO: 392685 - DNA, 392 bp, Homo sapiens
ctcggctctacctagtctcggctctacctgtctcggctctacttgtctcggctctaccttgtctcggctctaccttgtctcggctctaccttgtctcggctctaccttgtctcccaacccataatttgctcagggatgggagacagggaaggtggggagaattataaaggggcaagaggaaactttttgaactgatgcatatgttcattacctggattatggtgatggcttcacaagtatatttgcacgtcaaaactttttctattgtgtactttaaacaatgtagtttattgtgtgtccattatacctcaataagctgtctaaaaaagagcaaatgaacattttgttagaggaaacctgcttgtcaaggcaaggagttatgaaaccccaca

SEQ ID NO: 392686 - DNA, 142 bp, Homo sapiens
agagaggtgacattacaaattggtggggaaagaataaactatccaatgaatgatattaagacaactagttatctcaacatggaaacagataaaatccacaccttaacttagacaaaaataaattccaggagaattaaagcag

SEQ ID NO: 392687 - DNA, 321 bp, Homo sapiens
atggttaaatctttaaaagttcaaggacatattctgagaggaaacatgatattcttcttttcacagcatgaggaaaataaatattaattagcctttttctgaactggttttaggtctgccatggttggttgctgggtcaataggaagtcagtgttgataatctgtgtgtgtgtgtgtgtgtgtgtgtgtgtgtgtgtgtctgtgtctgtgtgtgaatccttagtcatgtggggtaacctaggcgtcagaaacctttgaagggttttactagcaaatttgatttaatttatttcaagggaaagctcagtagaatttggttct

SEQ ID NO: 392688 - DNA, 590 bp, Homo sapiens
tgtttaatgtaaccattgaagaaagatcaaaacagtaaatctgtcatggcaaggaaaaagtatttaaataaatgttttaccttatgcactcatcatcttgggtcctgaaggagttcatttgattcctggggcaggggacaaaaggaatatcaaatatttggcaagattgcaaaaatttctctaatcaaaaaggtgccatctgaccatgttttgccacagaaagcagttctcaccaaagtttatcatggcatgtcatagtggctgtttgctgacagtgtgtgggttttggccattcagtggatgactgggaaagggaaataatctactaattgctttcccttgggttttttgtttccctggaagaactttaatcagtctgcttctattgtttatgttgaagaatagaatgaaggagtgaggtaaaatatactaataattagatgatttgatactcaatatgtaaataataggtgggtttaaaggcacctcacacaatgtatagatttcagataagatgagggaaaattaactgttttgtaattggagccctaaatgagagttaggtcccattgccacctacgtttgtgtta

SEQ ID NO: 392689 - DNA, 831 bp, Homo sapiens
gaaagatcgctgagctctccgaggcagctcgtctcccctccccctcggaatccggttgcagcccaccccaccccaatccggatccggcagccagtggggctccctgatacttcttgggaagcggtcaggggttaactatggactctccccaacccctcctgctttaggtgtccaacctgcagggaagtcaacagaggccctaagacgttattcctgggcgtggtgcagagtatgcggcccggggagggataaaacgggtcccagtggctccatatcctacctgcctggccgccctagctcaggccggtccccaggctggcccaggctgcggatcgtgggcctgcagtggcatcttcacagagagtgcggcactgcccatgctgcgctgcacccagaatattaaaaaccacaagcgggttggagtgtaggagcttgttaatgcatttggtggcggggggtgccggggagacgtggagacttccagatagcacactgaaagcaaaacattgccagtgacttctgaaagtgaagctcttccctcatccgggcctgtttggggctgagggaagggggaggggtgagaggtgttattttaaaagatctggctttattaatacgttaagaaagagctcccttggcagtatgtgttctcgcagcgcccgctctgatcctataaaacattcatgctccgaaagctgttacagagagctgacccccaagcacacccaccgacaggcctcagcgggaggcttctgccctcaaagggccactagggcccaaatacctcttctgtgaagaacccgctccagccctctgactcccaggttccgg

SEQ ID NO: 392690 - DNA, 411 bp, Homo sapiens
tcccaaagtgctgggattacaggcgtgtgacaccgaatatatacatcttaatgagtatagagataaatattcgccccaggactcatcacaacaaataataccgtaaacttgaccatcaccccccatatatttctcattctcaccctttttaaaaaatgagaccgggagtggtggctcacgcctgtaatcccagcctcctgagtagctgggatcacaggcgtgcacccccacgcccggctaatttttgtatttttttagtagagacagggtttcaccatgttggccaggctggtctcgaacgcctgacctcagatgatccacctgcctcggcctcccaaagtgctgggattacaggcgtgtgacaccgaatatatacatcttaatgagtatagagataaatattcgccccag

SEQ ID NO: 392691 - DNA, 519 bp, Homo sapiens
agttatgcaacagaagactccccgtgtgggtttatatatttacatacacatgtcagcctaaagatcataagtggtcccttttttaacatgttttggcctggagagaggagaaacaaagaatcccaagaatgaccttattcgtgaggttccctggcaggtgcactctgctcctcaccaatattgacattttccttagtccttttcgtagttttcatttaccacaatcttaatcagttgttgagagtgtggctttcttggtaaaaagatgtttttggtgggcttttgttaaaaccgtaaactcatctggtctaataaggaaccagattttgggaagacatgtgtttcaatggcgttagtatttgactggtaaaatactgtgagaactgttgttggctgaattgatccctagggcacactttgcattttacttgagccactgactaggaacacataggaaggtcttcattagcaggaatagattagaatgtatgtaagcaaatacagatgttgaaatttggg

SEQ ID NO: 392692 - DNA, 336 bp, Homo sapiens
tgtggctatagcgcaagctacaaaaaacagagtgcttagaaatgaagctagacaggtgggttggaaacgctgcaaagtgctctacatcaggacagagttaggtgacatcaaactctagaggcaactagtagccatggaagaaatttacaaaaggaaatcacggctggacgcggtggctcatgcctgtaatctcatcactttggaaggccgaggcaggcagatcacaagcccaggagagcagcctggccaatatggtataaccctgtctctactaaaaatacaaaaattagccaggctttggtggcacatgcttgtagttccagctactcaggaggc

SEQ ID NO: 392693 - DNA, 183 bp, Homo sapiens
ggggaaggggaggggaggattctgcatccagggcaccggccagcacaggcccatgttccatgggttcccactgtgaccctcaactcttgctgcccctttcctgctctgcctgcctcctactcatttggcacatgtgaaactgagacccataggagtgtgggggcaggcttgtatctgggtgaa

SEQ ID NO: 392694 - DNA, 307 bp, Homo sapiens
tcagacacacatgcacacactaaaccatagagacagggtaagccagaggcagggccagaaataaccagatcgaatgtttgcccgattatctattttaacttggctttttattaaattaaacagaatctctccgggatggaaatccttggctcttaggttcattgggtcccttctgcaccagtctctgccagtttcattgagtctgttctgcaccagtctgttggtttcaatatcccaccaactcctatcccacctatccctactttggatgaatggatggttaggataagtttgggatgttatctca

SEQ ID NO: 392695 - DNA, 806 bp, Homo sapiens
gtatgggaattattttttatgttaaatagaaactgaatgtactgggttgaatggtgtcctctccaaaattcatgtacttcctggagcctcagaatgtgaccttatttggaaatactgtggttgtggttgtaagtagctaagatgaggtcatactggagcagggcaggcccttaatccaatatgactggtgttccttataagagaagatagggcgggcatggtggctcacgcctgtaatcccagcactgtgggaggccaagccaggcaaatcgcttgaggctcaggagttcaagaccagcctggccaacatggcgaaaacccatctctactaaaaataaaattagccaggcgtggtgcttgtaatgtcagctacccaggagtctgaggcacaagaatcactcgaacccgggaggtggaggttgcgagatcacaccactgcactccagtgtgagcaacagaacgagactctgtctcaaaaaaaaaaaaaaaaaaaaaaaggaagaaagagaagatagagacacaggggagaatgccacatgaagctggaggcagagattggagtgatacattgtgggaaccctcagaagataggaaaaaagcatggaatagattctccctcagagttccagtagttgccaaccctgctaacatggttttgcacatctagcatccagaacagtgagaacgtatttctgctgttttaaggtacccagttcatggtaatttgttacagcaatcctaggaagctaatactctgacagaaaaaaatcttggataatatgcatgagaaaaatccttcaataaac

SEQ ID NO: 392696 - DNA, 694 bp, Homo sapiens
tacagtcttgtggttaagaaatcaaaataataaagaagatacggcttgaggattcttgctctgcactggtccttccgccaggacctggtgcgtcccccaagagggccttgccatgtgcgagctgagacacatgttcacactttcctccttttttgtacaaaaggtagcacatggtaaatagcgtctgcacgcttctcccctcgctctgtcttcgggactactccacatccatgaagaagcagcatccttattctcttgcacagtgggcagtggctacactgtattcactcgtctctgctgatgggcactattgtagtggtgcaattagtaacctagtatacatgcccttcagcgtgtgtactggtgtatggatctcacattcccagaggctgagtgaaagaataaaggctttttgacagtattcctcaggtactcacacactcgctctgtgagccacgtgatcatgggagcggctccctgcagaggtgtctgatgggagaggctgatgtccttgtctgatggttgctccaacctgagaatggtgagctgctctcccaatgcagactttcatcacttgcatctcatgcgtgagattgaactgcttctcatttatgtttttatctttgtttgcccatattttagctgggttgctaatcttttaatgttttctaggcgcttttcataaattagggag

SEQ ID NO: 392697 - DNA, 365 bp, Homo sapiens
gcacccgcaccaagagcctttgaagggcactgggggacagaaagggcactgaaaggttcaggcttccccacaccccgtaaatattaagtaccctgccttgcacccatagagccccggagagggagtaacttggtcagggtcccccagcgagcagacgtccaggactcctcgctttgggatttgggccccctatggccaacctctcccccgcctggtgctgatggagcccggcattacctctgccacccccaccccacatcgctccctgcccctgcgggaggctgggaacgtcttaagtggttcagaaaccaaagctaataaaagctgcggtgggaggaggcccagcccgcttaacccttccccag

SEQ ID NO: 392698 - DNA, 141 bp, Homo sapiens
ggcccatttggtcagcttccccgccacgggcacctcgttcttccacaccctgtcctggtggggctgtccgggaagacacctaccctgtgggcactcagggtgtgcccagcccggccctggctcagggaggacctcagggtt

SEQ ID NO: 392699 - DNA, 845 bp, Homo sapiens
cactttttctagtgttgatgaggacagagtgcagccttttcctcccctaatagaaaagccattgccctcttttcctcccctaatagaaaagccattgccctcttttcctccacccttaagaagacctgcatctgttggaccaacagacaactatccggcttacggccaggggagcccctgcagctgcacagaaccagtttcttatgtatctggcggtaattgggaaagcttctgagaaagtaagaaagacatgggtgttggggtggctggtatttcttgttctttgccaggtggactcagctcaagaacatgtttattggagtcatgttctgaatccccctgtttttaatgtgattatgtggtgggatgcagacccgcctttgtcatctaatgatacttcttggacaggaggtagatggatgcccttgtcttaccccttaactgaaatttaggatagattaaactcagtgactctttgactctattgtctagtaatcccctgacttgtttttccacaattactcacaataagtgtattactgtcattcctcaggagtatctttactatcagcccaaaagggatgctaagcttgcaaatttgtcctttatttctgccgttagactagtcttactgaggtctctaatgaagttgtacaagtgccggatcttcctatatgctgtctgagtagagactggccatataagtttgaggccatccagtagtccccgtgcagacaacctgcgccacgtcaggggcctctgtttgataatggcaccttacttgattggggtccccatggtaatctcgtgtctgcaaatcagactattgggtttggcagtccctc

SEQ ID NO: 392700 - DNA, 169 bp, Homo sapiens
ctatattgctttcatttggctactgtaacaaattaccaaaggctaggtggcttgaaactagagatgtattcttattcagtagtggaggccagaagccacaaatcaaagccttggcagaagctaggggaacaaatccattctttacctctctcttagcttcggatagctg

SEQ ID NO: 392701 - DNA, 351 bp, Homo sapiens
agggcaggggggcaggggcaccgcaggttcgctgggaaacctcagaccttcttaggtgaacccaaatctccttgctgtgcttgtctcacagtaacacatcccagtcgtctcagcctatcggatgctaagtgcttcaagtttttgcatttcctttggtagcctggacttcatgcattaacagcatcaggtgagcccaaaccaagaacatccacatcctcacctttctccccatcccatctctttgactgaaggtcatcactgagtagccctataagctgcaatttccaggccttaaagggcctgggaaaggagacctacttccattctggactccctcactccccaccacac

SEQ ID NO: 392702 - DNA, 360 bp, Homo sapiens
tgaaaccctgtctccaaaactaagctaaactaaaaaaaaaaaaattctgatgtgactgtgattttactagctcaaacataatgagctacaaagtgagcaaagttcactatgactacaaatgaaaagttgaaagaaatccattgtcggcagggcgcggtggctcacgcctgtaatcccagcactttgggaggctggggcgggtggatcaccagaggtcaggagttcgagaccagcctgaccaatatggtgaaaccccgtctgtactaaaaatacaaaaattacctgggcatggtgacaggcacctgtaatcccagctactcaggaggctgaggcaggagaatcgcttgagccggggaggct

SEQ ID NO: 392703 - DNA, 258 bp, Homo sapiens
gggggttagactttgtttttcaggagataaagagttgctacaggatttcaacctggaaaatgatattggatttatatgccagaagaagcaatctagtaatcatgcacaataaacaggaggggagtgagattgttgtccataaagagaccagttaaaggaaaaatttagtgtaatagtacaggcacataatgagtatggcttggaccagtgacaggtctgaagagttagactcaagactgtgggcctgaaggtgagagt

SEQ ID NO: 392704 - DNA, 181 bp, Homo sapiens
aggtccaacgataggatttgctgtgttgggaggtggtgagttccccattgctgaaggcaattaaagaaactggaggtcacttagcacagatgtcaaggatgggactcatatagcaggttcaggtcgaactgaatgacactggagaatcctttccaactcagagtgaattataggctagctc

SEQ ID NO: 392705 - DNA, 460 bp, Homo sapiens
attaatttgctcaggaaccttattcttttctcctcatagaaaactcagaaaatcccaatctggttgcaatccaaattattcagattaatggtcagtgtttcttaacctttttaaacctaggtggattttgatactaaaattctcatttctgatcccatttctggttgagaatcactgacacaaatttaattctatatgtatatgctttaaaaaattacattcatttttttcttttccccctcacctcaatctcaatatgttatatccattcttgacatctagctctttattattaagtaaggtattctgtgcttgaaacaagctgattttcctcattcagaattttctagagcactgtttattattacttcaaaactttagacaaaaattgccaatagtaatcaatgacacaaaattggaacacatacaaaacatcctttctaactcctttattatttca

SEQ ID NO: 392706 - DNA, 140 bp, Homo sapiens
gcctttatgtttggccacatcttagtgactgatggagatcagaccttaatttagcacacacaggtctgctaggacaagagcattctcagtgacaaaaacagtggaattcaatttctcatacagtttatgagttgtaagga

SEQ ID NO: 392707 - DNA, 447 bp, Homo sapiens
ttttcagcttgcttctccctccctgcaggaaaaggcaccatcacatcacctttggtcctcgtgatgctcttagctcaagttctttgtcccgtcgctaccggtgtgattgttaatcctcagatttgcagcaaacattttagattttcattttagattactttagctatagccagagcatcttaaagccttatttatgcactgaaatacttctggtctgcttctgtgcatctgaatgctatagaatgacagtccaccaggcacgtgcatctgtctgaggacaatggccaattctgaagcagacgacattactctgttcctttcttgagcttactattgggttggaagagggaaatgaaaacatgacttatcagaaagcaacctggaaaacactatgacatggatttctcaaacttaacacagctaaaattcagcttttatttgaccatc

SEQ ID NO: 392708 - DNA, 340 bp, Homo sapiens
attgaaaagttctgagcaggtaagaacttcatcataggactcatgaagaagacactggcatggcacaaacagttcaattttacagggaagaaacacaacaaataaatgggaccaaagaaagctaccgcaaggcccacacaggaggtaagtgcctgaaattgtgtggtgaaaatgggcaagaaggaaggacttaatattgaaaagatagaacaggcaggttgtggctgtagtctgtgctgcagtgagagaaagaggagaccaagaaagaagcacggcttgaacctgggaatccgagaaaatgggagcacctttagcactactggaaggtccagaaggaaaa

SEQ ID NO: 392709 - DNA, 792 bp, Homo sapiens
atgcggagaaacactgggcacagggggaggtaactgcagtaagtcccgcttggccctggagtccacgcggattttcgaagctggggctggcaagaggccgctggacaccacgctccagtcgtcagcccacttcctagctgaacagcgcgaggcggcggcagcgagccgggtcccaccatggccgcgaattattccagtaccagtacccggagagaacatgtcaaagttaaaaccagctcccagccaggcttcctggaacggctgagcgagacctcgggtgggatgtttgtggggctcatggccttcctgctctccttctacctaattttcaccaatgagggccgcgcattgaagacggcaacctcattggctgaggggctctcgcttgtggtgtctcccgacagcatccacagtgtggctccggagaatgaaggaaggctggtgcacatcattggcgccttacggacatccaagcttttgtctgatccaaactatggggtccatcttccggctgtgaaactgcggaggcacgtggagatgtaccaatgggtagaaactgaggagtccagggagtacaccgaggatgggcaggtgacgaaggagacgaggtattcctacaacactgaatggaggtcagaaatcatcaacagaaaaaacttcgaccgagagattggccacaaaaaccccaggccatggcaagaggagtcatcatggcaacagaccctttgtccaatggaagtttcctctcgtaggctcatcgcaaggcgaaaagcagtcccggccttccacggg

SEQ ID NO: 392710 - DNA, 551 bp, Homo sapiens
  misc_feature (505)..(505): n is a, c, g, or t
atgcggagaaacactgggcacagggggaggtaactgcagtaagtcccgcttggccctggagtccacgcggattttcgaagctggggctggcaagaggccgctggacaccacgctccagtcgtcagcccacttcctagctgaacagcgcgaggcggcggcagcgagccgggtcccaccatggccgcgaattattccagtaccagtacccggagagaacatgtcaaagttaaaaccagctcccagccaggcttcctggaacggctgagcgagacctcgggtgggatgtttgtggggctcatggccttcctgctctccttctacctaattttcaccaatgagggccgcgcattgaagacggcaacctcattggctgaggggcggaattccgagatctgaagaggccatggaaccagtctcacatgcttttgtatccttccctaagaaaaatgtgttttcatgtacaggaagtcattgtcttcacttcaccctcccccagttgtaaatntccttgctgtacatttctgttaaatccacaacactggttatatatt

SEQ ID NO: 392711 - DNA, 956 bp, Homo sapiens
atgcggagaaacactgggcacagggggaggtaactgcagtaagtcccgcttggccctggagtccacgcggattttcgaagctggggctggcaagaggccgctggacaccacgctccagtcgtcagcccacttcctagctgaacagcgcgaggcggcggcagcgagccgggtcccaccatggccgcgaatccaaaacctggaagctgtcaagatacccatccactgacgaatgattcagcacactgtggtatagtcataaatggaatactactcagccatgaaaaggaacaaattcctgataaacaccacaacatgaatgaattgcaaaagcagtgctctgagtccaagaagctgggcagaaaggagttggtgccctgattccatttttctcaagttgtagaagaaacaaactaatctacgtattccagtaccagtacccggagagaacatgtcaaagttaaaaccagctcccagccaggcttcctggaacggctgagcgagacctcgggtgggatgtttgtggggctcatggccttcctgctctccttctacctaattttcaccaatgagggccgcgcattgaagacggcaacctcattggctgaggggctctcgcttgtggtgtctcccgacagcatccacagtgtggctccggagaatgaaggaaggctggtgcacatcattggcgccttacggacatccaagcttttgtctgatccaaactatggggtccatcttccggctgtgaaactgcggaggcacgtggagatgtaccaatgggtagaaactgaggagtccagggagtacaccgaggatgggcaggtgacgaaggagacgaggtattcctacaacactgaatggaggtcagaaatcatcaacagaaaaaacttcgaccgagagattggccacaaaaaccccagtgccatggcagtggagtcattcatggcaacagcccc

SEQ ID NO: 392712 - DNA, 638 bp, Homo sapiens
ggtgaatattataacagctataccttcacccagctacccttgctgggctctaactcgctgtctctttctcttgttattgttgttgttttcccccatgggtgagttctttatggcagtctccaccatttcctcataatcattttccttttgatttctatattctgacatccagttcccatcatactgcggcagctgatctctcaaaataaattcattgatttttttttttataattgcagttacattttttctcctttactttccttgcacacaggactgtatttgatgctgttaattaacccttctttaaaactttgttttttgtttacttctgtttctttactgactgtgtacagtaatcagaaaaatcagaaaaagacctgattttctctaaatcaggcctttttccctcaaggatctttgtggccatttcccctggttttccttgaggagaaaactatctctctacatctccctcttaacccaacttccactccgctattttaatagtctactggatgctacggtgaacaatttaaaagacagaaggactgggtgacaaacgtgagggaatttggactgatgtctgcatgtctggcttgagtaacagtagggacagcagtgctgtttcacatata

SEQ ID NO: 392713 - DNA, 440 bp, Homo sapiens
ttaaaaatacagtccaaacttctacccaatccatcccccaaaactaccattgaacttctagctaattgagggctctcaaatttctgatttctcacagttctaactgaaaagaagcaagggcactcttccaacccaagtggctggaaactggctcagttcctctattttcaccgattccaagttattcttattggttcctctagtcataatgggaggaatcaacatcgtgttggttccagtactaatgaaaaatccaagttgtggtgagtgggcatgtgtagtattacaccttacctattcagacgaagtaacagagagtgttaacttaaaaggtccacatatggacaattaaatcaaataagaagtaactgtcactcataaggagtttttaaacattgcttaatagtgctaaaggctgaagaataagattctttctggag

SEQ ID NO: 392714 - DNA, 399 bp, Homo sapiens
tgcaggactaacaaattagccacaagattagaaattatgatttaggagtcactgttgtaaaacctgagatcagtgcttgaggtattttgcagaccctgcattccagtgcatcacccagattggtaaattagtttgcctggtcttgtccccacccaggaactgattcagcacaagaagacagctttgactccctgtgatttcatcttcgacccaatcagcacttcctactttctgaccccctacccaccaaattatccttaaaaaccccaatctccaaattttgggggagattgatttgagtaataactcatacccacaaggtatggctggccttgtgtcagttaaactctttctttactgcactgctgtggtctttattgtgcagcaggcaggaataac

SEQ ID NO: 392715 - DNA, 385 bp, Homo sapiens
ttctgagaggtagttctgactacaaagggcaggtgattctctgcagccagtgagcaggaactttgaccctctggaattgtgctaagcaactgagagtaaatgaatcaggcagcagggcaccaggaggagtccactagtgtctttgtgatggttttgtttttacaggactcatttaataaatatttcactaggcacaatgctgtgcattttttgtcccagttatcatatttttataggtatttacttcataaaagtaacatttttatgctccctttaaaataggattcttctattagaattgcctagtaaaggcaatcagaggaccactgcctaaggaattcactcacggagcatacatatataagtatatgctctatctctatct

SEQ ID NO: 392716 - DNA, 560 bp, Homo sapiens
cttgctgtctcagggtgtgccaggtaggttaggtggaggtggaagggaagcaggagaaagcaggagagttgggcacacttggtgtaacttttattgaaaaaaatctgtctgtaagtagacccgtgcagttcaaacctgtgttgttcaagggtcaactgtatgtgtggttttgaattctagtctttagctccttttaaatgatgtgacaaggagactgaccattatgaggtgttcactatggtccgaggaatggcaaatttcacccttatgagactcagtgtgtttttattatcaacctttattagctaatggaagttaactgaaatcaggtaggtttatagagtgttctgtagcatagtgagtcaggcattgtgaaggtatactaatgtgtggcacaaggtagttactcattttagcctagtgtgagcagcagagtgtatgtgttggtaactatagtaacaaaaagagtaaggatgccagggatatttatatttttttgtagtaaagatgaggaaaggaggaatttctctttagtgtgttgctgtaaatgttaaatatga

SEQ ID NO: 392717 - DNA, 454 bp, Homo sapiens
ttctgggacctttgttgatgtcataagttacaggtagaatgcgaatgtaactcaaagtcctctcatgtgcaagcattaccacactaggcaatgttgggcttccctgatggctggaatctgcccatattaaataagctaatcagtttccttgctactcatcatgtgatttttttcagaaagttctaagctattaaactacttactttttcactctaactattgtataatgatggcactatttcttatgccattatatgacaggcatagttttgggtccctttacaaatgttcttgttaaattcactaaacaagcctctgaattcagtaggtaaatcaactgtatataagacagaaaaaaaaacccttagggttattaaaatggtggatatattgtttaataaccctaagggtttttttttctgtcttatatacagttgatttgggtaccgagctc

SEQ ID NO: 392718 - DNA, 318 bp, Homo sapiens
attaaagctgggttctgaaggaggcagaactgtaattttgatagaccaggacatcagttgaaagaaattttataaggcagaggtgtgaaaaagggaagcccattccaggagcttccagatgtgtgtgagtggaggggatgaacagagcctagaaaggtcctggagcggagggacctagaagacactcccatcctggtgatgaagctttttttttttttttttttctgggtgggtttaaaacaagagaagtcggcctctctgttggcccagaggtgggaggtgtcgaaagggcgcgaactctggggccccgcggcaaca

SEQ ID NO: 392719 - DNA, 311 bp, Homo sapiens
caagtgattctcctgtctcagcctcctgagtagctggaattacaggtacatgccaccacgcccggctcatttttgtatttttagtagagacaggtttcatcatattggtcaggctggtcttgaactcctgacctcaggtaatccgcctgcctcggcctcccaaagtgttgggattacaggtgtgagccaccatgcctggcctctctggattctttttgctctggagaagttagctctctaatttttgttacttaagctgtctttttttttttttttttttggggaacagcatatcggggacccgagcccga

SEQ ID NO: 392720 - DNA, 183 bp, Homo sapiens
tatatatcaggtactatatatacaaatatgtatgtatatggtatataataaaaacaagaaagcatatataatccaaaattgattctcaaaattggtgtacctaacatacacttagggaattgattataatcacaaatgtcctggttcagcctaggcctacagatcagaacttcaagtccccta

SEQ ID NO: 392721 - DNA, 267 bp, Homo sapiens
ggtgtgaaattaatatgctgtctcactggagcttgctttttcagctgtatatttcctgaagtgaccagcagtagctttcatctcctttccctcctcccgttgtgctcattgagaaaagaatgtgattattgtttaattaaatgacttgacttttatgggagattaaagcaggcaggctttgatctgtaacaccattgccaacaccttttttgaggatatgctaactaccagcagaaagctaagatccgcagattttaattaaagact

SEQ ID NO: 392722 - DNA, 248 bp, Homo sapiens
cggaggtggggataacagagccattagcatagacctgatatatcaaataaaaaaggataggtaaagagggaacatcgggtttagtttagtttttctgagcttaagaagccaacaggatggaggatacagatatgagatggacagttagaaagattagagctgaaggtgaaggtcacaaccaagctatagatttgggggtgaaatttatgaaagtgaagggaagccacaggccatgatgagactgtctg

SEQ ID NO: 392723 - DNA, 484 bp, Homo sapiens
tagctcctgattctttttgacatggcctcatcatttttctttatttcctctaaaaaaaaaatgagatacgtttgcagaatgtgcaggtttgttatataggtatacgtgtgccatggtggtttgctggccctactgacccatcctctaagttcgcccgctcaccccctaccccctgttgtgtgttttgttaccctctctgtgtccgtgtgttctcagcattcaacttccatttatgcgtgagaacatgcagtatttggttttctgttcctgtgttagtttgctgaggatgatggcttctagtttcatccatgtccttgtaaaggacatgatcccattcctttttatggctgcatagtattccacggtgtatatgtaccacatttcctttatccagtctatcattgatgtgcatttggattggttccatgtttttgctattgtaaaatagtgctgcaataaacattatgtgtgcatatgtctttat

SEQ ID NO: 392724 - DNA, 707 bp, Homo sapiens
aactcataattggaggactaacactacttaatttcaagacttatcacaaagttacaatattcaagacagtgtggtattggtatcaaaataaacaaacagatcaatgaaatcaaatagggagtcctaaattagatgcaaacatatatggagaacttatttttgacacaagcacaaagacaattcggtggaaaaaggatattcttttcagcaaataatgctggagcaattagatatctatataggaaaaaaatgaatgccgatccataccttgcaccatatgcaaaaattaactcaaagtaaaatcatacacctaaatgtaaaactgaaaactataaaacttctagaagaaaactttggcaatcttctcttagacaaagatttcctagatatgacattaaagtataacctaaaaagaacaaactggtcatttaaaccttttcaaaaataaacttgtgtttcttcaaaacacactgttaagagaataaaaggtaatcctcagatggggagaaaatatatgtgcaagtcacttatctgataaagtacttttgtccagagtatttttaaaactctcaaaactcagtaataaaagaagtaacccggccgggtgcagtggctcacgcctgtaatcccagcactttgggaggccaaggcgggcagatcatgaggtcaggagagcgagaccatcctgggtaacatggtgaaacccc

SEQ ID NO: 392725 - DNA, 269 bp, Homo sapiens
aggctgtgaagtccaggcacagtggctcacatctgtaatcctagcactttgggaggccaaggagggagaacttaagccccgaagttcaaggctgcagtgagctatgattgcaccaccgcactccaggctggctgacaaaataatttaaaacaatttaatttaaaataatttaaacaaattaaataacaaaaggctctgaatgtacagttaagcaaatgctattcctgatgctttgctgccatctctgatgaggcctgtaaacaatcaag

SEQ ID NO: 392726 - DNA, 357 bp, Homo sapiens
cagtagtttgcaacttaggcttccatactgaaatcacatggagacccttgagaattgccacactagttgaacctcaggggtggacctggctgtctgtgtagctggggcaagaacttctgatttcagaatggttgaagcatttcctccctcggatcatcagccagatctagaattacaaggccatgcccttatgagtgactgggtgtccttatatgatacctctgctgccaaccctcctggggcctgcacaggggtctccttgcagacccctcctcccctgctcaacacctattttccttaaaggttcagatttccagttgggttcagggaccttgaaaggaatccatttctctcgac

SEQ ID NO: 392727 - DNA, 491 bp, Homo sapiens
gctttttcctctagtgaacatgttctcactctctgaaaatgcatccatcaacttttaaacatgaagtcccttccatcttaaacagaaagcttacttcacttcaccttccagcctctgtacactcatacatccattcatccatccatccatccatccactaactggctcaataaatactgagtgctgctatgtgcctgttctaagtgctgggtaagggatccagctcctggttaaaaatctatgtgctggctgctacaccaaaaataccataggccaggcactgtggctcacgcctgtaatcctggcactttgggaagctgaggcaggcggattgcttgaacccagttcaagacctgcctgggcaacatggcgagtccctccatctctacaaaaaatacaaatattagccaggtatgggggcacacacatgtagtgccagctacttgggaagccgaggtgggaggatcacctgagcccgggagtcagaggtt

SEQ ID NO: 392728 - DNA, 333 bp, Homo sapiens
agttcgacggagacttctttgagaaatgaaaccatctgaggaaaaagaaggctgggctttgtaatatgggtcaaaccaaatggtggcccctactactaaggacactggtttctagcctgtgagtctcctttaggttcagtgagcttcatgttcaccaggaaggaaggcacgtttttttcctccttccttctcttccactcccctttgagaaatgaaaccatctgaggaaaaagaaggctgggctttgtaatatgggtcaaaccaaatggtgactctcaagactgagcatacattatattcaccagggaagggtttttttgtttttttggtttt

SEQ ID NO: 392729 - DNA, 421 bp, Homo sapiens
tgcagaaagcagacataccaaagaattacacagaaagggaagggagaaaaggctgacagagtgactcagagacagatggaaagaggctggctggaacaaaggcacttgaagagctgtgttgtataaaggaatgcagaatgagttatacattgacagctggaactgagccatatgggtaagggtgtggttggtcatttccctcatttgcgcattctggcccctgtgattccacctggaagacagcagcttcgtgctgagtggggtaaagaggagcagcacaaaagaagggtaaatagggggttcacatcaatctcagagacagaagctttgagaaggactattcatccagtcacctggcaccttctccagagcagcagttgggaccaaaacagtacgggaggagggcaatgagacaagtggt

SEQ ID NO: 392730 - DNA, 463 bp, Homo sapiens
cacttcacaacttagtaatggaagcaagcaatatcaccaaagatccctggctctctggctttcagcaccaattcagaacagttttacaaatgcattagaactctgctaactatagaggtagtctgatgtaatttgacacacgttatttccaaaatgtcatagattaccctcccaccccccaaaaaccttgtaaaggccctagtgaaagatctttttccatcctgtatttcctcatttttcaatctgttaggttttcagccttttttcccacctactgttcctcctcaaactgccccaacagattttgagtagagttacattaccaatccatttcacaatcttgatgttctaattcaaaacctatgtattaatgtgtgcccatctgcattcctggaaagctaatccaataatgtatcctggaaaatgaccaatgaaggtacttggtgttgcttttcagtcaaaa

SEQ ID NO: 392731 - DNA, 529 bp, Homo sapiens
tcacagatgctcatgccgttcacctgcttatacacatccagtgacggctcaaacaaacctgaaagtcgagagcatggcattcaaagcccttcatgttctgcttcccctgacattttcctcaggcacccgtaacctgtctctacaccaattatgtctgaatgccatcactactaggaaaggacagtaaatttacttgcgcgtggtaaaagttatctttcttgtctgctgcccccagccagccactaaagagaagagccagtgctggttcatacccacagggacgcagaccacacttctttgtaattaatcgcaagtaatgatctgccttgtataaaaacgtatttgaatatccacggctggttttacacataattttccgactctttcaaagtgacacatgctgaatagcagtgtgaatttacagccaggctttctaagccattatcactgctttaatgacaaaatactgtcaccagcacctcaaccttcatccaagttcagtttcttcatttcacctgcatcaggactt

SEQ ID NO: 392732 - DNA, 559 bp, Homo sapiens
ccccaactaattaaatggaaccccttcttggccagggggatcccagagaaaccttgaaaactgagttcctagccataaccagacaggagctcagacttaccacattatatcctctcccttgctaaccatcatttggctttctttcctaagggttaaacagaaacaggccatctcaaaagacttgttccatcactgtttccaaccaaccacctgactctgcccctcgctttatacaggtttgacacggccaaccaagcaacattccttcctgataagatttgcacacccagaactagcttctgtttgcatgaagtggttctggtcagtttacgggggctgcacactgagtgccttcatgtcctctaattcaccttttgacacatggggccaaattatagtatacttaaatgttatgttttcaccccaaaatgaacatggcatgtatatgacattcatattaatttactgtgcatttgcgtgcccttcttttgtgaatattcatagctcctcctataacttgagtatgtatacttagccattctgttagcataaattcctg

SEQ ID NO: 392733 - DNA, 242 bp, Homo sapiens
gcatgtggacatgtatatgtgcatgtgtggttgtgcatacaaatgtgtgtgcatgtgtgtgtgcatgtgtgttagcagctctctgaccacacagactgggccataactacgcagcccccatgtgctccatgggctgtgactggggtgggggctctatcacagaagagtcatgcccaggccagaagagcttgagagaacaaggagttgggcccttccagggcctcaaaagcacccaggcatga

SEQ ID NO: 392734 - DNA, 204 bp, Homo sapiens
tcctgagcctggcaccatcctctctcacctaggccaccatcacagcagcctcccaaccagcctcccatctccaggccagctgctatgctgcagccagagggctctctgggagccgtcactgttctgcctaaaaacttcaatagcaccccgtcgtccaagctcctaacttgctagtgcttgccacccacccacctcttggttcga

SEQ ID NO: 392735 - DNA, 166 bp, Homo sapiens
gctgattggccttcctagatgtctgttggcattgctgacactcctaaggtctggctgtggctcccatatacaccctgttcagccacatggcttctgctgaaacagccccctctctgtcctgactggctaatattactgtgatagaaagattttaccaaacatgctg

SEQ ID NO: 392736 - DNA, 134 bp, Homo sapiens
ctagtattcattgctgacgatgatgggaatgctttctatgtggaacattctgtttggaaaaagtgactgtcagtgcctctaggctctgatttgagaattgaagctttgcagtgtaggcattagcggggtgtgga

SEQ ID NO: 392737 - DNA, 695 bp, Homo sapiens
ggtttttaaaggaaagatttggaatgcagaagaagtgtgggggctgagaggtataaggtagcgtgacttgctccagtggcccctcttgaacagttgtcctatttggcaaaggggatgctgccatcgtagaccctgccaggttataaattactttcagtcaattttgtagtcactcatcatctgggagtgggttccatctttaagcaatcttttgttagagagagaattccagaggtgccttgtcactatcaggatctgactcctaaagtatataaggaaatatatgaccagataagaaagcatggtgcgtgcttgacaagcatttaggtaaataaatgtgcataaggcatgggagtattgtatggagaaggaaaaggaattgagattcacagcacatactgaggctgtattttaatatgagaggttacatagatgtgttataggttgttagacaggcatagagtagggcagaagagggctctcccctacccactaggaatgttgagtgatggtttggcaattatcacattgcctccctaaaagtgacagattggcagatggtgccaggaagaggccatttcctgatgggccacacctgttgcactgaagtgttaattgaatggagacgccaggaagaagcaacttcctgggcatatgcactaagagacaaaaatggcagagtttgcctttccagg

SEQ ID NO: 392738 - DNA, 201 bp, Homo sapiens
tttcccgtaaccattctttatgccactggtccttagtctttagaatgttagaattaaaaaagccttaggggccgggtgcggtggctcacgcctgtaatcccagcactttgggaggccaaggctggtggatcacctaaggtcaagagttcaagaccagcctggccaacatggtgaaaccccgtctctactaaaaatacaaaa

SEQ ID NO: 392739 - DNA, 329 bp, Homo sapiens
ggggattaagttaaaatgaggccattagagtgggtcctaatccagtctgactggtgttcagataagaagagaacacttgggcacataaagagactctaggctgggtgtggtggctcacagctggaatcccagcactttgggaggctgaggcgggcggatcgcttaagctcaagagttcaagaccagcctgagcaacgtggcaaaaccccatctgtacataagaaatgcaaaaactagccagatgtggtggcgcacacctgtagtcccagctactcaggaggctgagatggaaggatcacttgaacccaggaagcagaggtttcggtgag

SEQ ID NO: 392740 - DNA, 241 bp, Homo sapiens
ttccattctcatcagagcaggaaggagaggggcctgaccatatctgcatttcagaaagcccattctagcaggaggaggagagatttggaagagaggagcaaggaggtgggtgacatgaggaggtttgaaaggatgcaggtgagatttaatggcatgaaccaaagccgagcggttctaatgtggcagaagagtggagtggaaatgggggtgaggattggagggaaatttaggaggtaggatg

SEQ ID NO: 392741 - DNA, 340 bp, Homo sapiens
gggccagtacggatgtgggtcccagtgtgaggggcgggcagaggaggggcacacaggcagtgccagcacagcacagaggggaaagcctcagtgacccctttcgccccaacccaacagcagcaggcggcttctaggatattctttctccaatcccctccttctagctctcacttctgaggtccacatggggagaattcagatagacttctagtccacagtataatatggggagaaaagctgggggctgaaatgagtcagtatccaaagatcttcccggctgatttgacaggtttcacttcccttccctctctctccacatccccaccacacacacactcac

SEQ ID NO: 392742 - DNA, 541 bp, Homo sapiens
gagctacctcattgtggtagactgaataacagccccccaaaaatgtccaagtcctaattgctgaatgtgtgaatatgtatgtcacttggcaaggggcactgaggttgcagatggaatttgtgatgttgatcagctagccttcagatagggggcttatcttggactatctgggtgggcccaatgtcatgacaggggtccttaaatgtggaagagggaggcaggacagtcagtgtcagagtgatgcgatgtgagaagatctccacccatcatacctggcttcagagaaagagggtggggccgtgaaccaaagaacgtgggcagcatctaggagctggggaaggcaaataaatggattctcccccagagtctccagaatggaacacagccgtgccagctccttgattttagcccagtgaaacccacattagactgttgacctctataactgtaggataacaaattcaaattggttaagccaaaatgtgatcatttgttatagcagcaatagaatattaacatatcccctccccacaaatcccca

SEQ ID NO: 392743 - DNA, 325 bp, Homo sapiens
cgggcagatcacctgaggccaggagctcgtgaccagcctggccaacatggtgaaacctcatctccactacaaatacaaaaattagctgggcgtggtggtgcatgcctgtaatcccagctactcaggaggctgaggcaggagaatcgcttgaacccacgagggggaggttgcagtgagctgtgatcacaccactgcactcctgcctggacaatgcagagagaccccatctcaaaaaaatgaaaaacaaaaaacaaacaaacaaaaacacaaacaaacaaaagaggtgactggctgggctaggcttcttcccaaactcagtttccag

SEQ ID NO: 392744 - DNA, 403 bp, Homo sapiens
ccctggagctcctccttgtgctgtgtgctcttgttcccttctaaagagagggggaattcaaaggagaaccagctgcctacagctctgggttttcctcctctcagcctttcctcagtagctaagccagacagaagcagagaaaaaaggccccagccccctcgcctccaagttgccttctcctgacagccagcaatgtggaacggatcccaaggggtaacagggcagggcaataattaattatgcccccccaccgccccgccgccttccagctctgagttgaatctcaaacccctgcccttcagtggctgaggcagcccagctgtccgccgccgggtctatggaaggtcattgaaaccatgtctctgcatccctaactcagcagatctgcttctggtgtcctacg

SEQ ID NO: 392745 - DNA, 311 bp, Homo sapiens
acaatgtctgtttcccaatggcaaatccctgcttgttccctcacctatttctataatgtattgtcatttataacctctgacagttgtgccacatttcccacattacacagaaaccaagcacagtaattttggaaggttttgtactagaaattggattcctgaagaaaagataacctcattttttagtcagtacagctaactcatgaaaaatgacttagtttccatatactacttttcaatgtaaaagaaaatttttaaaatatttatgacttcaacaaatcttggtcagaagagtttttatcataattctt

SEQ ID NO: 392746 - DNA, 417 bp, Homo sapiens
cgtctagaggatcccttcttgtgcggcagatacaggctgcagggtaggcagctttctgattttgtgatatctgtgagtagccacttgaaggaaattaatatcgttcactggagaggcagactctaacaaaaatataacaattgcatatttgacaaagatcaggtttttttttttaacggatggcttggttgatttgatctagggtaacacagcggcatcacagagggcatgcgctctggagtctgacacaccctggtttgttttctagctctgccatgtgcaactaaaaacaactggatgtcatctctgtcagctgtagcagtgaggcctcatgagatgagaggtttgtacaccctctagcacagtgcccagcacttggtgagccgaggctattagcactgctcagacttaagacca

SEQ ID NO: 392747 - DNA, 415 bp, Homo sapiens
cttatataaaattacatagtacagttatccatctgtatctgtgggttctgcctctgtgtacatggagggctgactgtactgtaattatcttggagataaaaagtgttatgagttcctttctaagaagtttggaattgctgttttaaaattccttatattgactttaaagttaccattacttgttaaagactaataattaacatgtactaagcatgtactgtatgccaagcactgttgcaagttctttacatgtattatcttagtttaccttatgagaaaggtagtactgttttcatttttagagaaggggaaaccaagctacacagaggttgaataacacagaggttgaatagctagagtgtggtagagccactctgactccagaacccaggcttaacaggggactcacaaccaa

SEQ ID NO: 392748 - DNA, 623 bp, Homo sapiens
tctaatacttagcttttaggtatttgcttcagtagtccactttatgtgttagtgttcgacattactagtgggattttgcttctcatgctctattttctgatttctatcaccagtggtttcatagttgtatacagtaatctctggttagagacagaggcagtggcctgctggggaacacaccagacggaaagtgagagttccttgttttgggctttactttgcccttgacttccagtaatcagggtgtttccttgttctgaaacacgcttgtgttagtcacaacaggttcacaactggcagacaggtaatccctgaacaagtaaatcccagtggaaccagaaaactgggtcttgttttccttaattggaacctgacttagaatcagctattgaactgggaaacaaacaaaaaataagtgttagccattagaaaatgaatttaaattactggtctgtccctatttagaatttcttgcaatcatttccactgtatgtaacactgaaatcctttgtggttgtctgctgcaaaagtgaatctttgacccagcaactttaaatgcttttgacaccattgggaattttgagaattgttaatttaatctgcacttgtcctaggtgggggtg

SEQ ID NO: 392749 - DNA, 328 bp, Homo sapiens
agacaaggtctcactctgtcacccaggctggagtacagtgtcatgacactgcagcctcaacttgccaggagaatggcatgaacccgggaggcggaacttgcagtgagccgagatcacaccactgcactctagcctgggcgacagagtgagactccatctcaaaaaaaaaaaaaaacaaaaaaaattgacccattcttgcaacagtttcccttccctgtcctttgaaggtatgggcatatactttttctacatattttataaatcccacataaatgcatattatttttgcttcagacagtcaagtctttaaagaaattttaaaaaaaaa

SEQ ID NO: 392750 - DNA, 666 bp, Homo sapiens
atggcagccatcttaccttccatcagaggagcctcaccgtacccaggaagaaagaaggtgaaagaggaatgtgaaacaggtggctgggacccagaaaccctcttaccctgcacctctgtcatacttctcccggggcatagggagagttattctgcttctctttgccttgttttgtaacatggggtagttgttggtgcagccatgttgtgctgagtgaacatatattaagatctttggaacctttaggagactgaaaataggtaagtatgaattagtatttctggaatggtattcagagaacttcgtaccatttttataaatgtgaaaggtaacctaattagaacagcttggcacttgtcagtacactactagatttcaaaatcagattctacttacagggagaaaaaaaaagcccaatatgttgaacagtattgaaattgttgcataaataaaagtccatcattgtagaccagcttactgaagtgaagaaagaaaaaaagtatatctttgtcttgaaggagtagatagtgacatgtcatgtttctttcaggatatttaggatctggcctaattcaaaagaatatttactgaatgcctatgttactgctgctgctgtcacatttacatgaaaataaaatgtaaattattttatttctatcaaataag

SEQ ID NO: 392751 - DNA, 617 bp, Homo sapiens
agttgaagacactcccatgagcactagatatgaatgtgggtggataggccatgacagcaaatggccctgcctttattacctgactcacttgtaccacaatagtcccaacatcactcactcctcatttattctttagggaactatttgaactctttcagaagacggactcctcgataaagcagtagtactcctgtttccaacatttcacattattaaatgaaaatgcaaggaacgaagaagggaaggagagaaagttggaggaggaggaatgcatggaagaagagaagacgaaaagaagaaaaataccttctcactcccacttctgcaaaatccactccaagcaatagtagtagagtaacaactcagctgaaaagtggtagcaagcaagactaaaattttaacatatacagcaataacactgacatctgtctgtcttagcccaagtatgaaattacagaacttagcagacatgtttaaatcttacactcttacatactttttccacaaattaaaaggataatattgtttgtgttagcttacatgggatacacataaaattagatattaggttattagtgacaattaattgaattgtttaaaataaagaaacttctgat

SEQ ID NO: 392752 - DNA, 153 bp, Homo sapiens
  misc_feature (111)..(111): n is a, c, g, or t
  misc_feature (116)..(116): n is a, c, g, or t
  misc_feature (137)..(137): n is a, c, g, or t
acaagtgcaaccaacctgcttctccagagatctcccaagacatcaacaatggggtcaaggaaaacagacacccttagggtcttctccacttagctccctttggtgacaggnctggncagcagcagcaggggatggtnagaaagaagcagctct

SEQ ID NO: 392753 - DNA, 364 bp, Homo sapiens
ctcatggattaaaggaattggtgcttaatttttttagctacagaagtgactgtcagagaaaaatacttcttaatcctttcatttaaacatttttttggcgattttttgaaggcaaaaaatgtgatacttctctttggtgttggaatccctagctatatttcagaaaggcactttccaatagatgttgatggtagaactgtcatttctctgtttttggatctaaatttagattatagcatgtctgtaagatttcctgtcagctgaaatggaaaactattagcttaatattcctcctaggactttatccttatacgaatgatagctgtgcctgagtcttggccttactttcagtttcccagtctct

SEQ ID NO: 392754 - DNA, 745 bp, Homo sapiens
gcagccccttataaaaccatcagatctcctgagaactcactcactctcacgagaacagcatggagaaaccacccccatgattcaattatctccacctggtcccacccttgacacctgataattattacagttcaaggtgagatttgggtgaggacacagagccaaaccatatcaatcaggttgctttgacatcagaaaacaataaatataattaggagaattaacattttttctttaatagaaaaatatatgatcatttcaagagatacaaaaaaatgtaaagttcaacagccattcaagataaaaacagctaggcaagctaggagtccaagggaactttcttttaagagacactagatagccacaaaaaattacagaaaaatcttacttgtctcaatacttgaaatacggaaagctttcctttcctgtaagaagcaagcccatggtcccagctgtcatcactgctacccagcattgactatgaagtcccaggcagtacagcaagacacaaacaagaaaaaaaaggtataaggatcaaaaaggaagaaattttcaaacatcacctttcacagatgatatgatcatataggtagaaaacctaaaataatctaacataaattattcccagtagctaaacattaagaaatatgtaatcccagcagtttgggaggctgaggcggtcggatcacctgaggtcatgagttcgagaccaacctgaccaacaaggagaaaccctgtctctact

SEQ ID NO: 392755 - DNA, 608 bp, Homo sapiens
tcggtacccctctgacgagttccccaagaggaaggtcctccattcagtcagttgagggggtttagaatttcatttttggtttacaccaattagagttcatgtgagagttctgaaatgaaacctcaccttggagaatgagtagaatttagtcagacttagctttggttctgccattttgttttggcttcctttcacatgaagacgggccattgtcctgtttgctcttgttccttggctggtttcaatgttagcattgcccttacagactgggcagaagagtagacagacttttctttgggtattcaaaatatcaccatcaagtactgttaacgtgcttttttagactggaaactttcccaaggccgttttccccacccactgacttgcctttagccatgatcatcattgcttttgtcctgtctgtaagaataaaaagaaaaagtccttttaatgtaaaagtcataaaccatgtcctgacaactgcagagaattatattgctcatttgtttttattgttagtataacttttaattgtcttccttatctttgtgcctgactgttgtttgctggctgaagttaactatgttttgaaagtcagttcagaggtg

SEQ ID NO: 392756 - DNA, 391 bp, Homo sapiens
caaagcatctgttttctcagtcttaagatttctgtttgaatgttaatgcatgccggccagtcgtgcccgaattccaaagggaggagggtagaatgaggtgtgtccgatcctcccttcccatcatgccctgcactagtctttcaggttaactttggaatccccttggccaagaggaaggtcctccattcagtcagttgagggggtttagaatttcatttttggtttacaccaattagagttcatgtgagagttctgaaatgaaacctcaccttggagaatgagtagaatttagtcagacttagctttggttctgccattttgttttggcttcctttcacatgaagacgggccattgtcctgtttgctcttgttccttggctggtttcaatgt

SEQ ID NO: 392757 - DNA, 431 bp, Homo sapiens
ccctcctgctctccttcctccctcctctcttctccctcagctctgcaaattggtgaccccccgcaacccggggcccatagaggctggaatggagtctggagaccgcagctccaccctgcctctccgtcactgaacgtgtgaccttggggaagccctttagctcctggagagccggagccacctaagagtgcattcgatttaaggacgcatctcctctctgctcaacaaagagggaggggttcctgcacacgttggatttctgccctcatggagcttacagattcattagagcattccagaaaatgtgaagacttggggaacttgagattctagagtggcagagtgatttacatgccactgagcggctgggtgccgatgaatagcgaggtgccgataaatagcgaggtgccgataaatagcgaggtgccgat

SEQ ID NO: 392758 - DNA, 314 bp, Homo sapiens
ccaaagtgcagggattacagctgtgagccaccatccctggcatatttttgtaaatttatataaactgtttgttttccataaactaggatcatgctgtatatattgttctatttactgactttccaactcatcaaaatgtcttggagagctctgtctgcacctgcaaatctctcccagggcttggcacactatggtccttgggctgaattaggcccacagcctgtatttgtaaattttttttttttttttttttttttttttaagggaaaccacttattttaatagagacaggggggggcggggaggggggggga

SEQ ID NO: 392759 - DNA, 290 bp, Homo sapiens
aggtggggacctttttgggggtgattaggtcatgagagcaaagccttcatgaataggattagtgcccttataaaagacgcctgagagagactattcttcttccaccctgtgaggatgcagtgagaaggtgccagctatgagctaggaatctgaccctcaccagacatcaaatctactggtgccttgatcttggacttcccagcctccagaactgtgagaaatacatttctgttgtttataaactgctcagtttatggtactttgttatagcagcccaaacagactaagac

SEQ ID NO: 392760 - DNA, 412 bp, Homo sapiens
gaaagcaggttgagttcgggtcgagctgtgcgccttttttcctctcgctctctcggttatcataaccttgtattccctctggaaggaaatggaaattcctttggatcatcttctaggtaaacagtttaattagctgcgtgaggtgacaaacctgctcggatgaagtcatgggagctgaacgaattggcctgaatcccaagaggggagtgttcagggcgcgcgtgtccctcggagaggctgaggtaacgctggctccttcccgggagtccctgaacgcccggctttggaatctgcagacagctcttctagcagggcgttggcacctactgactaaccgtgcaatcactcagcagctgtgatggttggtgacatgtctttcacagcccaagatagcctccctagactgagcaaa

SEQ ID NO: 392761 - DNA, 374 bp, Homo sapiens
ccctgagggctttaggctgagattgcaagagctctcagtgtttgcctttcagaatgagacctactgagccctcttcaaggacctgaagcttcctgctgaggtggagcaccagcccgcaaagagttacaaaaacctcaagaaccccctgcatttcttttgaaatcaaatatttgtgaagttggggagagtttctctggaaagttctggatgtagttgagagctcagagaccctaaggctggaagttggagctctgactgccatctttgggttgggctgaacagcccaacagggccagggaggtgcctcgggagagttgactgctcctcatcccccttcccctcctaacacacacacaaaaaaacattcagaagtg

SEQ ID NO: 392762 - DNA, 727 bp, Homo sapiens
gaatatatgaaattatctctgagaatgtaaaagttaattggctaggaaatgtattgctggacagtgtgaaggatccccttgagatttgggttatcagtttaaaaggagactagccaatgctgttaccagttttctatccatgtttagcttcttgggttcatatgcaaagtaggcagagagttaggatataactagcatctttacctggtgagtacaagggatgagagtagtaaggaagacagtgatgtatattaaggagtatttatagtgatggaccacataagctgtgtaaacgagaccaccaaaggaattagggtgctataaatcagtgtaacaaatggattgaggatcctgttagaatcagaattgctggagccagagtaaaaagtcagtgagttggaaaaatagaaggtggtgatcagacaataggatgtaagctttttgaggtcagggatttttgtttgtttgttcattgctgtatctctataatgcctggccatattcagggttcaatatatgtgtgtcacatgaattaatatgatattttaaagtgagattttggagttggtgcaatttttggtaatgccaaggagtagagtataacaaagtggttgagtgactaaggcgagaaggagaaaaaaaataattgaacgtgatgaggtcatggagtctcagccataaggatgttaaagtcactgaagtaatttttttaaaaaacagagataag

SEQ ID NO: 392763 - DNA, 175 bp, Homo sapiens
atctgggggctgagaaggacatcaggggatctgtagccaggagctcaaggtcacctgagggctgccttggctactgggggctcctgggaagccagtatcagactaatcctatcggattgggaacaggcttcccactggagtgctggcaggagtagctccctgcttgctggcagaa

SEQ ID NO: 392764 - DNA, 164 bp, Homo sapiens
gggtttctaattttcaagaagctggaaacctgaatttttttgtttaagtctcctgacttttgcatgaaatattattatatttaaatgttgaaactagtttaactctaaaagacaagacaagcccatgtgaagcaaactgggcagagcatggatgagtgtcctat

SEQ ID NO: 392765 - DNA, 166 bp, Homo sapiens
atgttggtcaggctagtctcaaactcctgacctcgtgatccgcctgccttggcctccaaaatgctggaattacaggtgtgagccaccatgcccagccctacactgtggactggtatctttatgaaactctccccttcctaacctttgtggcatagtttccttctgg

SEQ ID NO: 392766 - DNA, 107 bp, Homo sapiens
tttccaccccctaagtgatggagatggggtgtctgcacccctgagcgatggagagagggtgtctacacccctgagcggtggagagagggtgtctacacccctgagcg

SEQ ID NO: 392767 - DNA, 276 bp, Homo sapiens
cataattgcaataaattgaccatttctacctcctttggctgagccctggaccttccatgtcttcactttggattaattgtgattttcctgcctcgtttctatgttattttttctaatttctgaaaaataactttgaagtcagtttctgagaagtggcttttttttttccattttacattttacatggtgctgttttaatgacaatattacttttgctagctgtgtgatgtctctgtgctgtaaaaaagtatcccagggatctgacagacaattagg

SEQ ID NO: 392768 - DNA, 497 bp, Homo sapiens
  misc_feature (29)..(29): n is a, c, g, or t
  misc_feature (31)..(31): n is a, c, g, or t
gtcatagctgactcctgagggtaaaactncntcagcgagagaggagagtaagtgggacagagctggccacgttctaaggcgggatctgggaactgaggagaaaggctactgcgaaacgccctgcaaccaaaggactgggaggaaacagaactatcaaaagacagagttgaaggcccttagcctccagaatattctgccatgaccccatatccttcctagggttggattttggaaaaatcaagtaaagggggctctgtttcataagaggttggtgcgtggagaagaaagaggaattgattgacgaatgtgagtcggaacttaccccagaaatggtcacaagagggaataaataatacaggggtggcagctggagggtgatttgcttagacaatattaacttaattttcaaagtcaggggctcctcaagttgtttttgaatattactgtcacagtaatcaagaacgtaatatagaagtcatctctgcatttcatttttc

SEQ ID NO: 392769 - DNA, 315 bp, Homo sapiens
tgtgcagtgtccccaacggctgcactgcagcttccaggcaacaaacgtcagacctcaaaacagaggaacacgaaaatacatttgaaaagagactccacagggagatgaaaacgttaaaaaataaatcaacaggccgggcgcccatggctcacgcctgtaatcccagcactttgggaggccaaggcaggcggatcacctaaggtcaggagttcgggaccagtctggccaacatggtgaaaccccgtctctcctaaacgtacaaaaaaattagccgggcatggtggtgggcacctgtaacctcaattacttgggagg

SEQ ID NO: 392770 - DNA, 603 bp, Homo sapiens
atagtttgttagtagcagctggccgggtgcggtggctcacgcctgcaatcccagcactttgggaggccaaggcaggtggatcacgaggtcaggagatcgagaccatcctggctaacacggtgaaacccggtctccactaaaaaatacaaaaaaattagccaggcgtggtggtgggcgcctgtagtccctgctacttcggaggctgaggcaggagaatggcgtgaacccaggaggtggagcttgcagtgagctgagattgggccactacactccagcctgggcgacagagcaagactctgtctcaaaataaataaataaaataaataaagataaataaaatttgttagtagcagctgatattctctaatttctcaaaaatatttctcatactggcaaaaataattctggatgtaaaatctaagagggttttacagaatctcacctctcgagggcacaagtaaacatacccattaccaaagataacagtaaatttagaattaaaaaataacttgaaatatggaaaaagttttaaagaatctgctgtttatcactgttacttaatggagaccagatgaccaaaaaaaaaaaagtttcaaaaagaat

SEQ ID NO: 392771 - DNA, 276 bp, Homo sapiens
gaaaacaaatccatttacaatagcattaaaaaggataaaatactaaggaataaacttccttgtgggcataaggaataaacaaaagaagtgtaagacttatatactgaaaactgtaaaacattgttgaaagaaattaaagatgatctaaataaatagaaaaacatcctatttcatgggggctggaacacttattattattgagatggcaatactctgcacattgaattacagattcacagcaaatcctgccaaaatcccagcggccatttttttttt

SEQ ID NO: 392772 - DNA, 510 bp, Homo sapiens
cactctcggccttcgagtacccggggcccaagcggaagctctacagtgccgtgcccgggaggctcttcgtcgctgtcaagccataccaaccccaagtggacggcgagatcccccttcaccgcggtgacagggtcaaagttctgagcatcggtgaagggggcttctgggaaggcagcgcccgcggccacatcggatggtttccggcggagtgcgtggaggaggtccagtgtaagcccagggacagccaggcagaaacccgcgctgaccgcagcaagaagcttttcaggcactacaccgtgggctcctatgacagcttcgacacttccaggtggaatggctgtgaaggaagggggcaggcgagccaccaggtagccagatcttctaagcacagcaggtttgagttcgtctgatgtgtggaaagagccctgcatctttgacaatgtgactggcacaggcacgtggttggatttttctgcagaaaccacacctgtgtgtcaccagctgtgggga

SEQ ID NO: 392773 - DNA, 794 bp, Homo sapiens
cactctcggccttcgagtacccggggcccaagcggaagctctacagtgccgtgcccgggaggctcttcgtcgctgtcaagccataccaaccccaagtggacggcgagatcccccttcaccgcggtgacagggtcaaagttctgagcatcggtgaagggggcttctgggaaggcagcgcccgcggccacatcggatggtttccggcggagtgcgtggaggaggtccagtgtaagcccagggacagccaggcagaaacccgcgctgaccgcagcaagaagcttttcaggcactacaccgtgggctcctatgacagcttcgacacttccagacggagtctcgctctatcgcccagactggagtgcgatggcgcgatcttggatggtgccatctcagctcactgcaacctcggcctcccggtttcagcggttctcctgcctcagcctcccgagtagctgggacttcaggcacacaccaccacacccacctcatttttttgtatttttagtagagatgaggtttcacccttttggccaggctggtctcgaactcctaacctcaagtgatccaccctccttggcctcccaaagtgctgggattacaggtgtgagccaccgcgcccggcccacatctctgcattttaaaaaatgtttcaggagatcagtgtagctcaggtctgcccttgagagaaaacactatttcaggatgttttcacatggtcttcctgtccctttttaagttgttgaaatgtgttatgtttccttggagaagacaaaaatggagctatgatgttgctt

SEQ ID NO: 392774 - DNA, 789 bp, Homo sapiens
ctgcttcctgacatggcagctggcttcccccagaacaagatggaagctacagtgtctcttatgacctaccctagaaaggtatttcttatttttgctactttctatttactagaaacaaatcacaaagtccagctgcattcaaggcaagaattacgctctacttctagaagggaggaatatcaaacaattgtggacatgcaatcatgtaccacttaacaacaggaatatgttctgagaaatgtgtcattagacaattttgtcactgtgtgaccatcagaaaatgtactcacacaaacctagatgggatagcctgctacacacctatgctatatgacacaccctattgctcctaggctacaaagctgtatcgcatgctactgtattgaatactgtaggcaactgtaacacaatggtaagtatttgtgtatctaaacatagaaaaggtacagtaaaaatatgttgttataatcttatggggccaccattgtatacaaggtctatcattgacagaaacatcattatgcagcccatgactgtattttgaaatacacacaggtgacctgtggcatactcagaaaaagatatgtaatttattcctgcataggaaagttaatttcacaaatacacacacaggcacacatacagacatataaagagacaacttaagcagcaaaaatcctcaataggcatgatatgccagccacaaaaggtaacacaattctgggttggaataaaaaaaaatggcacccagaacaagttccatgatactctgtcccacttagactacat

SEQ ID NO: 392775 - DNA, 190 bp, Homo sapiens
cctataatcccagcactttgggagatcaagatggtgggatcgcttgaacccaggaatttggggcttcagagagctatgagcatgccactgcactccagcctaggtgacagagaaagatcccctctctaaaaaaacaacaagtgaaattacaaagtagctcacatggaatgaaaaggaagacacacgtatg

SEQ ID NO: 392776 - DNA, 407 bp, Homo sapiens
tccaagggaactgattggagaggcccttccccaaggctcctattctagccccgaacaaagcctaatttgtaggtctgtgtgcagacatatgctgggacagccaggcacacagcctagagtttggctcaaattccttccttctgcctgggatgtgggggtggggaggagagtccactccctgcacatccttttccggcaccagagcaggcaagagttagacttcccgggttccagtccctcttcacacttccttatctgtgtggctttgagtgaagtccttctctctgagcctgtttccgcatctgtaaaacgggaataattaatgccatttctcagggtggttgctgagagacagtatgtaaaaggcttagaaaagtgtctgtcccaaagctgttatcgatgctgtt

SEQ ID NO: 392777 - DNA, 437 bp, Homo sapiens
taagaatgtcatttccatttaaattgttttacagactcagcacatattcaagttaaatcccaccaggattcttgtaagccaccgctctttacaatgttttaagaaactatattccagctccaggcgggagctatagttgcagctcttcattcctgaaccccgcaacaaaggcacacacctacttttattcaacttctccctctcttcaagcccagtgaagccctgaggcacttggggaaccctgtgagtggtgatggggagaaaagcaaatagaggaagtaggcctggatggttagaagcctctcgaatggtaatgggaacagaggtgctacagttggggataaattttttaagagctcaagacttaaggaatgatgcttccatttcatctgaaagggaggcagaattcacagacggggaaaggggttgggaaaaga

SEQ ID NO: 392778 - DNA, 401 bp, Homo sapiens
ttagcacaagcattgttctttgttctgtgggtgataattgctgaataataacaattatggcaacaaatggttaattaaatgaatgaatgatatagatccacacaggagtactatcaggtaaaaatagccttaacaccaagctgttttcataaagtagattcatttacagattttttattattgttagagaaagaacttcttttaatgaaaaaaatgttagatgatagccagtaaaacacatttaattgttaattctgggcttagaagaagaagatacagtaaacgggaatatcgccatacattttacaacaatcatttgaaaaggcagtcattttcccaagcagttcacatttgatcacctccattaaggacttcacacaagggaaccatggtatctttct

SEQ ID NO: 392779 - DNA, 422 bp, Homo sapiens
aggctaactttgggaggaatttcgttgacagtttaaccttaaagcaaggatgataatagccctttccaaaactaaactgcctttgtaaaactaatgaaaggccacaaggttaggattatgagaggtgtgtgaattctgctgaagatgtaggcatactttccataatcccttactattcaggagtcttgtggccagaggtcacaagattggtgccttccccaattgctcttacaaataccaacactattgtagaatgtaagattggtcttttgagaagttcttcagactgactccacctggacttttgggactcgactggtccaatggcccccacccagatgcagcctcagcacatgaggcctgttttccacactccatgactggatccccaatcaatcagcacccattccctagccccatgc

SEQ ID NO: 392780 - DNA, 476 bp, Homo sapiens
gagtatgtgtgtgtaagtgcactgtatgcatgcatgtgtgtgtgagtgcacaggtgactgcctgcctgcagctgcactagggaggaggcatgcagcagtctcggtggcccctcagtgcagctaagccactgaatcaggtccccagctacctacctggtggtttacctgcgacattcgcctgaatgagatacaaataccctcgcaaggatgcttagacttgtctcacgcaagaaatgccaaggtctgggttcatttgcatatttataataaaacttgcagttttcaaaagcacctactggtggctccactcttggaggtgcacaccccacatctcacctgtgagaccaaggagctgctatctgaacactcagaaaggagagcagcaggtggatgggggcggcagaggaacagcattcaaagtcccagcacccttcatcccatgacctgtgcacccaaaacccagaggcgggcatttg

SEQ ID NO: 392781 - DNA, 509 bp, Homo sapiens
tgactcacggcagattcactgggtaatgggtgtgttcttaaggcaacgcaaccacccagcaacacgtcttttttaggaagccctggccagccagggtatctctaggttgtcctggtttagcattgcctcctagccggagacttcttgaggctgactaaaggttgctggaagctttcttgcttcttcatccctcctacttcctcaggttctgcagccaggctccagtgcaggagaaattcagcttccctcgctcaacatcctgcttcctctctccaatcattaggtcaggtctggggagatgaaggatgtaggacacaagttggggtcaattaggggaagtcaaggagagtatggggcatgaggaatgcacaatagggatattggggagagctggaaacaaaagaccaccagattgagtagcctagtctcccagtgctgactgagctagaaggcaaggctcaactggcagtgggaagagaagtgagttcagacatgccaggctgtcctta

SEQ ID NO: 392782 - DNA, 568 bp, Homo sapiens
  misc_feature (384)..(384): n is a, c, g, or t
  misc_feature (396)..(397): n is a, c, g, or t
  misc_feature (408)..(408): n is a, c, g, or t
  misc_feature (436)..(436): n is a, c, g, or t
  misc_feature (454)..(454): n is a, c, g, or t
tgtggagatggggtttcaccatgttgcgcaggctggtctcaaacttgtgagttcaagtgatctgcctgcctcggcatcccaaagtggggctattcatcttaatgacaccattgagtacaatctctgtgtacgtggatgcgataatttgtgtagcaggatttaccctaaggttctcaggcagaaaggaagctcccttctcaaaatgacaaaatgtagagtattctaatctagagcttcgtttcattctggcagttctagcctaggcctggcagatgcttcattaatttagaaagttattttcaaaatattttttaaattctgttttaaatttatagaaatattatttgttcattgtaaaattcaaaaactagagagagagagagngctcctttcccnnccccccctccntttccttccccctcctcccactcccatnttcttacttcctttctcnaccccctccacttccttctttaattttccttcctcactctcctcccaatatcccaacatcttctccttttaccttttcattccattcctccaccctaccttcctattttcctcc

SEQ ID NO: 392783 - DNA, 401 bp, Homo sapiens
tgtggagatggggtttcaccatgttgcgcaggctggtctcaaacttgtgagttcaagtgatctgcctgcctcggcatcccaaagtggggctattcatcttaatgacaccattgagtacaatctctgtgtacgtggatgcgataatttgtgtagcaggatttaccctaaggttctcaggcagaaaggaagctcccttctcaaaatgacaaaatgtagagtattctaatctagagcttcgtttcatttcaaaatattttttaaattctgttttaaatttatagaaatattatttgttcattgtaaaattcaaaaacttagaacggtgagagagagagagagagagagagagcatgagagagagagagagagagagagagagagagagagagagagagagagag

SEQ ID NO: 392784 - DNA, 500 bp, Homo sapiens
tcttcaagaggcggcgcagctatacctgggaccagttttaagcccagtaaatcaagactgtctggagtgaacttcctcagctacctgccccccaaatgtaaaaactcatctggttgcattcacccctcttcctcccctccagtactaaaggaagaggtgtcgcctctttccaaggtctctccctgatctggctaaagcccctgatttcctcaggttcatttctcaccatctcctagctctcccgtgtttttcatctctgtttctttactggctcattctcctgactgtgatcatgttcagatttcttaatgtgtaaagaaacaaagtagcatcctccatcttctgtactcccataaatgaattaccaattgctaaatccagggggctctccaggcttcacctcacttgacatttccttagcatttgattcagctgaggactttcttcttggacgtctctttcctcagcttccaaaagcccactccctactatagcggttg

SEQ ID NO: 392785 - DNA, 170 bp, Homo sapiens
gtgcgtggcgtgtatgcatgtgggggtatgagtgtgcatgtgtgggttgtgtgcatgtgtggggtgtgtgcacgtgtgcatgtgtgtgcatgtgggtgtgagtgtgggcatgtgtggagcctgtgcacgtgtgtatgcgtgtgtggctggtgtgcacgtgtatgtgtgta

SEQ ID NO: 392786 - DNA, 379 bp, Homo sapiens
ggagctcagacatgtcgagagggagagggctgtggcccccaggtaggaccatggggcctaccacagttttgtgatgggggctcgttcaggtggttttcaagaggcattgagtaacatgggtgtgtcctggaggtacagcgcctcaggggctggcttgaggggctgtggacagaccctttgggtggacacgagcccttctctcctggatctctcccatcaagtcctaaaatctcgttcttccatcatttccttacttacaaagttcaggagactcattgtctactgggggaaaaaaatcaagctatgccgaaggctgactctatggctttgtaggggggccttgcagggtcaggacccatgccctcctctaggccacgtc

SEQ ID NO: 392787 - DNA, 307 bp, Homo sapiens
ctcctctagcactttgagcagtgtccctccctgcctcctgtctccttctctgttcccacactgcacaggggctctgcgtggggagtatgggggctcgctactgcctggagctgctgctattgctgaggtgtaagaaccctggagaggtaagaagatacggtgtgtgtatttcaggctctgtgtttcgtgcctactgctagaagcaaggtaggacccaagccaggaagacgtgaaagattccatggggtaataatcccagagcagcatctggaaaaggtgaacataagtaggaaagaaggagggaagt

SEQ ID NO: 392788 - DNA, 209 bp, Homo sapiens
agagataaatatttatctctaggcttaggcttacagttccaatcaaagtttatatgtcaataataacaataacaaagccattttttccttggaataattctattcaattcttcctccttgcaatcaaatagatagatgcaaacattgctactgctatcatttgtattaagagaaaactgacttgtcaatagtgtcaacccaaatatgaa

SEQ ID NO: 392789 - DNA, 130 bp, Homo sapiens
cagaaattctactgtgtttgaacagattggttaaatgataccttgaagaagacactattgcaaaacaaaaagttatgtagaaataacattctcagcaaagtgtgaaacagacagtgaatttataacctta

SEQ ID NO: 392790 - DNA, 441 bp, Homo sapiens
acatttgctaggtggagaatgggactttatgggagaaaacagcgaagatggcccagttatccagggagaaatggtggtggcttggactagaggtgggagcagtaaagatgatggatttcagattcaggtggtgaagcccccagacaacatggtgatgggaggtgcgggattaggagtcccaggtaaatcctgagttttgtttgggacaggacaaaatctgcagttttaagtttagaatgccaaccagatagatattttaagatgaaaaaagctaaacaggcatggttgctcatgcctatgattccagggctttggaaggctgaggtgggaggagacttgagcccaggagttcaaggttacagtgagctatgatagcaccactgcactccagcctgggagacagagctgtcgccccatctctaaaaataaaaaaaatatatt

SEQ ID NO: 392791 - DNA, 673 bp, Homo sapiens
aagggaaggagggaagagtagtagggctgtgggtgaaaggctcgtgaacaaccccctgatgagcattttctttcctccttgaaaccctgtggcatgagattaggactgcaaagtaacccaaccctttccatgcaaagtaacccaactctgataatttgccaggctggtaactggtgaatgtagggcttggatcttctgcttctcactcaggtctttctgtctcattacaccctgtgggagagtcaggtcccccagttcagggcccagggccatagcaagatgcctctgggggccagggtccggagctaggcaggcccctggtttcctggaaattaggaccctgagcctcccttttcatggcaacttggtcttagccttcaagagccatatctgagctggtgtagaccgggctcagggctaggagaggcaccatctagcaccagcgtctccacttgcctgctcctccttgtccaaatcctctgatcgtccaaaagctatttgatttcccaatgattaacccagctaagaggggagctctcaacaggcccaaagagcagatggagctgaaaggaacccacccctgcctccgtggagccatgggccccgggaagggttcccagcacataactctcctgccctgcacaaatcctaggagcgccagccctccctcccc

SEQ ID NO: 392792 - DNA, 421 bp, Homo sapiens
tcagagcaggacctaaggtggacttgaaagccgtcctcaagctgaacacagatgaaacagtaaagaagaggagcctcactggcactaggggtttaagcacaacctctaaccaaccactggctgaacgatgttactctgacccaggggcacctcctgggaaccaggcttaaaaatgaaatcacatacatccttggcaatctaggagactgtgtacatgttcaatgctatgctacctccagggtgattgaagagggaaaatctaagctattagtacctggctgaatgtgggacagaagcatactcttgaactttggtagtaacctccaagtctcgcacacactcaatggaaaagggtaaaaatctaaccagctgaagggacttaagcacaacctttaactaataagtggcctgtgccaaacca

SEQ ID NO: 392793 - DNA, 426 bp, Homo sapiens
aggctttgttttctacccaggattaatcattcactcatgggctttaatacaagccagacacaacctcactgtgcaaagcaatgccagctccccttccattctgatgctagcttttacattcttgttgtcagagtgggaactaggtttttgccccagtttcagaatcctatgaagtgaaaagtttagaaacttccatccaaggatgttagtcaaaaatgccaggacagctggactcagccattaatttgccatatgacttgcggccatttatttcccatatctgggctttagtatccatcccacaatgagaaacttggagtaagtgatattcaaagtcatccagctctgatttctacatatttgtgtttccttcttgagctaagctctgtgtatacgaagtcagtctccaaaaattttaagcagaga

SEQ ID NO: 392794 - DNA, 756 bp, Homo sapiens
aggaagttaagaacagtcctaaaatctctttggcttctttgtcctgatatgcaccggcattttcacagtaggaactagggtttctgtccagtttttttggttctttaaggaattaatgttattctgggtacaactgcttacatacatagcacatatagatgacatttttacaggccgtcttgttagactgacatacatggaggatagtgccacccgcctcacaagaacatcaggtaagctcaggcacagagtgcccaggaatctgtaaggcttcgcccacgcacaagtcagggctgccagtcacctgggttgtcttcactttatttggctgcgtctaatgacaccttccaacttttgaccccacccctggactgttgtgtaaacattgtatttctccatctgtaatgaaaaagctaacacatctctaactccagagacattttccagaacatgctgttctcaggcactagtgaggcggtaccattattcctcatttgttatccaaatgttggccatgtgaccacaccaaaagctcatcctgggccactgagactggtaattgaatcagaatatagtgaaatattcattctcatatatacccagccatcttacatctttggcttttttcagcagatccttgtggcactcagaacatccattttgcactgtgtatttttttcccttctgtgtatcctgctttgtaaagagtcacgagtggttttacaaataaagcctgttcttactcagaaaataggt

SEQ ID NO: 392795 - DNA, 676 bp, Homo sapiens
attcttaagttcgtggggctacaatttcctcatctgtccagacaggataataacatctacattttgtagttttgagaggattcgttgagatgacgcataaaatgcctgccaaaagatgtctcattgagtcttcccgctacctgtttatcttcctgacttagataatatttctaaggggactgtctttcttctcctctatctcagtggtggcttctgttgcttcactgtttgccagtacaaattttccctgtcactctctgttttatctggtcaacagcatgcatttcccccttggtcttctgataaggtatgtttaatgtaaaattttaactagtggttctgtattttaccagcttcttttgcttaaatttgagtgaaccacatgctgaatttttaagcagctttccttctatagcccataagtgagattaagtatgtgatacctgttgttattccatcttttatcaatcgttacttcccaattgctattcccatatttacgtcagaataaagtgtcatatttttcccttcatatagaattgaaaatttagtgttgtttaataccaaacaaatacttttctgcacgtctttctatagaagatttttgttccctgctcaacagtctgtatttggctgcaaggacattcactgagtacccgtcgtatatgactcactc

SEQ ID NO: 392796 - DNA, 626 bp, Homo sapiens
tcaattccattttgaagacaccaaaaataaaatcctttgaagaaatttaacagaaaatgtagaaaactcattgtattagtctgttttcatgatgctaataaagacacaatccttatcaaaattctaattgacttctttgtagaaattggcaagctgatcctgaaatgtatatagaaattcaaaacacctagactagcaaaagcaatttcgacaaagaataacaaagttggagaactcatactttccaatttcaaaatttactgcaaagctatagttatcaggactgtgtgttaatggaataaagatagacatatagataaatagaggtaagaatccaggccaggcgagatagctcatgcctgtaatcctggcactttgagagttcaaggcaggtggatcacttgaggtcaggagttcaagaccagcctggccaacatagcgaaaccctgtctctaataaaaaaaaaaaatacaaaaattagctagacatggtggcgcaaacctttaatcccagctacttgggaagctgaggcaggagaatcacttgaagctgggaggtggaggttgcagtgggccgagatcatgccactgcactccagcctgggggacagagtgagactccatctc

SEQ ID NO: 392797 - DNA, 464 bp, Homo sapiens
ttgatagtcattgtcactggcatcttatctgttttttcttgtttctgggctctgctcctctggaccaagccatgttcttgtaaaggttttggagaaaggtgtgcgattgtgcctggaattggactggtgggctatgaggaagtgaggagagggtggtatccaggatgaggcctttctctttgacctgtgggagttgggatagtgtggctttccctgagatggcaccatgggtagaggagtaggtttgtgggaagacagggagggcagtccagagcacatgggaggtgtccaggaggctgctggtcagccaggtctgacaatcaggagagagactgagcctggaaacagaagtgtgcctcactagtatgagatgcagggggaggcctgctggacagccagggctggatgtcaagagagaatcagggcggtagacaaggagttcgtgtgaatactggggacggaca

SEQ ID NO: 392798 - DNA, 322 bp, Homo sapiens
aagcatttgtaaaccatgcttttgtatcattaggtaaatataaaatatactataagttaacaaaactatggaatgacctgtttagtcacgaaagacaacacagtacacaattccatttatataaaatgtccagaatcagcaaatctagagaaaggagtagtttagcggttgcctagggctggggtggtggggaagaatagggatgactactgctaatgggtttagaacttctttttgagacgtgttttaaaattagattgtggagatggctgcacaattctgcaagtaaaatgaaaactatgagatgtataaacatgccata

SEQ ID NO: 392799 - DNA, 337 bp, Homo sapiens
ctcagttaatcttcacaatggtccttggatgtgtatactatgattttcatcattttgaaggtgagtaaatggaggcttgaggagattaagtaatttgctcaaggtcatatgactgataaaggctggagcctgaatgattaactaattcctaactctactctattgtaaagtctgggactaacacagtttacttgccatcagtatttactgagccttgcactgggctgggccaagcactgtgttctgccctgctggggacaacagtacactattgagctctgccctagaaaagcccactgcagggggagagagaacacaggtccatcagcaaggaacc

SEQ ID NO: 392800 - DNA, 653 bp, Homo sapiens
aaaatcaattgtataatgggaaaatatttttcttagccagaatattaatttcctcatttaggtttttaaaacataacaaggtatcaaagaggccctctaaaatatttgagttttactttaaaagagtctcaactaccttttgtcaaaagagcacttttcttggagaaatacattcatctgtacttttatactagaacattattttttcatttatttggttagttcacaaatcccaatgatatgttgttaaacattttgatccaaaatgggtcaaagagagatactaactcactgtaaaaatgatctttaaaaaaaaatacagagactattatgaaccaatgaaatatatgttgttaaagttttttatatgtaccttccaaaataaattactaatttcagtgaatcaaaatttaagatttcctaattgttctcttaaaaacgtgtcatttacaatttttataaaaacattcaaatattgttccaaatgtcttcagcattagacttaatatttgtttcaaattccagataaagtcaacatgatgggctcggcacaattgctcttattttgtgttcatccgtacctacgatcttgatctatttaatatgattaaccagaactaaggtaagacccagaagaacagggtctatgccta

SEQ ID NO: 392801 - DNA, 482 bp, Homo sapiens
cgatatgcggtctcattcttcgggtctcacttaaatgttacttcctcagagcgaccttcccacctcttcccccaaggacagactctccaaccctaccctgttacatacagtgaccctgaacaacacaggttgaactgcatggatctacttatacccagattttttttcaatataaattacactgatggcaagcacagccccccaccttctgtctctctttctctctctctgtctgtctctctctctctctaatctctattttctctccacccctgcttctttgtctctatctctctggtgaacagcaaggagatccctaggtccccatctctgaatcccctggtgacctgaggagggtcccccagaacatgccttgggagggggaaccccctgagtgctgggaaccgccactccacgtgcacccggccccagcctctactccctacttctataattaacattttttagctcccacacatgag

SEQ ID NO: 392802 - DNA, 260 bp, Homo sapiens
attttaagactcccaagcccctttattataaagtttaagcacattcttttcctaaataactttggtaaccttcttaagaataggaactatctccaattcagttgcttccccagaaagttaaatcctaacatttgttttatttcctcctcccatccttccttctttaatctcaaaaggctaatttttccagagaacaatttaagtcttaatcattttaatttagtttccaacatcactgtatgtacattaacccaagaacc

SEQ ID NO: 392803 - DNA, 419 bp, Homo sapiens
ggggattaacccactggcacaagatggcacaaagagcaataagagatagggtctttggctaggcgcagtggttcacgcctgtaatcccagcactttgggaggctaaggcgggcggatcacctgaagttaggagttcaagaccagcctggccaacatggtgaaaccccatctctactaaaaatacaaaattagcagggtgtggtggtgcatgcctgtaatcccagctactcaggaggctgaggcaggagaatcacttgaaaccgaggggcagaggttgcagtgagctgagatcatgccattgcactccagcctgagtgacaagagcaaaacaccatccgaaaaaaaaagagatagagagagagagagagagagagagatagggattttgcatgtgcctgtgtgtctccagagctcatact

SEQ ID NO: 392804 - DNA, 129 bp, Homo sapiens
acaggagtttgaggccagcctgggaatcatagggagaacccatctattaaaaaataattgtcctaaatctactcatcctgtgtgctataaaggaacagcatggtttactgaatagtttaagccagttat

SEQ ID NO: 392805 - DNA, 110 bp, Homo sapiens
gggctgaagaggaaggaagctggaaacactgcatagggctacttcacaccaggactcattcttggcccccggtgaccccaggagaacgggcgagttaaactgtcaaggag

SEQ ID NO: 392806 - DNA, 834 bp, Homo sapiens
gacaaaactcagccccaactccagtagctgatgcaggggtggaatttcattctgcttcttccttactgttattttatgcaagggggtggagcgtgtgcgtgttggggacggaaaagtgggaaaggcaaatggtccgctggaccacagtggtcattgtatgggtcagaaatcaggttactcttagagaaagaaactattgagaatcaacccaaagggaattaaatgaacacctgtaaaggaatgtggggacttactaagcacggggctgagaagatgccatcaggcaagggtgattccgatagtcggaggaagctactccctgatatagcgaggactgaggctcacatgtcacaaccggtcatcgtaaagaccagcggtgctgctatacctcccacagtacatagaataaccccgtaaagaatgacctggctggggcctgagagcattgctttacctggaggtgcagccagtcagccaggggaacgaagcagtatttgtgggctgagcagagagggccctgggcagatcctgggtgtgtgcacatgagggccccgggcagggcagggcagaggaggttgggacactgagtcagaggtatgctcctgaaggcaacccacaagggggccagttcgtggaactgcaggcctgatcctgagcagcatggtgcggagctgtctggacaggcctgcagagaagggcgcctaccttactgaggtcaaccacacacatccagtagccacaaggctgctgtcgcaaggcggtgcctggcctatcttgtgatgatgtttgtttttacacataatgttatgctttgcttatggacaagcaatggag

SEQ ID NO: 392807 - DNA, 432 bp, Homo sapiens
cacaccaggaacaaaagaataaatacatacagcttaatagatgcatcagtgatgtctaatgagggcagcagccatccattaaataaaaaaaaattactctgagagcagacataatcaactaattgagcaatgatgaacattaatagtttacagttatagttatttactatagttataattaatcggcaaattattaacattaatatagaaaatatacataaaaactggatgaaaaagagagaaataagcagatatagagggctacacattaagttaacacccagatccaggtacctgctttaagatcatgcctgcaatgtccagatgctctcaggaagtgatactgtacacaaaggtactcaagaaaaatgtcttcctcataccaagaaggcagtgtcctctacgtttgatgcttcatttggaataactttt

SEQ ID NO: 392808 - DNA, 220 bp, Homo sapiens
acacaacctgttgcacagaaattttagttttctactggatggagctttctcctgttagttaaaatttcttctcatcagagttgcttttttttggcagagactctgataccaaattgccacccttcttaaagcttcctgccaaactagtccttctgccatgggatggctcacttgggggcagccatccattttgtggttctggataaggtccttccacgtt

SEQ ID NO: 392809 - DNA, 415 bp, Homo sapiens
atgctatgctgagtcctgggtgtcttccgggacgtcatgccttactcggtttaaagctcgtcctcgtctctttgccagccttggctgtggtggcttgatactactgccgttgtgagtggtgtggtgatgaggcaggaggcgccagcccagagactcagggtcttattactccttggtgagaaacaaaacttctcctggggagtcgcttagaagggttgccggggctctggacatccttgtctatactctgtggtactgggtacgcaatgtattggtgttgatggagtacactttatggcaggaggagaacaggattgaagagcatacctaaaactcaatttctacttcattcattacaggattgaagtaatttatttttggtagttaatagtataattactaactgataaagttt

SEQ ID NO: 392810 - DNA, 170 bp, Homo sapiens
ggcattgtggcacatgtctgctggttcagcttctgtggagtctgcagtgggaggatggcttgagcctaggagttcgaggctgcagggagccatgatcatgccattgtactccagcatgggtgacagagacagatagtgtatcgaaaaatgaatctggtaaagtttgggta

SEQ ID NO: 392811 - DNA, 563 bp, Homo sapiens
accctgctactattagcttaagcctatcaaattctgagtgcttattggctgataggatagtcacatcatggagtgcctaaattaacactacatgtgaatttaccgtgtcgactatagcttgaaatggcgcccactgcctgatgcctaccagtctttctattatacatgcttcattaagccctaccttttctccacatttcccaagaagtgattttctttggttcttgaagtacttttgtacagatcattggagcttaacttcgttcctttatcaggaagtgttttatctcacctgcaagttcagtaaacacaattagcaagtgaggtggctttggaaaggaatagtacaccctgaaagaaacatagtgcccagaaactagatattggatattgcaaatttttcttttagagttactagagccaccttcctgaagcccactggagaaagtcactcaaaatagttctgtgaccaccatttagccccagttctcatatggtatacttgagactctggacagtaagacgaggcagggttgtaagtttgcacccaataccaggttaca

SEQ ID NO: 392812 - DNA, 355 bp, Homo sapiens
atattggaacctgcaagtgtgcagttcttcctgcagcttcaggcatgtatggaagtaaccaaggatgactccgacacagagactgcaaagaaccagctaatgagggggctggccactatgctgtaattgaaggtggtaagagccctttacaggaggaaagtgggtgcagatatggtcagatttgcaaattatgttgcatccaatgttgagaggaattagaggttgtactctggggaggaagacagcctagaaattactgaggcctgaacagggaaaagcaccttatgagagatctttcaggatgagacaaaatccagttaattttttttttaaataaaaatatggaacgcttcat

SEQ ID NO: 392813 - DNA, 118 bp, Homo sapiens
ccagcatgctggagcgtggtgggaaggagagaagcacacagtgaggttggcgatgagacagggtgagatcacgagcagcagtgaggactctggactttgtcctgaaggtcatgggtag

SEQ ID NO: 392814 - DNA, 350 bp, Homo sapiens
tacaggtgtgaaccaccgcacccggccaggttgctaagtcttcatctctgctctgacaagaaaaagccacaggatgcgtattccctcagcttctcttctactcatggtctccaggattttactgttcctttctctttcctgcacttgaagaggccctgttgctattctgggcccccatagtacccatctcttttctctgttcctgtaatagtccattgctataaaggaatacatgagactgggtaatgtattaaaaaaaaaaaaaagaggtttatttgtctcacagttctgcaaactgtacaagaagcctggtgccagcatctgcttgacttctggtgaggcctcaggaa

SEQ ID NO: 392815 - DNA, 277 bp, Homo sapiens
cttaatcagcaaaccacctccctctaccctattatttcacagaaccattactctttcatacttgtcagctctgcccttacaagctgacatttcattaagagacgtaattgaaaatctagctttcaggtaagtctgagggtcttccttcccccacgatttctctatttccgcccctgcctcagagcagctataaaccattttctgtccctgttagttaccatctgcttccccttcgtagttgatctcctcctcccttaacccacagctccgtgacaag

SEQ ID NO: 392816 - DNA, 187 bp, Homo sapiens
cggggggatatgaatatcatttcctattattttctgtctctagctatcggcccagtaactagcacgtaataaaacatggataaatgtttactaatgttactgaaacggacttttgtttggattaagaaccctacaagaaagacagaaaatgtcgccgggcgcagtggctcacgcctgtaatcccagc

SEQ ID NO: 392817 - DNA, 371 bp, Homo sapiens
ctgggcggggagaggtgtattccaagcagtcgtacggcatcatagcagatcatgcgttcctgaagtttcggttctcgtggcttcatggatggagagctgaggctcctgatgggattgaccccgtctgaatcagagagctgtaatggaatagggcaaaaggagacattccattacaaagtcaaaccatggtaaacaaccacagccaaaggaaatagaagaaagaaagaaaggaaagaaaatacaaaaaacaattatatacagaagaaggatggcaagttgctggaagacaaacagtttgcctacatcttagaattctggaacaaagatgtggccacgtttcttgagtcttttataggaactttagactagta

SEQ ID NO: 392818 - DNA, 488 bp, Homo sapiens
tcagctcaagaacagccttctccagaagtctcccctgagaactgcaggctggattccctggatgagcagtgtaggaagagcttatctgtcattacttcccagtgtctgtttatcagcttattcaatgcacccagaagcaagcagttccatggggattaattatttaggctatctaagctcaaagaaaactgatgtatgaaccagaggccagttactactttatgaataccaacgagagctaatactgtcattgaatacttatcacaggtgccgggtagcacgctcagagccctcactgcaacactaagagaaaggtgctactattatccccattctacaaatcagaaaactgaaagattagccagcatcccaagaccaggatctgatccaagcagcttagatgcagagccctcaaccactcacattctctccttaccaagaaatctccacgtgcagctatcttctactcagatggtactgggaggaca

SEQ ID NO: 392819 - DNA, 318 bp, Homo sapiens
ctcctgcaggcctagccctgtcttggcagctgcttcttggaggaaccaaacgaatccaccacaacactccaagggctgtgccctggagtcagcctgagaggggaaatggtgggaacttgctgttcattctcttgatctcagcacctgtgtgcctcttgcgtgcaagcatgtcacgaccctgggtacagagtttaaagggcaattctgactagatgcaacttctgtctcacactctgattttagtcctcaactctgccattacttacatgatatgccacgctccactgtacacagggaatttgcaaaagaccctagggc

SEQ ID NO: 392820 - DNA, 634 bp, Homo sapiens
ccattagatggccatgggggcgagttccgggagctggccaggggactccctcgaaacggactttgcaggattcttgctaaaactggacacggaagcctgaggctgaggcctcatggagaagaggagcctggctgaagttcaggcctggtgagaggctttgttacactcaactctgtcttcacagagcagaagcatccgtagacgatgtgaaatgaatggatgtggctgtgttccaatacagctttatttatgggcacagagatttggcttttatatagttttcacatatcacgaaatgtgattcttttgattttttttttaaccactgaaaaatgtaaaagccaatctctgcttcggacctgtgccagaacagggagtagcctggccgtatttggcccatgtgccgtagtttgccaatctctgtggtaggtattctataacccaaattttacagtgagcaaatccagagaagtaacgtgcccagtccttaacaatgaaatgtgtaaccaggatccacacagagcctctcttagctaaagctcatgttctgtatgtcgcatgtggctgcctgtccttggatctcccgtcggaaagagctgcacaaaccgtaacagcagagatagttgtatacgga

SEQ ID NO: 392821 - DNA, 369 bp, Homo sapiens
aatgcaagagtttagaattttaaaggtggaatagttctacagagtggtcctgggagggaggaaggtaacaggagctaaggaggtcaagaatctgtgaagctgtggggtcgaaggacactgagaaaccatggcaggatacactatccagatctcgaagttttcagggaacaagagggtatacctgggagatctacgtatgagaaggggtgaaggtgtgagcttgataagttaagcagagtttattcagaagttgggacaggtcttcctgtggtgtgcatgccatccatgactgtctcctgggggttgtacaagtggctgtgtggtaagggcaactgtggcacagcctcctgttagtgacaggcttctagg

SEQ ID NO: 392822 - DNA, 566 bp, Homo sapiens
ggaaagtttattctttctttcacatcatggctttttgcattgagtcatgacttccctaaatattctttcccccctgctaaccaaacaccttcagttcctgcgctcttccatttagaagccactctctgggcacattcaccttggtgctcactagttttactgtgtccctcttaaagtcactgcagaaagtgtctaaaactggccaggtgtggtggctcacacctgtaatcccagcactttggagggccaggcagattacctgaggtagggagtttgagatcagcctgaccaacatggtgaaaccctgtctaaaaatacaaaaactagctgggtgtggtagcgggtgcctgtaatcctagctacttgggaggctgaggcaggagaattacttgaaactgggaggcagaggttgcagcgagctgagatcttgccactgcactccagcctgggtaacagagtgagactccatctcaaaaaaaaaaactctaaaacttatttttcctcagaaagtaaaattaagcgcatacaaactgaatgatgatacccaaattgcaactgattctcct

SEQ ID NO: 392823 - DNA, 369 bp, Homo sapiens
agggaatttctgctcgttcttcagggcctacctcaaaggttgcttccatttctctcactcctcctagtcctgacttaaccatttcttctatactcccttaaatcaagaaacataacttatcaaatacttatcatggtgtccccacccactagcacagcacttggcacaaacatgtaaatgagattttttttttttcctcactgaaattatcaaggtctgagctcacacctgtaatcccagcactctgggaggccgaggtgggcagattacctgaggttgggagtttgagaccaacctggccaacatggtgaaaccccacctctactaaaaatacaaaaattagccaggcatggtggtgggcatctgtaa

SEQ ID NO: 392824 - DNA, 488 bp, Homo sapiens
aatctcatctttctgttctaattatttccaagagtttcaatcagcatttcctaagttgtgttctacaagtgttaaaaagggttgtatttaaaaaaaaaaaaatcagtactagaaatacttttttcctaaaacgtattacatttatgtaagaaaaacagttttaaagctttaattgttgcagaatagccagaagctaagaaatgctgggccggcgtcaggagaaggtgtgcccagcggcctcgtgcgggtttacgctctggccacaagcagccagccctacgctctcactcaaccgtgcaattctttctgtcctacgtgaccctagtttcctaaatgacctattctgcatcctgcacattttaagaatgtgttttatttctccttcattatttgattgatttttttctactactaaaacaagcatatatttacaaagtatatgaagcaacacgtatacggtgaaagtcaatctttttcaccagtcttct

SEQ ID NO: 392825 - DNA, 228 bp, Homo sapiens
agtgactactgtattaaacagtgcaagtttaagaagattcttctagaaggcaaagagtacagtattcccttgattcttctatctttaacaggattcttctacagctttgatttttactgggcagcttggttcaatataaaattcttattccttcagttacctgaaaatactgcaccactattgaattctgtattgctatgtggacgtctgatgctaatctgactttct

SEQ ID NO: 392826 - DNA, 256 bp, Homo sapiens
agaaaatgaaatatgcctgtcccagctacccccattttcctgcccaggctgcctactggtgcctcatatttaacactgctcagtcactcattgattctcttcattctggaatgagtctttacgctctgagatttgtcatgcctatagataacttttcctaacttggacattgttttttgagacagggtgtcacctctgtcatccagactggagtgcagtggcatgatcacagctcactgcaaccttaaaactccca

SEQ ID NO: 392827 - DNA, 486 bp, Homo sapiens
ttagttctgtcgctctaagagaaccctaatacagtctgcttcccctcatattcatcaaatttctgtctcaataagtcaaagaaggaggcagagtttgtattttatttctaggcatcaggaaacacattgtttccctagtctagtgtctagttagaaaaaactaggaagaatgatatataggagatgtgctgataagtgtttaatgctctgatatatatatttataaaaaagctaatttttagtggttgcccatttccattgtgtaagtactcccaccatggccaatctcaagctactaacaggatgttactagactcagagttggcaagagatgcatgcatatgatcagctcttatgagctggtatgaacagctttaaacacacccaggaccaatattgcatctttaatccaatcaagttgactcccagtattaaccatcacaatcaccaccatcatactctttcacccagaacaccgtcgaaggg

SEQ ID NO: 392828 - DNA, 232 bp, Homo sapiens
aagaataaccagagtagaagaaaagcatactacaaatgttaaccatccattccatctccatggtcaccttagaatgtcatgtgtcaatgaaagttgaaaggttttagaagcatggtataactgataatacgttttagctttatcatttagcaactgggtggccttggacaagcacagtctcttcagcctcagtgttttccatctgaaaaatgggtgcaatacctactcttaa

SEQ ID NO: 392829 - DNA, 297 bp, Homo sapiens
cccgggcttcccctccccggtccgcgggtgcccggcgcgggcccaggaggcggaggcggctcctggggagagggatccgggagtccctgaggcggccccggctccgcactaggaggcggggtccgcagtatcgccagcggccggcgcggcttcccggagccccggagcccgaggcgcgaggtttaggctgagccctccccggcgcctgcgcgggccgctcgccccgccaggctggagcggctcctggctccaaggttgggagccgggccggcagactgggggaccgggagagcaaag

SEQ ID NO: 392830 - DNA, 244 bp, Homo sapiens
ggctttgtataggaggtggcacgtaccaagagtggtacaaaggaggtagtatttctgaaactgcgagaagaatcaagtgtaggatcactaaactttcaatgtgtccacgggtgccatcttgcatttgtacctctgccctctccttggacattctaagagtctcagcctctctcctttggaccagggcaggagcctcctcactggcctgccacccattctccaccctgtggttgggaagaagtct

SEQ ID NO: 392831 - DNA, 249 bp, Homo sapiens
cttagcttcgtccttttgatacgcctgccaggacacaccccagctctgcctgtatccagccatctgccagccacccactgcacccaagttgctaaggctgagtgacaaggttacatcatggtggcctgatgccaccgtgggtggatcatgctttcacccttggcagggcctgcatgctgctcagcatgtcacccaggccaggtcttgctcctgttctacacaacaaatgaggtacaggactccaaatcc

SEQ ID NO: 392832 - DNA, 411 bp, Homo sapiens
cacatggcaagtaagtggccgccactgtcctccctggtccagtaacccccaactggccctcttagtctggaagatgtcctgtagtggccacgcccagtcccagtaagaagtcctcactggtcaatacccaattctctgtccgtaggaacagaagagagatttctgcaagatagggtttctggaagagcccagccccctctttcctatggcacaatctgggtatcactggcatcagaacttatcagcagaaagaaataaaggcaatggaggccaggtgcggtggctcatgtctgtaataccagcactttgggaggcccaggcaggtggatcacttgaggtcaggagttcgagaccggcctggccaacaagacgaaaccccgtctctactaaaaacacaaaaattagatgggc

SEQ ID NO: 392833 - DNA, 764 bp, Homo sapiens
tgtcaggctattagaccacatgcaaacagtggttggctctccaggaaggaaattagtgctgtcccatttttttctccatgaacagttaccaaactaggctacaaaaggatatataaaaaacatatataaataagaatataaagggagacctgaatcagcattagaggacctatggctttgggggtaccatgagctgagaactcaaatgtatcaaacacactaggcaaggaggaaaattactccagaaaaatgggtggtgtaagaatcagtactagattttggagaaaggctaactgccccatctgtgcagctaagagagatgagctaaatgtaccgccacaataactatgttgtagaagttgaggacaggggatggggataaagaacacagaactgttgatatgattctagctcattattttgaatttgggcaagaaagttatggatgaagattccatatgactaaaatctctaaaactccataatgaaggtagttttccttactgtacaattgttctttctgtctgggaataaagtttggacccatttctaaattaaaggccttacaattattatggagaacccacgaatatcagtacagcgctgcagggcaggaactatagtagtcacatagttcacagctttgccacgaacgtcagcttcccagaactgggacttgttagtgagttggtgccgttattatccaagcagttatgggacccagacctaatggccttaactgtctttcagtgatatgaattacc

SEQ ID NO: 392834 - DNA, 650 bp, Homo sapiens
ggttgtgtatttttttaaggacgaagggaaatagtttagttcggggtggaaattaccagtgatttccacccccaccccgatttagacctgcgggtgctgccccacgtcccccaccaaagcccatgtaaggagctgagttcttaaagactgaagacaggctattctctggagaaaaataaaatggaaattgtacttaaaaaaaaaaaaaaaaaaaaaaaaaaaagagaaaaaaaaggacaaaacaaaagaacacagaagaagaaaaaaaaaaaaagaacacacaccaccaacacaggccataacccaacaagccgccaacgggatacggaaaagaagaaacagagagaccagagacgagaagacaaaaccgaaccacgcaagcacaagccgaggaccgaacaatgacaagaaccacacgaaggcaagccaagcacaaaagagtaagaggcggaggataacgcacggagggagcgagggcgaggcaccagaggaagccgagaaccgcagaaaagaaggaagcaaagagaggagggaaaaggacgggagaaaagcaagacaaaaaacaaggaggagacaagaaaagaacgaaccacaccaacaaccagagaagaagcaggaaggcagaagagaaacgagaagacacggaaaag

SEQ ID NO: 392835 - DNA, 1185 bp, Homo sapiens
ggaaaaacagaaactcctaaaacgtacagagcaagaggcaaggacaagagcagcatatagaagcaatgataaataagcctgataaaaagattgttttcttaaaagatcattctctcaggatcctgatgacctaatgagataatcaatatgatggcaatttataagctcctatgagatttgttggagttcattgtaaattctggatattagccctttgtcaaatgaacattgatgcaaaaaacctcaataaaatactggcaaaacgaatccagcagcacatcaaaaacttatccaccaggatcaagtgggcttcatccctgggatgcaaggctggttcaatatacgcaaatcaataaatgtaatccagcatataaacaaaaaaaacaacaacaaaaaacacaaaaaaaaaaaaaaaaacaaaaaaagaaaaaaaaacaaaaacaaaaaaaaaaaaaaaaaaaaaaaaaacaacaaccaaacaaacaaacacaagaacaacgagacagggacgcagccaaccaacccccccggggcacaaaaaaacgagcacgcacccagaaagcacgacagagagccagacaaaaaagcggcacgcgcacgaaaacaacagcacaacagccgcactcactacacacagcggccagcaaaagaaacagcgcgcaagagagataccagaaagcaagcaccacaccggggacgccacacaaagaacccacagcaaacaccacacacagcatacccacagccccgcagcagaaacgatcaccgaccccaggacacacagcggcagccacaacaacgagcaacagcagcccgcacagcaccacgcccgccccgccagcgacccagcaacaaatcaacgcgtcgggcccgcacaccaccaccgcgccagcgcggggtggagagaagggggggggcggggagaggcgcatggctgccacgagagacggagcagggaggacgtggagacgcgggacggggaggaccacgagcgcgcgcccaggagccacgcaaaacaaacgccaggcaacacgacgggccacgccagcagcccacgagacccgcaaggacgacgccgcgcgaccacgcagcgcgacgagacgtacactaacagaacgcgaggcgagcgaggccaacaagtgcaactaagcagagcaggccagacaagacgagtgttaaagcaac

SEQ ID NO: 392836 - DNA, 457 bp, Homo sapiens
ctcttcccttcttgaagatattttactgctggggtatcaacttatttacatgtagctgactcctcagaagcggaacttgaatgccagccattctgtcgagcttaaagcaccacaatccagctgtgagctaggcaactttccccttatattttgtgtgcctctgaaaacatctccagaattcaaatgaccatttttgacataagttatcccttcctcccctctgattgcaagggcagcatcactctttctgccatgcataagtcaacatttggagtcaatagccctcttgtactaacactttcacagtcctctcaagtagccttcctcactgtattatccaagttcaaggattgcttacacttacctggactacaggcaaagcctcagaaccatctcctgccttccttcactgatttgtgtcatcactccctggaggtctcaggtccctccttctcat

SEQ ID NO: 392837 - DNA, 234 bp, Homo sapiens
agggttttgtctgtctcattactgttgaatcctaagcacctggagtagtatctggtccatattaggtgctgaataaacatcagctgaatgaatgtatccctctagttagcagcttaaaactaaccagaagacattgtctaggtttcagcctaaagactatcttaaccccaaaggcttctctgaccctaactaaagtagatcccctctagttctccttcacagaccactgcataa

SEQ ID NO: 392838 - DNA, 505 bp, Homo sapiens
tggaaagtgggggtgcatggatggtgcccaccttgacacggggtgtgaagcttgaagccctctccttggcacggagaagtgctcttccaatagtggatgcagttactgaaccttaattacatcctcactttctgatacattgcttgttcttatgtcactaatacaaggtcattataataataatatagtcatatatcttatataaaacactaattgtatttacatatgaatgctaatgtaaaaacatatttgcaagattattttatgtaaaaataattatgaaaacttgaagcatacagaaaagtagagatactagaataatgagcccctaaacacttatcatgtaatagatatcctttcccttgctgaagtttttggaagtaaattatagacgtcatgatcatttgcccgtaaatgtttgaatttgtgaccctaaaacgtgaggattttttcttacatgagctaatgccattttcagttttaatagaataaaacatactttctt

SEQ ID NO: 392839 - DNA, 539 bp, Homo sapiens
tcctcctcctatgcttccaactcctcctccccgagtaggtctcctggcctaagcccctcatccccttcccctgagtttttgggcctgagatctatctccactcctagccctgaaagccttaggtatgctttgatgcctgagttttatgctctgagccctgtccctccagaagagcaggcagaaatagagagcacagctcaccccgcaacaccgcctgagccgtgaccctctataagcatcctctaagacccacagaaggaatcaacatttacccactttgtgaatgggctgcctgccctgtagttagctgcgaggtctcccaaagttccagccgttaaccaacatcctgagtagtttagaagcctctcctccccatgactccaccacctagcacttaacctgctgttggcctttgattctgggccaccttcttcctcaagagtttgcctttgcccttgagctgagatttctgttttccaagttgcttttctgttatgaaatgttttaattagtaaaataaattgttttgtttaaacaaa

SEQ ID NO: 392840 - DNA, 532 bp, Homo sapiens
ctgagatcgcaccactgcattccatcctgggcagcagagcaagactccgtctcaaaaacaaaacaaaacaaaaaaaactccagctttgtaaattcagtgatatattcctttttgagggatgcactttactgtattcatttcacatgtgaattttagaatcacaggaacagtctcaaattctggatatgccctttataatccccgtgatctaggacaacttgcttaacctatctttgccttagtttatcttctataaattagagtttctctaagtattacctagcatgatgcctttatttaaaaagtgcttgatccagtgccctacgcagcagaagggtaatttcacattgtagtcattattgttatgtgagtttcttctccagtagtctatatagtcacttgttgtactttaaaaaacttttaattgtatgtgaacctagttttgataatacagctatttcctatgtttttttaaagtctatcatagtctatcagattatctgttcacttgggaaaagacatctaaaaacag

SEQ ID NO: 392841 - DNA, 697 bp, Homo sapiens
cagcctcctccaggcctgtccactcagcagccagattcatctttcttttttcttttttttaagaaacaaggtctcactctgtcacccaggctggagtgcaatggcgcaatcacagctcactgcagcctcaacctccccgggctgaagccatcttcccacctcaacctcccgcgtagctgggactgcaggctcatgccaccacacctggctaacttcttatttttctagagacacggtttcacttatgttgcccaggttggactcaaactcctgggctcaaatgatccttccgcctcaacctcccaaagtactgggattacggatgtgagccactgcacccagcctcatctccttaaatccagtcacagtactttcccgctcaaaaccctagattcaatggctaccaattgctcttgggataaagtccactaccttcccacagcctgcagggccctgctgccctgccccctgccctctgcttgtttccccagcctctcccaagttccttctgtcttcacttgctgtgttccagccacactgaccatcacactccttcccctcctcagggcatttgaacatgtgactctctgtcccctcttctatgtctcctacttaaccctcaggtctctacctaaaaatcccttcctcaaagaaaccatccccgaccccacagactcctgttacactctctttatca

SEQ ID NO: 392842 - DNA, 267 bp, Homo sapiens
acatcaatacaataccgagcctttgaattcatgaatacagtagagctctacgtttattcttattatcttgtatgtccttcactcatgcactgttgttctccccataaagaacttgcccatttcctaatgggtttattcctatactttttattattgttgtgaattagttttctccagcccccttttttgttttgcttttgcttgctacatttctttttcatctgcttactaatcactctacttcattcacaggcacacacaaagtaa

SEQ ID NO: 392843 - DNA, 178 bp, Homo sapiens
ttaccagaatttggccacagatctgactttgagtttcctggtagtcaaagcaaagagagaaacaagaccaatctcttgattcttggtgtcctgaaaataccagcagatcagttcctcggaagaactcttcctgatagatacctgtggtgttcacaaggaagcccagcataatggatgg

SEQ ID NO: 392844 - DNA, 480 bp, Homo sapiens
agtagatgctgtggccattggtagaaggatgaagccaacctgtgacagctcagcacagagggcatggagggaatagatatcctgacttaacttattccaccctttgaactagaagccagaaggcaagggagctattggtggagttcataatgcctccagggacggagcattgagggggctgcatagagagtgaatcttgagcagtgagtggctctttcatattgctaaccattcctaggtgactgcggttatctgcatggttgaatctaggtcactactgtgtctgtgttctgtcaaagtggaagaagaaagactagagggaatgtaaagaagtacccaatgtcttaaggcccaggaccagcaatggtactcagcacttcaaattcccttctaatggtaaaatctagccacctggccatacccaactaattgcaaaaaagaaatgggtaatgtcaaatgactggagagacatgttcaagg

SEQ ID NO: 392845 - DNA, 168 bp, Homo sapiens
acattaaatacctcaggtcagcaacaaccttaaaatcaataggatacaaagaaaacatctatgtaggacaaatccactattttggaacatctctcgttgttttcttttccccatgtttggataataaacatggcagtgcctcaggcctctagcactgtcttctatagc

SEQ ID NO: 392846 - DNA, 339 bp, Homo sapiens
tgcctgtaatcccaacactttgggagtctgaagtgggaggatcacttatggccaggagttcaaggccagcttgggcaacatagcaaaaccctgtctttacaaacatttttttaaaaaaaattagccagacatggtgacacatccctatagtcctagctactggaaaggagaatcacttgagcccagaaatttgaggccagtgagctatgattatgccactgtagcttggggcaacagagtgagaccctgtctcttaacagaataaataaagaaaaaagaatttgtgggatactattgaagtagaactcagaaagaatttatagccctgaatgcctacat

SEQ ID NO: 392847 - DNA, 805 bp, Homo sapiens
cacggtggctcacacctgtaatcctagcactttgggaggctgaggcaggccgatcacctgaggtcaggagtttgagaccagcctggccaaacaatgacaatcttttagtagagacgatggtgaaaccccatctctactaaaaatacaaaaattagccaggcgtagtcacacatgcctgtaatctcagctacctgggaggttgaggcaagagaaccactggaacccggaaggcagaggctacagtgagccaagatcttaccactgcactccagcctgagtgacagagggagcctctgtctcaaaaacaaacaaaacaaaacaaaaaaactgagaaggctgaaaggctaagtacacagccaataaatggcagaacaggcattaaaacacatctttggatacctggatacctgtatccaaagatgtgttttaccaggatacagatcatatcatctatctgtatatgcacacaaacatacaatattttcactaaaaaatgggaacacactaaccacatagttttgtaaccagccctttttcacttagcatattgtaaacaacttttctgtcaacaaatacctatctacaacagcagttttaacagctgcatagtactccactgccagggtatgaaattgctttaaatagtatatttcagccaggcgcagcagctcatgcctgtaatcccaacactttgggaagctgaggcaggtgaaatcacctgaggtcaggagtttgagagcagcttggccaacatggtgaaaccccatgtctactaaaaatacaaaaattagctggacatggtggc

SEQ ID NO: 392848 - DNA, 205 bp, Homo sapiens
tagtttccattccagtgtataccgcaacacctgtaaaataaaacaaaattgtctcttaaaataatcctctagcatgtttcacaagaaataaatatatttaccagcatgaaagcttttagtgtactgggttttgtaccttttttgctcctatcccgccgtcaattttgccactactctgataatcattgaagggcagaaattcatg

SEQ ID NO: 392849 - DNA, 556 bp, Homo sapiens
tcgatctagaggatcccagacatgtcgggtgttttgtgtttctgtcttagaaaagaatgtgttcaatatgtctttgctatttgcaagatttgcagtctacttaagaatctcaggaatgcatcgatcagccttacatccttgaggtctgtgtaggcagcaagtaccttatactactgtaagtcacatagcatctgtctttctctccctgcggtggagcttatgattgcacaaagctcttaagcagctgcttctcagatgctcagaagacagtggatcttgggtctgcactccaaaagcaagagacaaaaaaggcccagaaaaataaccaatgcctacaggttagtcttttgttaggttcatgatcagtcaatttacctgtttattgcataagagtaagctcgtcagaggttcaaattttagctttatgagaccaattagctccattttctttcatagccaagaaagaatcccaaagaatccagactcaagggtcccaagatcacagcagtggggatgtcacccatcaacctggctgtccttgagtcccactcatctc

SEQ ID NO: 392850 - DNA, 198 bp, Homo sapiens
aattaatcgcatgaaaaatagtatatctttttcagtaactggggattttcataaaagccatcaaagatataatattagaagatctgctgttaagatagctgttgtcataaaaaactgttgatgaattttgaattttgactattaactgtccatgctaatcagatattcagagaacaataaacagcatttgctaaattc

SEQ ID NO: 392851 - DNA, 527 bp, Homo sapiens
gctgcatgtcactgcctcatgatctgcccgcctctgcctcctaaagtgctgggattacaggcgtgcaccaccacacccagctaatttttgtatttttagtagagatggggtttcactgtgttggtcacgctgacttcaaattcctgacatcaagtgatccgcctgcctcagcttcccaaagtgctaggattacaggtgtgagccaccacgcctgtcctggtagagcttttattatgtaaaaatctggtagggtggactctctggtcttctcgtcctccagatgtgcacatggcagtttatttttgagaagttgatatatttcaggcactctccccttacgaactccatcttaatctaaagagtttttgtcagatgaaggagggggaggcatatagagcaaggtaatgaaatgtgctcagcatcataaaaaggtagagcttggaccttgccaattacagagtttacccttcaaacaccatgcagtattttttcttggagaagtcttttcatttcactttcagttaata

SEQ ID NO: 392852 - DNA, 182 bp, Homo sapiens
caaccccacagcagagcatttgcagaataaatgcaggtaaagaatgagccagccacttctcctgccccaaatgtctccaccatcccggacacctctgccttgccctgattctgccatccatctcagaacagacccttttgcttacagaactgaatggaacagccttagtaattattttagcc

SEQ ID NO: 392853 - DNA, 188 bp, Homo sapiens
tcaagctcggcaccctccagattttaaaagcacaaacatccagctgttttgctgttggaaagttccacttacaaatcaattcaaggagaaagtacttcttagtctccatgttccctacatagaggaaaaaaaacattttgtctaccctcctatgttcagttactgaagcctgcaaattaaatggataa

SEQ ID NO: 392854 - DNA, 708 bp, Homo sapiens
atctatggtcacacctcaaggtactagagaaacaagaacaaaccaaaccaaacccaacagaatgaaggaaataaccaaggtcagagcagaactaaatgaaattgaaacaaaaagaaatgcaaaagataaatgaaacaaacagctggttctttgaaaagataaataaaattgatagaccattagcaagattaaccaagaaaagaagagggaagatccaaataagctcaattagaaatgaaatgggggatattacaactgacaccacagaaatacaaaagatcattcaaggctactatgaacacatttacgtgcataaactagaaaacatggaggatatggataaattcctggaaagagacaaccctcctagcttaaatcagaaagaattagaaaccctgaacagaccattaacaagcagtgagattgaaatggtaataaaaaaattaccagcaagaaaaagtccaggaccagatggattcaagttgaattctgccagacattcaaagaagaattaataccaatcatattgacattattcttcaagataaagaggaaatcctccctaaatcattctgtgaagtcagtataacaaagaaaactacagaccaatacccctgatgaacatagatgcaaaaatatttaacaaaatactcgctaaccaaatccaacagcatatacaaaagataatccgccataatcaagtgtgtt

SEQ ID NO: 392855 - DNA, 667 bp, Homo sapiens
gctcagataatataaatttttgccttactgtaattggattattttgattttttaaaaattatctttgagaactataggtctaccaatatcataaaaactagtcaataaatactttaaaaacaattcaacacacgtactgaaagttgctggtatacagtggtgagcaaataatagcagaccttcaggagcttatattccaaggacagggatggacattgataggagaatcacacaaacaaaatgcaaagtcacatcaggaagttctgggcagcaccttgcagaggtggtggttggatggaccatctgtagggagtgaagcaggagttacctgagtgattcggggaggaggggcccttcacatgtgcaaaggcccagcgcaggaagtgacgggagaggaaggccggggccaaactacctcaggccttttggtcaatactgaaggttttgatgttttctcctgggagtggcggaactccattgaaagactccaagggagtggcatgaccagaatgatctctgacggctcgctctgggtacagtgcaaaggacacggtgggaggaagccaggcaggccctcggctgtagtggtctagggtagagacaccggcaacttgggaactaaatgtgggcactaaagataaagagatgtgtgtggatccacgagagg

SEQ ID NO: 392856 - DNA, 278 bp, Homo sapiens
cttctgttctatccctcttcagctctcccagctggacctcagcttttccaatcccaaatcctcctctacttgttggatttttccttggagtctgtctctcctacccagagcatttccttctcagcctgctccctctcctcctaggctaggtcctctctccagttctcccgccttctctgccccccggtctaggtctctcccgctgactggttagcctgcatcaccactagctcccctcagtctcatctctctctcaggctctctactcctttcagcct

SEQ ID NO: 392857 - DNA, 881 bp, Homo sapiens
atgagacattatcgtgatgacaagaagattctgagcaatgtgggggagtgagaatattttcataatatctgccattagaatgacttagaaatggaagacccaggttcagaaattaggatcccatgcacactgtactcttgtgaggaggtgcagaagttatctcttcccttggtaatcctctttcttagaactcggatatttatcaaccacctaactggctgcttgaaggatggacacctttttttgttttgcaaagaaaggaagttgcaaaaggtcacaaagcaactccatatcctttggaaattttagagtgccaggcttcatgtagataaaccgaaaacaatttaagtcttttatgttgtactaagtcaagagttctttagcagtggaagaagatggggtcttacatgaatggaagggtctcggctatttgcattggtatcaagagaaggactagatgcttgctctaaaagaaaaagctgagggatggggacaggaagcggggagcaaatctgagactgaataaatgtaaataaaagagctaagattgttgagcaggtgctaggagctgggtcagattttattccccagaaatcttaattattctgcctcctcctagatagggaacgtgttgcttacctttgcatccacacctggctcgcaccaaccatgcaacccataattgttcatctgatgaaggttgtcaaaggcttggacaacccttcagtaactctttaagggaaaccacccacccatttcatcttatcggcttggctttcagtatttatcatgtcagtgactctttatcccagacccgaggttgattttggtcacctggcggggtcattagagccgtgatgtcatcacacacctggcccagc

SEQ ID NO: 392858 - DNA, 755 bp, Homo sapiens
caaaagggcaaatcaaggggttctggtccatcttgtgtcattcaaactgtagttttgaaaagttcaattagaatgttttgcccgtgataagaatcacaagagactcttcaagtgctttatcctgggagagttgagtggtgctgcccagcagcagcgagaatgcttctcacgttgctattcggtggcccctgctccgtggggtccggagcggttcaccgcctggcttttgactgtttataaatttggattacaaatgactgtgaaatggataacaatatgtgagtataggtttcatggatcgattcccggcctggagcagggaaaataccagaggagcctcagacatcttatggggccagaaaatgaagaggtgcttgaaaaagaaaggggtatgacaagaagccacatgactaacctgaaggagcttccagtggccaaaagtggagcaatttgagcaacaaaataaaaaatgagaataatggattctaatccatggaataaaaataaatatccctaagtccagattgatgtaaataaataattgaataaataataaacaacagagaagagacggttcttccttatagaagaacccaggttaatgattgtggaaggaatgagaaaaatacaaaatcatcactaggcaaactttacagcagcaactgctgtcagcaagagccatgggtggacactgcaaccactgggcaaggctttgaggagaagccggacattctcattgtcgcagctgatggaga

SEQ ID NO: 392859 - DNA, 697 bp, Homo sapiens
caggagaccagcaagctgcctgaccaacaagtccagttttccctttaaatgcagaccactgaacactgtgaagggtaggggtggctcctgttttctcagaagggcttcgggcagcccagccagccttttccaatggaaaagaggtctcagcgttctcaggaacagagaatctgcagatgcctcagccatgacgaatttctttgctgcttttattgccccctgcaagagtttctgtgatctttctctaccttttggcttcactctcttgacaggtcttggtgcctgtccacagaaggcatcatcttattgacataggatgtcctggcaactgcaaaagtgtgccacccatgggtgtcaaagtggctttcacccatgttaacgggagggcctagggagtgggaatatccactcttacccacgtacaccctatctcccctactgtcagtagccttcaaactccctagacctcatttacaccatggatacgagctgaactttgtccatgaaatggaaggtttggcttatttggcaggaattagtcatgttcacctgtgttgtgccttttaatttctattatcatctgcctctggatctctcagatccagttttctttcctagggctttgacccaaaaactggacttgaatgtgggacaaaaatgtgtctccaagtgaggagaggttcaatggactctttat

SEQ ID NO: 392860 - DNA, 560 bp, Homo sapiens
ggaccagtttgcccagccttgctctgctcccccaccaccagtaccagagcatgtggtccagagacctggggaccacccagcccagtccaccattgttggcacctgagcactcctcctggaagcttgagttcaagcccacccaacctgccattaccaccacagtgggcacacacctataggcctacggactggcccacccagcacatcacagccactgtcaacacaagtacagaccatgtaggacccagagattagtccatctactgctactacaatcatccatgccatgaccattgcccaggggcctgaaaacccacccacttgcctagcccaactctgctactaccagcacctgagaaagccacctggggatccaagaattggactgcctggaaccactgaaaccagtgccaatatatgccaccctggagcccaagggcaggcatgctcagcccactgctgccaccacagaggtctgaagataggaccacctggcattgctgtatccagcaaaactttgccacagtctccactccactaacaattgcaccctaagccac

SEQ ID NO: 392861 - DNA, 294 bp, Homo sapiens
ccacctcagcctcctgagtagctgggaccacacgtgtgcaccagcacacctggctaatttttgtatttttttgtagagatggaatctcactatgttgcccaggctccatttacttattaagtacttaatatgtgtcaattttagtgatttgtgtttttctagaaaataactttcatctaagtttatgaattttatgtagagaatttctgcaaaatatcttgactcttcattctttcttcatctatggtccttttctcttgtcatgtcttatttagtcagcccagaggttatcta

SEQ ID NO: 392862 - DNA, 499 bp, Homo sapiens
ctatatcctatgtaagtatcttagattgatcataactgtagagttagaaacactcgtaatatatttacttcaaaagtttaggaaaaatgcatatagcagtttgataataggacttttgaaatcaaaattatcttaatctcaaatccagtccaagatttacatactgaagcccagagaggtttagtgacttaatgtttgttacaagttagcattcggtagttatgttgagaaaagttcaacatttttcttattaaagaagacatacaatattttctttagtctaggagagaatagatagacagttgtttggtttctttatgatgatactagacaaagtttccagatttttttctcactttaatgtttcctctaacttcctagtttttaattagaaatcatatattgtatctttaggacagagatctaatccttttttatagttccatctttttctgttgagaactgtgtttttggaaacagaagtgtctgactaaagaac

SEQ ID NO: 392863 - DNA, 228 bp, Homo sapiens
gagtcacgctggtactcataccgctgcctagtaccatacgatgtgatcttgcctatttggccttgaaaagtgctgagagtacaggcatgagccaccgcacccagccaagcgcagggaatactctttaaataacacggggacagggggtccttggattccacacatggaagtctccatagcttctctgtgtcaggaattcttccaggccaggatcattccctgctattg

SEQ ID NO: 392864 - DNA, 232 bp, Homo sapiens
ttaatgaatatagttggcactttaatgggtggacaggtggatggatgcataggtcgatggaaggacagatggatggatgtgtaggtgaaagggtgtatgtatgtatgtgtgtatgtctggacggatggatggatgaatgatggatgtctgggtagacagaaggattgatggatgggtcaatggattgatgggtggctgaaaggaaggatagatggtggatggatggatgaat

SEQ ID NO: 392865 - DNA, 446 bp, Homo sapiens
gattataggagtgagccactgtgcctggcccagaattcttacaacaatgaaaagacaacccaattaacaaatggccaaaggacctgaatatatagtttcccacagaagatttgatttctgccatgaattcaaagatatacaaatggccgatagggatagattctcaacttcatcagtctcagggaaatgcaaatcaagaccactgtgacagaccacttcacacccactgggatggctatttaaaaagacagctaacaagtgttggtgacgacatggagaaactggaaccctcatactctcttggcgacgatgcaaaatggcccagccactttggaaaacactctgggagttcttaatgttcaacatagaggtaccctatgacccagcaattccactcctaggtatgtacccaggagaactgaaaacacatgtccacacagaagtat

SEQ ID NO: 392866 - DNA, 689 bp, Homo sapiens
attcaaagctataatggtgacatgaggactagaggtatttctctgagggcaagaagtatcacttgtgtctgtttgtctggccagttgagcacgatgattccagccacgagagaagagaacgctgggctgagaggttagctgttggaataaggtttggttaactttggaattatacaatcagcaaagggatgtcctcaccagtacttctaagagatcaaacaagaggcctccagctccctaaattctggttctactgtaccaactctgctttaatttgttttaggtaatgggattccaggtgctattacattaagaattctaatttaactcttaaaaagtgttttcttagataaagtaactgggactcagggagataaagtaacttagtgactcacctaagtttccccttgtctccaattccagggtgccacccaccgtattatgatgttgatttgtgaagagactctcaagtaggttcaatttcatagtcccagtttaagagagaggccaagtgaggatttggcataccacgtcggaaaggttgccaagtcctggatttcactgatgagacggttccattctcatctatgtggctggtcggctgccacctaaaccaaggagagctcccatttgctttgtgtgaactggctttgctgtagcagtgctaactagccatgaggtagatttct

SEQ ID NO: 392867 - DNA, 438 bp, Homo sapiens
tgggcgaactgaccaagacgaacacgacgggacacgacggccactgcctccccctggcccttcaagtcctgacactgcctccaaaacggccgacggctgcccatgtcccaagagtgaggaccctggtgttgtgtccagcctgcccaccccaacagcctgtgcttacagcgtggagacatgcggacaggccagaggactcccagggagggcatggctgaggtcagggaccagggagcctggacaaggccccgcctctgcctcaccagcccccaggtatccaggtaccctccgcacacaggctccaccctccccagagccttcccagagggaccggcccactcccaggaccccaagaggaacatgatggatgaagatggcatgtgatgtccaggcagggactgacgcaggagcagcccaccctgcctggcctccaccccg

SEQ ID NO: 392868 - DNA, 4535 bp, Homo sapiens
gaagttctagaaaatgttaattgggggagctgtggctggcagagaaggaaaaaggaagctgaagggcacttgggctcataatggtctctccaaccctgatcctgtcctttatggacatttggcagcgctgctgccttgaggtgccttgcaatgctttatctttttgttaaagccacctctgttgcttcagccagcttgagcggttttctgttacttgctagtggttgggaaggcttagccgacgaagggaaaatgagtcaggtcctgaaggatgagcaagttacgggagtgggccgcatggtgagggagtggacttcctgatggggttaagggcgcctgaacacctgggaggcaagttgaggccaagacctggggtgatggagaggcagggtaggctacccagtgagtaggaggccgaaggaaccacagcagggctccagatctcctggcccagaggggctggtacgggaagcccagaagacactcatccctaaggggagcctgagactgaggaactctcatgccctgcgtcgggctcgtgggcgaagggccttcccagggactgcaccatggcctgtccccagccttacccaggggcctccctctcaggttctgaaggacccaggggtcacagctgtgtggggtgctccactgaacacttccttcaaactccttcaggctggagtgcagtggcgcgatctcagctccatgggagagagtttgaaaggatgaagagtttacatcctctggaaagaagcaaatagaaggcattccaggcaaaaggaactgcatcgagtaaaagcatggaggcaagaaagggcttggtgtgtttgagaaacagtgagtagggcatggtggtggcagaagcttaaagtgtatggcccgtggacagtgacagccggacaagaagctgaagtgacagaacaagttgaaccaaaggaattccagacctgggaaagtggagaaagaattttggggtcagagccgtttaagactttgcctagggcctgggtcttctttctcctaaaggcctcaacccacagcacgccacacaaatatgtcacataacacacaaacaaacatcatatttcacagtccaggaaatgaaatgaagacaaaagcgccccctgtgggtgaagtcacagtcactgcagcagacatcatggctgtggatgtggcagaataccatctgagcgtcatcaagagcccccctggctgggaggtgggtgtctatgctgcaggggccctggccctgctgggaatcgcagctgtgagcctgtggaagctctggacgtcggggagcttccccagcccctctccgttccccaattacgactacaggtaccttcagcagaagtacggcgagagctgcgcagaggccagggagaagagagtgcctgcctggaatgcccagcgggccagcacgcggggaccacccagccgcaaaggcagtctcagcattgaggacacctttgagagcatcagtgaactggggcctctggagctgatgggccgggagttggacctggccccctatgggaccctccggaagtcccagtcggccgactccctgaactccatctcctccgtgagcaacacctttgggcaggacttcacactgggccaggtggaggtgagcatggagtacgacactgcctcccacacgctgaacgtggcggtgatgcagggcaaggacctcctggagcgggaggaggccagcttcgagtcctgcttcatgcgcgtcagcctgctgccggacgagcagatcgtgggcatttctcggatccagagaaatgcctactccatcttctttgatgagaagttctccatccccctggatcccacagccctggaggagaagagcctgcggttttctgtatttggcatcgatgaggatgagcgcaacgtcagcacgggggtggtggagctgaagctttctgtgcttgacctcccgctgcagcccttcagtggctggctctatttacaggaccagaacaaggccgccgatgctgtgggggagatcctgctctccctcagctacctccccacagccgagcgcctcaccgtggtcgtggttaaggccaagaacctcatctggaccaacgacaagaccacagcggaccccttcgtcaaggtgtacctgctgcaggatgggaggaagatgagcaaaaagaagacagccgtgaagagggatgaccccaacccggtgttcaacgaagccatgatcttctcggtgccagccattgtgctccaggacctgtctctccgcgtgacggtggctgagagcagcagcgacggccgtggggacaacgtgggccatgtcatcattgggccgtcagccagtggcatgggaaccacacattggaaccagatgttggccacgctgcgcaggcccgtgtccatgtggcacgctgtccggcgaaactagcaaccagggcgggccagttgggcaatggagctgctggagcccggtacccactcagctctgtctgatgccctctccatagcccagctggagccgtgaacactggggtcccctggcagagtcctcatgacccatcctggtctctctgtccagattgcagcagaggagtgggcgtggctctgtgtccagggccccagggtctgctcctgctgaggaccagctgtggctgggccaggacagaggactcaaccctgctcctcccggtaggccagctgccgagctgggctatgttctggaacccagtgaatcttgggggccaggcactgtgctaggcaccagcaggggtaacacgaagaagacccggcccttagggcatcaggaagactagctcccctgccccggaggatctgctcagtgctgatggcagcccagctgtgtggactcagggggctctgagggctagggaaacaggaagggcctctttgacaaggtaggagctgtgcttggaggggcaggaaaagaactgagcatgtcgcaggcagcgggcccagcctgagcaatggcaggatgtgaacttccccatcgcaaatgcagttctcagcccactgcagtggatacaaggaagggcctttctcggggccggagaagagaccaagagaccaggcccgggcagcagcctaccggccacgtggaacactggctccggagttattctctgtcaaatctactccccggacctcaaccatggcaagaaccagaggtccaaagaggcccagacccaggtccttgtgctcagtcctgcgcaaaccaggcccagaccctgcaagcatttgttgatgcccttgcaggcccactgggagaaagatgcctcaggcaggtctcagcctgggggtggcaggggtggggcagagagaatactgacagcagaggtcttggtgggctgcacgtgcctgcgaagatgtggtggacaaggaggctctcgggctgggccttggaggggtggcagcggaaggacagcccaggtggctgaggcctgatgggaagccggggaaggccagggtggaagggcggcttgagggacgccaggagaagactgaatgccaggctaggaaggaggcggctctcgatcacggggtgggtgcccccgacaccgggtctcctagcttgagttccctagaagcgaaatctgagagggggattctggggcaagtagtttcttgcgggtgagtgttctcagagaaacttaccagatcaagaaagggagctcaggctggatggaggaagccacgcaagtgtggcttcaagatccatcgccttggcctgatcgctgtgggggcaggggcctggagtacgaggggcaccctgggggctcccacccagaagcagaggggctgggctgttgcacctctactggcatcagtctttggttaccccccagccccagtaggaggagagcaggcagagcttgtcatccccagcctggtgtcccgcagtcccaggaagccgcttcttgccttcatggctgagtgctgggaagggctgagctcacccaggccagcaggtggggtatcatctgctcggtggggccacccacaggtgacagcatggaccctcaggctggctgcccctgttccttggtccataactggtgagctatggagacccaggccaacaaattatccccagtgatatggggggaggaggggctagaacaagggcccaggggactggaggcaggatggtggctttccctacctgacacagccatggcccagccccaaggccaggctgtctaccctatggccacagcaggaggtcagcccagggccaggagacacatggctggacaaggctttgcagcctgggagaccccgactttctctaacccagtggctgtgcggtgcaggccactgactccccccctgccctctcccctctctccctccccctaactgcatgacatgttaactgtgtgcccaggacagccgtggtggggaccgggtatgccaactggaatgattctagaaccaaaataaagttggggcaggaagagggggcttccagggagccctgctcggccctgaatcaccttcgtctcttctctaggaat

SEQ ID NO: 392869 - DNA, 4366 bp, Homo sapiens
gaagttctagaaaatgttaattgggggagctgtggctggcagagaaggaaaaaggaagctgaagggcacttgggctcataatggtctctccaaccctgatcctgtcctttatggacatttggcagcgctgctgccttgaggtgccttgcaatgctttatctttttgttaaagccacctctgttgcttcagccagcttgagcggttttctgttacttgctagtggttgggaaggcttagccgacgaagggaaaatgagtcaggtcctgaaggatgagcaagttacgggagtgggccgcatggtgagggagtggacttcctgatggggttaagggcgcctgaacacctgggaggcaagttgaggccaagacctggggtgatggagaggcagggtaggctacccagtgagtaggaggccgaaggaaccacagcagggctccagatctcctggcccagaggggctggtacgggaagcccagaagacactcatccctaaggggagcctgagactgaggaactctcatgccctgcgtcgggctcgtgggcgaagggccttcccagggactgcaccatggcctgtccccagccttacccaggggcctccctctcaggttctgaaggacccaggggtcacagctgtgtggggtgctccactgaacacttccttcaaactccttcaggctggagtgcagtggcgcgatctcagctccatgggagagagtttgaaaggatgaagagtttacatcctctggaaagaagcaaatagaaggcattccaggcaaaaggaactgcatcgagtaaaagcatggaggcaagaaagggcttggtgtgtttgagaaacagtgagtagggcatggtggtggcagaagcttaaagtgtatggcccgtggacagtgacagccggacaagaagctgaagtgacagaacaagttgaaccaaaggaattccagacctgggaaagtggagaaagaattttggggtcagagccgtttaagactttgcctagggcctgggtcttctttctcctaaaggcctcaacccacagcacgccacacaaatatgtcacataacacacaaacaaacatcatatttcacagtccaggaaatgaaatgaagacaaaagcgccccctgtgggtgaagtcacagtcactgcagcagacatcatggctgtggatgtggcagaataccatctgagcgtcatcaagagcccccctggctgggaggtgggtgtctatgctgcaggggccctggccctgctgggaatcgcagctgtgagcctgtggaagctctggacgtcggggagcttccccagcccctctccgttccccaattacgactacaggtaccttcagcagaagtacggcgagagctgcgcagaggccagggagaagagagtgcctgcctggaatgcccagcgggccagcacgcggggaccacccagccgcaaaggcagtctcagcattgaggacacctttgagagcatcagtgaactggggcctctggagctgatgggccgggagttggacctggccccctatgggaccctccggaagtcccagtcggccgactccctgaactccatctcctccgtgagcaacacctttgggcaggacttcacactgggccaggtggaggtgagcatggagtacgacactgcctcccacacgctgaacgtggcggtgatgcagggcaaggacctcctggagcgggaggaggccagcttcgagtcctgcttcatgcgcgtcagcctgctgccggacgagcagatcgtgggcatttctcggatccagagaaatgcctactccatcttctttgatgagaagttctccatccccctggatcccacagccctggaggagaagagcctgcggttttctgtatttggcatcgatgaggatgagcgcaacgtcagcacgggggtggtggagctgaagctttctgtgcttgacctcccgctgcagcccttcagtggctggctctatttacaggaccagaacaaggccgccgatgctgtgggggagatcctgctctccctcagctacctccccacagccgagcgcctcaccgtggtcgtggttaaggccaagaacctcatctggaccaacgacaagaccacagcggaccccttcgtcaaggtgtacctgctgcaggatgggaggaagatgagcaaaaagaagacagccgtgaagagggatgaccccaacccggtgttcaacgaagccatgatcttctcggtgccagccattgtgctccaggacctgtctctccgcgtgacggtggctgagagcagcagcgacggccgtggggacaacgtgggccatgtcatcattgggccgtcagccagtggcatgggaaccacacattggaaccagatgttggccacgctgcgcaggcccgtgtccatgtggcacgctgtccggcgaaactagcaaccagggcgggccagttgggcaatggagctgctggagcccggtacccactcagctctgtctgatgccctctccatagcccagctggagccgtgaacactggggtcccctggcagagtcctcatgacccatcctggtctctctgtccagattgcagcagaggagtgggcgtggctctgtgtccagggccccagggtctgctcctgctgaggaccagctgtggctgggccaggacagaggactcaaccctgctcctcccggtaggccagctgccgagctgggctatgttctggaacccagtgaatcttgggggccaggcactgtgctaggcaccagcaggggtaacacgaagaagacccggcccttagggcatcaggaagactagctcccctgccccggaggatctgctcagtgctgatggcagcccagctgtgtggactcagggggctctgagggctagggaaacaggaagggcctctttgacaaggtaggagctgtgcttggaggggcaggaaaagaactgagcatgtcgcaggcagcgggcccagcctgagcaatggcaggatgtgaacttccccatcgcaaatgcagttctcagcccactgcagtggatacaaggaagggcctttctcggggccggagaagagaccaagagaccaggcccgggcagcagcctaccggccacgtggaacactggctccggagttattctctgtcaaatctactccccggacctcaaccatggcaagaaccagaggtccaaagaggcccagacccaggtccttgtgctcagtcctgcgcaaaccaggcccagaccctgcaagcatttgttgatgcccttgcaggcccactgggagaaagatgcctcaggcaggtctcagcctgggggtggcaggggtggggcagagagaatactgacagcagaggtcttggtgggctgcacgtgcctgcgaagatgtggtggacaaggaggctctcgggctgggccttggaggggtggcagcggaaggacagcccaggtggctgaggcctgatgggaagccggggaaggccagggtggaagggcggcttgagggacgccaggagaagactgaatgccaggctaggaaggaggcggctctcgatcacggggtgggtgcccccgacaccgggtctcctagcttgagttccctagaagcgaaatctgagagggggattctggggcaagtagtttcttgcgggtgagtgttctcagagaaacttaccagatcaagaaagggagctcaggctggatggaggaagccacgcaagtgtggcttcaagatccatcgccttggcctgatcgctgtgggggcaggggcctggagtacgaggggcaccctgggggctcccacccagaagcagaggggctgggctgttgcacctctactggcatcagtctttggttaccccccagccccagtaggaggagagcaggcagagcttgtcatccccagcctggtgtcccgcagtcccaggaagccgcttcttgccttcatggctgagtgctgggaagggctgagctcacccaggccagcaggtggggtatcatctgctcggtggggccacccacaggtgacagcatggaccctcaggctggctgcccctgttccttggtccataactggtgagctatggagacccaggccaacaaattatccccagtgatatggggggaggaggggctagaacaagggcccaggggactggaggcaggccactgactccccccctgccctctcccctctctccctccccctaactgcatgacatgttaactgtgtgcccaggacagccgtggtggggaccgggtatgccaactggaatgattctagaaccaaaataaagttggggcaggaagagggggcttccagggagccctgctcggccctgaatcaccttcgtctcttctctaggaat

SEQ ID NO: 392870 - DNA, 910 bp, Homo sapiens
caaggtggggcaggaccatacttcctcaaacctttagggaacatctttctttgcctcttcagcagtgtggcagccccaggtgttgggcttgcggcagcataactccattctctgtctcctcttcacatggtgctctccctgtgcgtctctgtgtcttctcttctcataaggataccggtcatattggattaaggtcctatcatgtccagtatgacctcatcttcactagtaatatctttattcaccctatttccaaataaggtcatatcctgaggtactaacgactttaacacatcttttgggggacacaacccataatggtgcagaagattgattgtcttgtttctcttttgcaggcagtggcttggtaaatagagttatttagatttgaatgagatggatttattgggtcctcaatacttctgtaaaatatagaagaaatagcctcttgctatgggtgatgaagggcgagcgctctctaaaattgatgctatacaagaaatatttaaggatcaactctgtgaaaggcactgttaatgcatgctgggggatatacggattgctaagacacgattcctgttctgtgagaagttacagtttgacataatccagcctttgtactcccaaaataaatctaaatgaagtaccactgatagactctctttattcttttcttcttcaatagctaaacagtttcaggaacatcaagaattgatatgggaatccttaaaatacgtaacattgatctttggtgcatcagctttcatgttcaaactttcgttctcagaatgtgcagtttaggatttccctaaaggtgttttggaatctgtgtcccttgtgttatggtttatatatattatggctgtggggagcatttcttggtgaatctgaagagattaaacatatgaat

SEQ ID NO: 392871 - DNA, 212 bp, Homo sapiens
ggtcatcgagcttcagaattccctgtagttttcactgaggcttccatttagactccattagaattcagtttctcccactgatcaattctacttgcttccattgccttctgcagtgtggttaccaagagtactcctaatgaaccttttgtgcactaatctccatctctttcttttttctttttcttttcttttttttttttttttttttgaga

SEQ ID NO: 392872 - DNA, 439 bp, Homo sapiens
gtcgagtggtgtgtttgtctcacttgcttccctatgggcttcgtaaaggcagggactgggtccccagcaacgctggacggtccctgggttaattaaattgttcccttttggaacgatatccattgaagtgccccctaaccatagtcataactaaaatttggacacttcctatatcccagcactgtactaagcaccttttgtgtattgtattctttaattatctttgcaacagccctaagaggcagatggatgtgacatgtacctcttacacattgggaaactgaagcttagtgattaattgatttgcccaaggttatctgtaatgggtgaaactgggattctaactcagtgagctggacttgagtctgagctttttacaccattaacacaagtgaggaagctccttagtggggaatgcagctctggctctgttccttgg

SEQ ID NO: 392873 - DNA, 397 bp, Homo sapiens
gtctgagttcaagccccgtttccataataccacgtatgagctagcgcattgagcaagttctcaggctttccaaaactcagtttccttgtgtgtaaatgggcagaactgtagacttaccacatggggttgctctaagaatggagacaaaacatggaaagctcttggcacagggcctggccctccacaaatggcttaaaaaacaaaagaacaatgacaacaaaaacaaccataaccacaaccaccaacaaacagaacgggagccggagtccaggactggcgggggcacgggttctgggcttgagaacatcagatagaggcgatgatttcccatttcatggaggcacagcaagtgctctgcaaaatgcctgactttgggattcctttaattagcgaggtg

SEQ ID NO: 392874 - DNA, 653 bp, Homo sapiens
ctctgtgggcggtttgagaccagcctgggcaatatagcaaccgtcctgctggcacacaaaccctcctgcctctaaacagaatttgatgggccccttggcaaaggcaggttttagaaactcctcgggggctggagcgcaaggagagtctgagccaggccaagcctccctgggggaacatggctgaaggaagacctacagacatctcccctgggtgggagcctgtgttcagaagcagcagatccaagtctctgtgtggctgaggagaggacatcctgctggcaacacggagaatgccatataacagctaagacagagatcagagccatgcagctgcaagccgaagcaggccaaggattgccagcaaaccaagagaggctggaagaagagagaaggatctttccctgctgatttcacagggagcatggcccttgatctcaggaccttgaccccagaactttctggctgccaataccaagttcctcctctccatctcacattcaaagagcacacagagaggctctaattgggtctttctacatcctgtgtccgtacagagctctcgcgtttgggtggggactttgcaccgtgaccagtctaagatcagcaccagcccctggtccaatcagctgtggccaagacccttgaagacacag

SEQ ID NO: 392875 - DNA, 144 bp, Homo sapiens
attaaaacacacacacacacacacacacacacacacacacacacagaaaagcctgtttccaaatctttaaaccttgggctgagatgtacaaatctgaagatatgctccaaagaaataacctggctgggtgtggtggctcacgcc

SEQ ID NO: 392876 - DNA, 184 bp, Homo sapiens
gcgagctgtagccaggccgagcgtacaaataaaaaaaattctataattgatttaaaagcagtgatttggatcaaacaattaggtctaattattgcatttattttattaaattgtaaacttactaaaataacattggcgtattctctgtcatagatttgtggcagctgtttccacacttgttact

SEQ ID NO: 392877 - DNA, 405 bp, Homo sapiens
ggattgtttgtctattttcttttcaaaagtgtgtcagatttccctcatgctctgtggtttgtttcctgcttaaattcctgacaatctgctttaaacaacattgctatatttgtgtccagaggatacaaaaaagttttaaaaatagaacaacatacattccactgtaagctttgaaaaaacttcctgaattatggctttgagtttcaaccaagacatggaggccatatttatggctgtgtgcatgtttgtgcatctttttgtgagtggaaattcattactgtacaggacatgagctctttccctaacactcgtgttaaatggttaatatgagatgacttggtggcactctgaagtacgaagtgacagacagagttaaagttcttgatgtatgctaggtcagtgaag

SEQ ID NO: 392878 - DNA, 332 bp, Homo sapiens
taataacaatgtgtgtagtgcacattcccttcctgtattttgcatgcagagcgtgttttaaagttgcaatcagtgttcataaagttcttggcacttccttttttgtacacaagtacattgtaatcattcacctcacggctacacaaccagcattcatcatcgtttcaatggttatttgatgcgttgcggtgaaagcactataacaaaattaatcatcttctacgggtcatttgtgttcctgacacatctgctgtcatgaataaccccatcgtgagttcttccatgctataactttttcctgctttaataattttcttaggacagatgcccag

SEQ ID NO: 392879 - DNA, 173 bp, Homo sapiens
gcctctccctcgcccttgccacacagagcctgacatgtattgggcaaaggaaagaaagatcacgtttgccgggctaacattgctgatgatgactgctagctagcaggacaatgattacacaccaaacacactgccacaactaattttcaagcagatcaaaataaatcagaaaa

SEQ ID NO: 392880 - DNA, 251 bp, Homo sapiens
cagaacagtaccttcctttaatgctgcgacagtcttctaaaaactcttgcagtactcctgtagaaatgaccttcttcagaatgattttgtctggtgttctcttcgttcagattctctttatactattaaaatgcattatcagtatcttttcctgataaatgacctgacaaaattgatattagtggatcgaagtaatatctttaaagttgatgtacagagaagaacagaacacaatccaggtttcagaaaat

SEQ ID NO: 392881 - DNA, 126 bp, Homo sapiens
cgtgacacttcagaccaaaccatttaattgctgttgtgactcgccctaactggagatcaagaaggccatctgtgccagatgtagcagctgtgagatcacagactctataagtccgggtccctcagg

SEQ ID NO: 392882 - DNA, 663 bp, Homo sapiens
gccttacaaactctggtgattgcctgtttgccctcatttatgataaagttccaaagtgattgtttgtacctcccatatttaattataagacacatcataagacacataattataagacacctatttaattataaaacacataaatcattgcaagcagtaagaaagatagctcgtctgagagagaaacacacacatatacaaacccaaaaagcatcttcaagggtcatttaatgtgagggcagattgattgccctgtctgcctcagtacattttaaaagatatcagtgtaggaatttaatgaactagttgacaagaggaacatttttttaaacatacttttttatgaaagactgggaaatatttaatatttatgtagggaagattttcatccaaaattaataaattaaaaatagttttgacatttaaagttatataatgatcatgtagtaggaaaatctctgagaaataaaatcttgactaataataaatggttaatatagatttactttatttatttcactatctcttggtactattttaaatctctaggactcctgtcatttttagttataaattcatgttttttgaaaattgagaaatcctaaagatggcatatttttgaaataatttatggattattcaatacaactggttggtgtatac

SEQ ID NO: 392883 - DNA, 318 bp, Homo sapiens
tgtatagacgtatgtgtaggtagagggtgcgtgttgtatagatgcatgtgggtatacagggtgtgtattgtatagacgtatgtgggggtagagtgtacatgttgtatacacatatgttttgggggtagagggcacatgttgtatagacatatgtgggtgtagagggtgtgtgttgtatagacgtatgtgggtgtacagggtgcattttgcatagacgtatgtgggggtagagggtgcgtgttgtatagacgtatgtggtggtagaggttgtgtgttgtatagatgtatgtgggggtagagcgtgcatgttgtgtagac

SEQ ID NO: 392884 - DNA, 265 bp, Homo sapiens
acagtgctggctgctccaggccacaggagaagctttcctgacagatgtgtcggattgaccaaaagaccaaaaggggctttgcggagattatgctgtctgctcgatacttggcccctaagcctcaagaaatggaagctcagagggcatccttggtggcttctagaaagggtcagagctttaagcaggggcccagcaatggtcagcttccctggccagccccaggctgcctccaaaaggcctggcggaaggcatttgccaaggtgtc

SEQ ID NO: 392885 - DNA, 644 bp, Homo sapiens
actctcccagaacaaaagaagaaaagctctaatgaagaaatactgttgaattcttaatgccatatttacactttaaacttgatgtcactatgcctgagtctaggcctaaagttcttgtgtgtgtttttcagtgctgatctgattgttttaatttagcattgcatggaaacagtgaaatgttaagagacaaaacatacataatgggtggaggcatatgggattttttttgaagcatattgtagtggccttttaaaaaaacaatttaaactagaagaaattttctgtaaaattaattttgctatttctttgcattttgtcttaatcatttatattttactttgtaccacaatggacttgagccacctaataaaaatacagtgcaaacatatgcaacttatagttgatagcgtggaatcaagatgaagaaaaaaataaggaaaatcttactttgtaagtaaaatgtgcaaagtgatttataagttaagatggaattttagagtttccttttatttgatgtatttcttgatttctagtattggtaagattatctttaagtcatgatttttatatatatggaactcaaaattgatagttgacaaactagcttttacaatttagtttatgtctgtcatttcaaaaaaaaa

SEQ ID NO: 392886 - DNA, 167 bp, Homo sapiens
gggaaatttgtgcttcttgtcctgcagtgttgggtcctagcattctagaggttctgcttcccagaggggaatacatcaggattctcagaatcctactaaaccgaaaactctaccttgtcattttatgcctctcatgacatgagatcatcaggctaagaaaggagtta

SEQ ID NO: 392887 - DNA, 205 bp, Homo sapiens
cagaagtgagacatcagcgaagaaacatcacgatcaccaaattacgatgaacaccatggaggaaacaaaggacactgtgacaccaaggaaggaagggaggttacttttcatagtggctgtaaatagaactgaaggctgaaaaacagctgttaaaatggcttgtttgtttgaagatgaatgagagtacacaataaaaggtaattct

SEQ ID NO: 392888 - DNA, 240 bp, Homo sapiens
tatttttatatatgtttattacttttgaaataatttgtttctcttgcctacttttctgtaagtctttattatgaatatgtgtaaaatgtcatcaaatgcttttctacttttaataaaataatcctataaaaatttaatatccttgatgaacattgatgcaaaaatcctcaataaaatactggcaaaccgaatccagcagcacatcaaaaagcttatccaccatgatcaagtgggcttcat

SEQ ID NO: 392889 - DNA, 274 bp, Homo sapiens
taacacctattttgtgcatggtcttggtctatgtgcttttgcagaacaaaaggtataatctttgtgcctagggatttgattatccaaatatactctctaaggatgcaggcatggcaagctaagaatacacccagttaaaatacttgcctttacgcatgtgctgtacacatttcagaacagataaagtacatggcaattttcctctaactattcaagtattactttaaaaaaattcacatcctgtggggtcataatcttcacctagggtaaatag

SEQ ID NO: 392890 - DNA, 443 bp, Homo sapiens
tgatatgtctttggttttgatatcaagtgacaccaccttcatagaaatgagtttgcaagtattcctccctcttttatttttcaaaatagtttgagtaggattggtattagttattctgaaaatgcttggtaaaattcatctgtgaagccatcaggtctgcgttttttgtttgtgtgtggtttggtatttatttatttatttatttatttattttggatgctttttataatgccttcaatcttgttacttgttattattctgttcaggtttcaaatttcttcatggttcaatctttgtaggttgtatatgtttaggaaattgtcttttcttttagattttccaatttattagcatataattgctcacagtagccactaattatcctttgaatttctgtggtatctgttgtaatgtttcttttttcagcttagatttatttgggt

SEQ ID NO: 392891 - DNA, 334 bp, Homo sapiens
gaatatggaaaagctgttgggaaatcagggtacggtaacgtttctagattttttctttcttttttttcccccgtttcagctatctggaacagggcaagaaattagcatttgtacaaagaaagtctttgaacaacacacacttggctcaagtattcctcagacccagactccatgcattggactctgtgtgtactaagtgatcccagagtggcttactggagattgacaatggaaaaggacaatttgaaacacgcccgtaggagaaaatggaaacattgtacaaataacataggaacacaaaattcactcttcttttttttttttttttgagatg

SEQ ID NO: 392892 - DNA, 602 bp, Homo sapiens
aaatattccatttcttgatctgggtagcagcagcatggatatatatagttggtgtgcttataatctgttcacttttctagatgtatataatattaatagtttatttaaaaattaattgtcatgatgatatttgatattaggaaaagataaggggtttttgctgtttaacattgtgagagcccactctgaggaggcactgcacttacagtgaagcctccagtcctgtggaaaagataggaattatgcaaataagggcacattggaaactatgaaatgctggcaaatataaagcctatgttactttacttgaaatcatagttgccgctctggtgatagagcctgtttttccaacttcattgaaatcctaaataacaatttctcctgtgaagattccatctaaagagcaagtcataaaatactccaaaaaagagaaataaaatcaagtataattatgatagacaggaaaacagggtgctatgagagagaatgatggagattttcttaggattgggtggtcatgaaaggcctctctgaagatatgacaattaacctaagagcaaaggatgaatagagccatctcacacagagcgggaagagttttt

SEQ ID NO: 392893 - DNA, 273 bp, Homo sapiens
tcttaagagtggagagaaggtgctgacgacattgcatttctgatggcacccacggttagtagatacgcaggtgatcctgatgagcttccttcacagttggaggacagatgctgtaacggtagtaatagtgggtgcataaagagaccccagcaagagtataagtgaaagggatgcagctttcctgaaaacatgaatatcaaaggcggatgctggtataggacacagtcaatcagcttggctggtgatggcaagctcctgctgtgataaaaaata

SEQ ID NO: 392894 - DNA, 355 bp, Homo sapiens
ggaaaactgtgaggagattttaaaaaaggagctaaagtagaatttccttctactttgccagggtcctgggatctaatcccataaaagtggctgtatttacatatactgcccaaaagagggggcaataggcatgctttcgtagacccagctggctgcccatttgaaatctattctttccttcttcactgaagagtcctaaatttgttaggaacatcaattgctcagataaaatagataatttccaaggcacccttggagctaccagtcatgcaacagaggtctaactaatgggatgtaagtacaaacatgcaagtggagcttctggaaactactgttttgttctctttgcgtagaa

SEQ ID NO: 392895 - DNA, 206 bp, Homo sapiens
aactgagcatcgttaatagttggaccaattgatattatgtgcctttggatgtgacgaaatacaaaagctacatttgctttgttagttttcctgtcaaatgtgttaaaccagaagacaaccataaggaaaaatcaggtaagtctggactatgagacattctacaagaaaactggcctggtctttttttttttttgagacagggtttg

SEQ ID NO: 392896 - DNA, 413 bp, Homo sapiens
acccctatcataatgagagcccggtgaccgtgcttcttgctttagaggaccaaaagacctcaaaggcctatgctagtcagctgccatcttaaacgctccagtgatttttagacagactagaaagaatgaaagcacaatggttaaataaacaagtgaatccagtataaatccacccactaaatttcatacaaggactgagggcttctaagtctccaggctactgagccatccttttgtttagctgagacatgcagaagaaatagtatttatgtggtgtcctctatggagcagaaaatgcatttcctactaatttcagtattactaagaaagcagactctcctgcaaaatgcattatgagctcctgcttgcttgcttcctctgctgctgagtttctagttcagataaaagaaagc

SEQ ID NO: 392897 - DNA, 311 bp, Homo sapiens
ttaattcatttatgttaggctgactacacaaaggactctgcccaaaaggaatacagactagatagaagacaaacaggtagtcaattaataatactaacaacaataataactcatatttgttgtttatcaggtagcaagcattgttctaagggtcttaaatgaattagtatttattcactatgacaatcttttggggtggcataattataatccccatttcagagactactaatatcttgcctaaggttatacagctgtgaaacatacaccagagtaaactggatacaaacctaggatgtctaactgaactc

SEQ ID NO: 392898 - DNA, 174 bp, Homo sapiens
agtgtgagaattaaaagttaattggtaatgcccggcatatggcaagtactaagtgatagctgttaattttccatgcttgacataaactttacgtaaaggttacttttctaggtttgtttgccaagcaccttagtttgttttgcgatttcaaggagaacaatttggtgtataatg

SEQ ID NO: 392899 - DNA, 699 bp, Homo sapiens
taatttttaaaactttcattgtgcacatgagctactcactgccttgagttcactccccttgattcagtgtgacagagtgatgcgctgctgcacagttgcatgtattgagatgtgctgctcttcccggtaaaaagtgagaagaatttagagagaggggaaagggtagaggcttcacctgagctgagggaggcctgactccccagagcagccaggcaaatctgttggaaatggctcagtgttaaaaaaacacctttaaaatggttagccttatctttctttggttggctagaatggagctactaatgcttatttgacccttgaaggacgcttgttcttttcagaattggtctgggtatcatactgtggttgtgggtctgattacctatacaaagggttctttttagtttgcatttctgggcaaagcagaagaatgtgtagtaggcatgtcctctgcttagtaaacattgggtagcactttagagtgcttttctcttcacaccgaaatgacttcccccagcttctgtgtacctgcattagaggatcagtttgggcggaactggaaatctgtcttctggctttctgttcagtcctcctgacgctgtttttttctgatgtatgtgtgcttaaaggctcagaaaactaagattagaagcgaattctgagtcatcacctgttcttattaacctgtgaatgagatag

SEQ ID NO: 392900 - DNA, 291 bp, Homo sapiens
caagctggggtctgtggtcctgagaaggcaaaagaatctatctttattcttagaggaactgcctgctgctggcagagagacagttggctcttgaaagcataatccttagaatattttatttgtagttaatacatcagagcagagacggcagaaagagaaaaatcgctaccctgggactaagagaagagtcccatcagcccagcccagccaacaggtgtatagtaaccagctcccaacaaacttcagtggggaatgcccagggagaggaagtggggcggggatgggctcccg

SEQ ID NO: 392901 - DNA, 366 bp, Homo sapiens
gtgtcacagtgtctgtgctttgcagcaaattgcttgacttgagttttttccttctaagaagcaaagatattggaaacaggagtgccaaaatccctaaaattttttaggttctttgtccgttggatgattctaattgcatgcccatttttgtagccaaggatgtaatttccctattcattggggcttctgtcaggcaacaatggaaaagaataggatgtgaagcacaaacctatctttatagtttgtcatttctaccagaagatatcatggcatatataattaaaaccaatggcaaaaaattattttgactacctgtggcttgaatgtacttactctatccctgctcctcatgaatatgttaaacat

SEQ ID NO: 392902 - DNA, 693 bp, Homo sapiens
taatcatccaccttcactatactgttgttctgtctgctttgggcagggtgtaggagagagaccgtgtgccgtggggctggtggcctgctcagggacagccatggggacctggcagctcaaaacagatggcagcagaacaaaagaaacttttgctttggaagcacagccaaactccccagggcatcgtcatagatggcacctagagcatgggctgcctcagtcagggggacgtgcctgtgttgtccagagagcccagccagggacgaaaaaggagatgaggcccctttcctccatgtccccatgcccagacacataccttggccgtaatttcttttagaatccctttgggaaggaaatacaggattgagggattttggagtttctggtaaactcaccctccctccagccccgctatgaggaggaaagtagagatgaaagactcacgctgttcatggacttggagaggattatctttgagccaagatttggacaggagtgaagtcggtccttaagaatttgtggcgcgaccggagctgggctcctgacaggtgggcttgtgttgtgtcccctctgatggcaccaaagtccagggaagggggctcttgatgtctgctgggggagtgggggcagctcaggatgaatgcagtgccctgtcctggctactcacctgagggtgtagctcgcaaaggtggg

SEQ ID NO: 392903 - DNA, 217 bp, Homo sapiens
taatcatccaccttcactatactgttgttctgtctgctttgggcagggtgtaggagagagaccgtgtgccgtggggctggtggcctgctcagggacagccatggggacctggcagctcaaaacagatggcagcagaacaaaagaaacttttgctttggaagcacacgcacacacacacacacacactcactgcggagaaccttgtgcctggctcaga

SEQ ID NO: 392904 - DNA, 815 bp, Homo sapiens
ccacgcctaaggtccaggtcccagggctttcccttgcaccttcatccctggccctgcagaggcctgcttctcgcttccggggtcgccagagcgcccctcccgccaccccgccatctcttggccggatcgtgcgagagaaggggaggaggtctggggtttccagagtccgcggttttgctaagaagccgcagtgatgttgacgcggctggtcctcagtgcacacctgagtagcacgacctctccgccctggacgcacgctgccatcagctgggagctggacaacgtgctgatgcctagtcccagaatctggccccaggtgactccaacaggcaggtctgcctctgtcaggagtgagggtaacacctcctcactctggaatttctcagctgggcaggatgtgcatgccatagtaaccagaacctgtgagtctgtgctgagctctgccgtctacacccacggctgtggctgtgtgaggtctgccacaaacattacctgtcagtcctcaggacaacaaaggcaggcggcccggcaggaagaggagaactcaatctgcaaggcccatgatagtagagagggccgcctgggctaccccctcagtgcccatcagcctggttccggtggtcctaactagccctgtctccttgccaatagccctgtgctccccagccccctcccccatgcagacggctgctatgacatccctgttccttaaagtgcggggttcctcgcttgcttctcctccctaatggcacctgtgcaaacctgctgcagagaacagtgtcttgggcagtgcgataagttctccaggttacaaa

SEQ ID NO: 392905 - DNA, 425 bp, Homo sapiens
tcacccatgacccatgatgtcctcacagtcactcctactctaaagccttccgtgaatctcacaaaattaatactcacttcctctttggagctctgggagtagtagttaatgtctggattttcttttctcatctataaaatgagatcactattgtgccatgaaatgaatacttgacagagtcaaacagagaggataatcacaacccacatttttttttttaagacggagtcttgctctgtcacccaggctcaagtgcagtggcacgatctcggcttactgcaacctccacctcccaggttcaagcgattcttctgcctcagcctcccgagtagctgggattataggcacacaccactacgtttggccaatttttgtattcttagtagagatggggtttcaccatgttggccaggctggtcttgaac

SEQ ID NO: 392906 - DNA, 671 bp, Homo sapiens
acaaagatgtgtcagaatatctgttttaaaataaaatattgtatgtatgtcacatttaaaaaatctgatattgatctctaaagggacatttgtgttgtttccaggaattgtcttttgcaaataataattaacatgcatgtgtaaatatgtaaagtcctgcctcggatatttttggtatattttggatacagtgatgtggtaccatgtgtgtgtccatattttttttcttaagcctttgatgttgtattcaaaaagttattgttgagactagttgcataaagccttcctcataaatgtttatattagatttcacatatgggtaagatcttttgtatttgtctcagtgtatcttttatttcacttaacgtaatggcctccaggttcattcctgttgtggcaaatatcaaaattatattctcttttgtagctgaatagtattttgttgtgtatatataccacattttctttattcatccaagttttggacacttggattgatcgaataccttggctataaatagtgttttaataaacattggagtgtagatttctctttgacatactgattttgttttctttagctacaaacaaaataggactaacgtatgttccagcaatcccatttaattaaaaaattaaaaatagaacctgtgatccagcaatttgaattt

SEQ ID NO: 392907 - DNA, 263 bp, Homo sapiens
gcatagccactgcctgttagatgtcatctatatgaccatgggctcccccaccttccttctcttctatggtgggttccctctctcagtggatggcaccaccatctatctggccacatctagaaacctgggagacagtcctcactcccttcttcctcacatctgattaaatcctcaaatctgattaaatttgccttgtgaacagttttcaaatccactctctcttctccaaaccttctgtctctgccctaacccaggcctttgtc

SEQ ID NO: 392908 - DNA, 183 bp, Homo sapiens
cctctgtcatcctggacagcagagacttctagaagtcagatgcaggaagtgcttcccagagcaagattgtctttcattaactgctggagacgtggggcagagactcacccaaggtctgcagcaggcctaagccttgtcccttgttgtatccagccctgtatgcgtttgtgtgcgtgtgtgtag

SEQ ID NO: 392909 - DNA, 493 bp, Homo sapiens
gtatccgagcaccagtcttaatcaaacatcatgtgcttattgaggccaagtgcagctcggcctcagtgtactttaaatgcctcacaagcccttgaaggagaatctcactcaatgcctggaggcattcaacccgccactctaggatcccatcactctcctccctcacaaagaccctggagctccttcaataggacactgctgccatctcagacagctggagacgctgcccagaaacacagccatgaggccacgggatcatcacactcaccctgctatgaggaaacggcccagggttcacaggactgaaagcttgtccaagaagcctggccacagccagcattcctgctcccctaaggctgctatctccacacagctggcgatgggctccccaggaaaacgggttaccaggcccagatatacaaattcagatttgcaaaagggaagaactgagagatatcacataaggacccttgccccccttttttttttttag

SEQ ID NO: 392910 - DNA, 490 bp, Homo sapiens
agggcactaatggatctccccagagcaggctgggacatcccaagatacctgaggagttggtgccctgagccccccgcgcctccagcccatgacttggagctgatcaaagtgggagtaggagtacctgggtgcatgatgctttgggttactttcatctgaaatagcagttaatcctcacagcctcacctctaccctgcttcaccttgagtggcctggaacagtaagaaggtcacgagctccctctgctgaagcccacagaagggcccacccactgtggaagagctggcttcatctctgagtatgctggggtcactctggatgttggaagcctgggatcaggacctgaggtctgctagttacatgtccttgcctttgtgctgctgtgggcagaacaaaatctagttctttcccttttcatgccactatgtaacacagtctcaatctggcccagaaagatgaaaaaaggaatataattcacaaagtaaaatga

SEQ ID NO: 392911 - DNA, 283 bp, Homo sapiens
ggtaacagagcatcagcattcacagagaagagctataggggaaacaagaaaaaatatagaaaacacagcatcttaattatttaattcatgtgttttagttcattaaacatcaagaggaccaaaattaagcaagactaaaaaatacctaaatatcgtaattgataaggtagaaatatgtgtgtgtatgtctgaacataacaactcattcttttttaagtggcaatgaaacattcataaaataaaaaaaaagaaattccttaattgctataaaagtattcctggg

SEQ ID NO: 392912 - DNA, 387 bp, Homo sapiens
gggctacccctctgtgggactgcactccttaccttgtttaggctctgatacttccacagtaggcagccctcctacacagatgctctccttaccttgctccttagcatgaggcaagtgtgcctgccttacttactctgctttgcctaattagggccaaattgttcaggaagaagagttggaaataacttttcctttttctttcttttttgagtcaaaatctcactctgtcacccaggctagagtgcagtggcgtgatctcagctctgcaggatccgcctcccaacttcaagtcattctcctgcctcagcctcccaagtagctgggattataggcacatgccaccatgcccagctaatttttgtatttttagtagagatggggtttcac

SEQ ID NO: 392913 - DNA, 196 bp, Homo sapiens
cggagagcactgtgattggtctggtttgagttctacgtccttctctgaatcagttgctgtgcctagaggtgtggagtaatctgatgggctaggcctgggtcatgtccttacccctgaagtccaggggaggatcttgccactcccaggaccatgtggttttggaataactaaagagattgatcccctaaggaagcaa

SEQ ID NO: 392914 - DNA, 440 bp, Homo sapiens
ggtgtttggggaagccaataaaacatttcatgtgtgaaggctctttataaatagtaaagggctataaaaacatcgattatcattaggactaatgatgcagcccttgtcagcagtaaccatctgttgtggctgtcactctcaaaagcaagatgcgaaaatgacccaaaggtatttaaattacgttcaccttgagttttgttcccatatgactgtttttgtttgtttttggtaggtaagctgacactatggttagggtttgagctctgtccttggagccattgaaatgtagagctggaagggacactagaatcaccaaattcccctcttttaagttgtagcttatgaagtttaactgacttacctaagttaacagagctgcttcaaggtataaccacaaagagttttgcttaaactctgatttgtataattaggactataat

SEQ ID NO: 392915 - DNA, 792 bp, Homo sapiens
aacgggtacctgggtttgggggcatgcagagtatgcccatggaggtgcccatgaatgccatgcagaggcccgtgagaccaggcatgggctggaccgaagacttgccccctatggggggacccagcaattttgcccagaacaccatgccctacccaggtgggcagggtgaggcggagcgattcatgactccccgggtccgtgaggagctgctgcggcaccagctgctggagaagcggtcgatgggcatgcagcgccccctgggcatggcaggcagtggcatgggacagagcatggagatggagcggatgatgcaggcgcaccgacagatggatcctgccatgtttcccgggcagatggctggtggtgagggcctggcgggcactcccatgggcatggagtttggtggaggccggggcctcctgagccctcccatggggcagtctgggctgagggaggtggacccacccatggggccaggcaacctcaacatgaacatgaatgtcaacatgaacatgaacatgaacctgaacgtgcagatgaccccgcagcagcagatgctgatgtcgcagaagatgcggggccctggggacttgatggggccccagggcctcagtcctgaggagatggcccgggttcgggcccagaacagcagtggcgtgatgggcggcccgaacaagatgcgatgcctgcacagcttcccaactaggaacagcagggatcctccagtggattcatcatggaggcacatgggacacctacacaaagccaatgtcaccacggacaatgggccaa

SEQ ID NO: 392916 - DNA, 482 bp, Homo sapiens
gagagagatcccacacatggccgagcccacctcttcatgtcgcccatgaggtagctccatccacagggcccagatccctcgcacacatggcctagccctcctctccatgtcacccaggaggtatgctccatccacaggggccagatccctcccacccatggggccaggcaacctcaacatgaacatgaatgtcaacatgaacatgaacatgaacctgaacgtgcagatgaccccgcagcagcagatgctgatgtcgcagaagatgcggggccctggggacttgatggggccccagggcctcagtcctgaggagatggcccgggttcgggcccagaacagcagtggcgtgatgggcggcccgaacaagatgcgatgcctgcacagcttcccaactaggaacagcagggatcctccagtggattcatcatggaggcacatgggacacctacacaaagccaatgtcaccacggacaatgggccaa

SEQ ID NO: 392917 - DNA, 502 bp, Homo sapiens
ggagcctcatagtttttctccagcctccacccctccagactcgcactttatcgcccctctcagggctcggtcaggaagagtttcggaagctgagtggtggtttcttcttttggaccagccttattgaaccctgtcaggaaaagatagtaatcacggcaaggaagtagactgtttgcaggagaacaaaaagcaggggagggagaggacgaggagaaaggaaagcaagtgtgaagggaaaggagttgctattctttctcagagctaagtcatccccaaagaatgccagttgtgtctgcctggcccagtgcaggggggagcaagttcttgaagcaaccttgagaatggccattttagcagtggaatggagagtttgagcactccagtggggaccctcttcccagctcttactggaagccccaccttaggtagtaggagaaatacatctgcccaatatctcctttcagatgatccagtgaagattatttgttaggaaacgggctag

SEQ ID NO: 392918 - DNA, 342 bp, Homo sapiens
agggcacctccacagggcatcttggagggtgtttctctgcacctcctctcagaggcgtgggggaatcccgtgtccggtgactgagtttcgtctatgataatttgcactcatttctgcccctgcattgcccttcatggacattgtaaacctgatgtttctaattgtaagaagggtgccttccccactgccgtgatggttggaggatagctcacacctagtctgcgatgacctgttagggcccagtcatgcaggagggatccccccactcctctcaggccccccagccagcctgctcagtgtcccgaccactggacagttctcggaagcatcctgaaccctccc

SEQ ID NO: 392919 - DNA, 313 bp, Homo sapiens
aaaaggtgggaggtgggagggagagcattaggacaaatacctaatgcacgtgggtcttaaaacctacatgagaagttgataggggcagcagaccaccatggcacatacatacctgtgtaacaaacctgcatgttctccacatgtatcccagaacttaaaaaataaaaataaaatttaaaagaaaaaagaggcacaaaggaaactgtgtgccccctcctccaccatgtgaggacacatagaaggtgccatctatcaggagcagcctcttaccagatactaaatctgctagtgccgtgatcttggactttccagc

SEQ ID NO: 392920 - DNA, 108 bp, Homo sapiens
tccactgtgaggcactggacaacaattcttagaaccatgttcatccgtacagctgctagtctgggaactgcttaataatagatcccaagacacaaaagcgttttcatc

SEQ ID NO: 392921 - DNA, 369 bp, Homo sapiens
tagggaactgcaagccatcctgcaacctcaggacacactcagaaacaaccacgtggaccacatcacccaagctcagctgcatggctctccgttggggtaggacaaggacctcttccaccaggctcaactggagtcctatccctggtcccaggaccacaaggagcatctctttttttggaatcacactgctccattcgaaggacagccctcagttctctgtcttcaaaagaggctgcaaatggtgctgattggcagggagccgacagcagcaacaccctctacaactttaaaataaaaatgtctcccagggtgggatattatgctgaccctacctaaaagcacattccctagatgttgcttgttccgctg

SEQ ID NO: 392922 - DNA, 410 bp, Homo sapiens
gctttatgataaatcttgatatgtagtagtgtaactcttccaaatttattttccttatccaaaaataccttggttatttaaccctttgctttatttaattctcatgaaaagcctgtggtatgagatagttttgatttttatctccatttcacaggttggcaaactcagagaagtaatatgtccatggccacacagcaaccaagtgctagggagggattagaatccagatttgtctgcttctaggcctaagaactcaagtgctatatgtactacctccttaatcctaatgccaaatgaccccgtcagggtatttaatatgaatgcattacaattttaagaaattctcacgttctaaatcattcatttgcggtgaaaaaatcttgtttgggctgtgtgtggtggctcaggcc

SEQ ID NO: 392923 - DNA, 635 bp, Homo sapiens
aggctgaagtctgactctcaggttggtatatcctgcaggctcttgggacaggagctcattctgtggaccgcactggagaaacagaggctggaaggctttgtcctccccacctgcccccatctgatgtgagatctgaggcagggccactgtcaggcctgggattaaacatcaggtaaaacacaatgatgtgcaaagtcccctgagccctatatcagtgccatgagaaacatgagtgtttcggatacactttccctcatggcatccagcactcaagaaggtctttaaaagagaattgaggaaagtaacatcatcctgctttgaccttcttccaagttaagtgagagcattctcaaattaattagtaatatgataaataaaacatcagagaattagcactttacatttattaaccaggcaaaaactaaaaggctagtaatacctggcaaagatgtggagataagagcccacaggcatggctggaaagaatgtagactggaacaggcattctggagaaataatttggctgaacttaaccaaagtaagtatgtgcatatgctatgagctagaaacaacaacatttcagaaaacttgagcagattggagagcatttgggagttgataagagattcccaatc

SEQ ID NO: 392924 - DNA, 655 bp, Homo sapiens
tgcagaagggatggagacacttgctgagcctatagtagtagttcttaactttgactgttccatcagaatcaaacggaattgaccagctgaccagctggctaagtacccaaatgtgtgtggtgagggtgagacttaaaaacagagctcaacatctgaaatctagaaaaatttggtgccagtgttcttcatacgaagttagtgatgcgctgccagtattgcaacagcatcctcctgggacacatttctaatgatggacagtctgtatctgcctcctgccagctgcattgcaaacataatatgctctttgcagtttcaatcaaaatgaaattcttcatggaaaactgtactgtaactggaagtatttgaaaatcaaatgcttcacagcaggaactgtttctggcagcttggtgaaccaagaaaggcaatattcttctgggaaacattgccttgagagacacaacatgaattacaacatcatgatgtattcagccagatgtctgcaagacagaaaatcacgtgactgagcaaggcatgtgaatgttcttaaagggggagaaatagaaaagaaaaaccaaacatgcatcagatatttcctttttgcatcacattattcccaatcatatggatgccttatgtttataacttgccaattatg

SEQ ID NO: 392925 - DNA, 383 bp, Homo sapiens
accccttatatgaggcccagtgagatgacacttggtagaggagcgggtcagcaccaaggcaggacaagtttagctcttgaatctgggcaggccaaaggagatttcaagaaaagaagacattgagaagagaaagcaaaagagcattacatgaaattgcatttagctggggagacagagcaggtgattatctggaaatagcaggagaaagccaagaggaagaaagagaggaaagcaaaagatgattcatgtttgtcaggaaagtgaatgcagtcactctccctgaagaagtaagcatggactatataggagcagataccaggaactgggccatgctgccaaaacctctgctgtgccttgcccactctgtgctgtcgccactgcag

SEQ ID NO: 392926 - DNA, 334 bp, Homo sapiens
gaaaatttaaaatcatgtgccctcaattttcttggccaggtgtggtggctcgtgcctgtaatccaagcactctgggaggctgaggtagaaggattgcttgaggccaagagttcgagaccagcctgggcaacatagctagacctcacctctaccaaaaaaaatttaaaaattagctggggatggtggcacatacctgtagtcccagctacttgggaggctgaggcaggaggatcgcttgagcccaggaattcgagattacagtgatctgtgatcaggccactgcacaccagctggagtgaaagtgagaccctgggtctaaaaagatttttttaat

SEQ ID NO: 392927 - DNA, 799 bp, Homo sapiens
tacaagtatatttaaattatgtcaattatgtttctgccaaattttagcaattgttagagtgtaagtataatcaatataaatataggaatgtgtgaaatacttcacatgtagacttccacaaagatttctcatgaagttagtgtgagataccagggtcttcctgattagtacttatggctgtgacctcaggcatctttttttctccatcagatggaaaaactgatgctctaactctcagatatggtcatagcatccacaaatagagagtggccatttgtggggataactgaagcaaataattgtcttcattgtcataggtgacagtttatttgcaaccagaaacttgagttctgtttttgttcattgagagagtgccctgagttgtaatgttgatccaagttgaataatctaagcagaacacttaacctaatgacaataaggtttgtagaagtcattttcaaactctaaaatcatgtgattgatgatttttattttattgaagatttgaagcaattaccttgctgtttggatgtgtacatgcctcatacataggtagaacaggtaattatgtgccctacttttgtgccacctttatagatttgcacacataacactttattgtagtacctgtcccctcacaggatagactttttttattctaaaaactcagagatatacagcatacatgtaatagacactttaaatctagcaaaaaaaaaaaaaaagaggctaatgcaacacactcaaagtacagcacttgatattaacactcagtcttactgtaacttttcctacatta

SEQ ID NO: 392928 - DNA, 280 bp, Homo sapiens
ccatgctcatgctgctgtactccagcctgggtgatagagcaagacattgtctcaaaaataaacaaacaaacaaacgaagactgtagacctcatctcagatttatattttagattctaattccttaacattttcctcttggttggcttgagcctgtttttattatggggctacaagcatggcagcaggtgaaataatgccaaccaaggcgagagtcttaaggaaaagacaaaacaaaacatttgtactcctcagtccttagagccaagaaggtagactaag

SEQ ID NO: 392929 - DNA, 528 bp, Homo sapiens
  misc_feature (379)..(379): n is a, c, g, or t
agagctgactccatccactgtctccagttctttcttcccattcccatcaggctttgtccccactgctcccctaaaactgctattgttaaagccagcaatgtcttcaactgtgaaatacccaaaagccaggtacaggaagaggtgctttaaaggaattatctcatccatttacttatttctttttaaaattttttaaaattgaattttaaaaagatggaatgcttcacaaatatgcatgtcatccttgtccaggggccacactactcctctctgtatcgtttcaattttagcatatgtgctgccaaagtgagcattatttgtttatttttagacagggtctcactctgccgtcttggctttcataaaagtctggtaaccnatattattgattaccagacttttatgaaagccaaagaccgcttgctagtaggaaaaaatttcaaataataaccaacgctgaaaaatggtctgtcataaattatttccccggtaatttttgaaaggaaaaattataacaagtactattta

SEQ ID NO: 392930 - DNA, 420 bp, Homo sapiens
atgatgactcgtctgtgtgacagcagaatgaatgaccacagcagagccagagggcctttgcagccctgttggtctcaaatttactcatgtatagcacatgcaacctgcattaataatcacttctttggaatgttttctacctggaaagggaattagtggatgtaacagttcattccccaaacataaaattttccttgacgttttgattgttataactcatttaagtgggaaagtataagatttgatatctagccctgaagactcatcattgagcacagtgctagaaagaaatgcctaccaggctaggtgcagtggctcacacctgtaatcccagcactttgggaggccaagacaggaggatcacttgaggccaagtatttgagaccagcctgggaaatacagtgagaccttgtctctacc

SEQ ID NO: 392931 - DNA, 158 bp, Homo sapiens
catatggctcaacctaaaattataatcaaagctgaagtaaaaaaaaaaccaagtgtgggagtttaattacaaatcttcagagctctgaacaggaaagaaggaattacatggagacaaggagagacaatgaaattggacattagtgaattacatgcaag

SEQ ID NO: 392932 - DNA, 769 bp, Homo sapiens
cccctcacttgttctgccttctctactcctaggacctttgattcaattagctggttctcagaatcctgggcatagctcaagcctgagtggctcttccagactctcacccaactgaggaggttggatgatgcgccattttccgctgcaagctgagaagcacctctgccaagaccaagaggtctcactggtggagatgcactagaagtatgtgactctgagggtcacagagcttgctaaacaggctgtctaccatctttggcaaaggcaggaaacaattacactgtaataatagttattaatggccagatgttgcactaagtgatttacatacattctctctaatcctttcaatagctcagtggggtgagtagcagtatcatccttttaaaaatgaggaatcttaggtcttaggttaattatggatgctctaggatttcctggataatcactgaactcactaatcaagggctacatatctgacaaatatttcagacattaaaacatttgataataaaggagtctatggtattatttgtccacatgtaactgaataaagaaacttgttaaagaaaggagaatggcaaaaatgttatatattatccttccattattaatgctagtttaaaagcttgaaattgacaggcaactcagtattttccaacatgcatcacattagcttttaattcattatctgtctttattttttactgtctcctttcttgctatggtcttcattttatactggcgctgaagagacatctgaaaggat

SEQ ID NO: 392933 - DNA, 387 bp, Homo sapiens
attgcgttactgtgacacagcaacaaacccagtctaaacacaggcacagttggttctggccctcaaacagcactagcgggtgaatgaggggcgggatgaggggacccaggcctagtcatgccactgactcccctgctcctccaagctgtcaccaaagcaccccaatgctcatttcctccaatgcaaaatgaatacacaatgacttttctttcagcagcggtgactcccttgtctagtcttaacgggtacacacgtggtcatgacgaaaatctgaacaaaaggaaaaaattccaattcccacttcccacccacctataactggagatgtgggatagaacagattctagtagggcctgcagtctcatgtggcaggatctggctttttct

SEQ ID NO: 392934 - DNA, 223 bp, Homo sapiens
aaaatcccctgagcctaatttccctcttggtcagttccagtagcaagagagatgcaagacagagaaggatgtaattatgcagtaaacatttattaagcacctactgtggtctagacacagatttcagatatgggtgagacatgatatggagatgaaaagaaccatgagaaataactagccagggctgggtgtggcagctaactcctgacctcgtgatccacct

SEQ ID NO: 392935 - DNA, 1036 bp, Homo sapiens
agtatgcaagaattgattttggtaaatgcacacacgtcttccatcaactttcaggggtagctctaaaattaatcacatactgctataaaatataatcttttgtatccaaaatcttcatctaactgaattgtaaaataacttctttaattattattattattattattgagatggagtctcgctctgtcgcccaggctggagtgcagtggtgtgaacttggctcactgcaagctctgcctgccaggttcacaccattctcctgcctcagcctcccgagtagctgggactacaggcgcccgccaccatgcctggctaagttttttgtgttttttttagtagagacggtttcaccgtgttagccgatggtctcgatctcctgacctcgtgatccgcccgcctcggcctcccaaagtgctgggattacaggcgtgagccactgcaaccagctggcattgagttctttaagaggtgctttcaaagtgccatttggggctgggcgtagtggctcatgcctgtaatcccagcactttggtagtccgaagccggcagattgctggagctcacgagttcaccaccagcctgggaaacatggcaaaaccccatctctacaaaaaatacaaaaattagcccggtgtggaggtgtgtgcctgtatgtagtcccagctactcagaaggctgaggtgggaggatggcttgagcccggaagtcagagattgcagtaagccaagattgcgccactgcactccagcttgggccaatagagccaggccttgcctcaaaaaaaaaaaaaaaaaaaaaacccaaaacggaacaccaagtgccatttggagttcctctttctgtttagtagtcttttgattaatgtgtagtatgaaaacacagtcactgtgctgcaaagagttatgaggataatacagtgtaaagtgagttagtacagtattcagcgtaatggtattacatattaatatcacatgctaaatgtgatagaaattataagtacaaaggaagctagagaacgagaataaggtggtctggc

SEQ ID NO: 392936 - DNA, 743 bp, Homo sapiens
ggagaatcgcctgagcctcagaggtcaagggtgcagagagccaggattgtgtcattgcattccaacccaagtgacagagggagaccgctgactcaaagagagagagagaagaaaagccacattctttgaaaactgacttaaatcaataataaatcttaacatttaagagttgcatacgttgctcgagtctggaaaacattaacttagcaggtaattcaacacagaattttcagaccaggttcatcattatgggaaaatgtcagcacaaacagccaaataagtcttttgctggagaaaatcagcttttggattcgagttgaatgcatttataaatgtttctctactccaatgtcagagaataaatgattcataaaaatgggcatattagaaagcctgggcctaggaactaggctggatttgcttcctgacctggctctactatataaaaaacccagctgctttttcactagagatttataataataccaaacttacatgtttgctataagcattatatttgacatatttaaagcatctgggttatcttaggggtattcaatgacagccactgatattacagggacatttgagctgtaggtttttggcatgttccatgagttttatgtcatgcttaatccttttccacatttggaaaaatatcctaaagcgggtaacccggtattactcatataatcaaagtagtctgtgctaaggcaaaaatacaaacaaaacaaaattaaaat

SEQ ID NO: 392937 - DNA, 387 bp, Homo sapiens
cctttccccttaacttgggaattctgggtaagcagcaaaaccctgcctagccatccatgggtaacaagaagtcatgcttgggccagactatacagctgatgtccagtgtgtgactccctaagtaaaacaggttagatcccatccatatgagagaaacagtttttcagaatatggggaaagaaaagtaatgttattagaaaaatcaaataaggaaatcgtgggaaaatgtaaaattactgatttgtcaatcttgtcttcaaatacaagataatcttggggacaagactaaatattttactcagcatctgaacaataccaagaaaaaaaatactgccctactgaagaacaccatttatagctttaactttgtccagcacacatttcagc

SEQ ID NO: 392938 - DNA, 150 bp, Homo sapiens
tctactgggaccagtacgtaatttttactatatgttatattacctttccaaaatctaaaaatcctaaaccctgaagccatctggctccaagagtttctgataaaatatctgtaattgggagcatgaaaaagaataagattacctagggag

SEQ ID NO: 392939 - DNA, 623 bp, Homo sapiens
  misc_feature (16)..(16): n is a, c, g, or t
caacgatggtcctcangctacttgggaggctgatgtaataggatcactggagctcgggaggtcgaggctgcagtgagccgagaatgcgccactgcactgaagcccaggcaagagaatgagaccctgtctcaaaaataaaagaccaaaccaagagcatatgtttacactatcctgtagtctcttaagtgtgcaatagtattatgtctttttcttttttgagatacggtctcgctttgtcacccaggctgaagtgtagtggcgtgatctctgctcactgcgatctccacctcctggattcaagtgattctcctgcctcagcttcccaagtagctgggattacaggcgcctgccaccaggcccagctaaattttttgtcgttctcttagagatgggatttcaccatgttggccaggctggtctcaaactcctgacctcaagtgatccgcccgcctcggcctctcaaagtgctgagattactggcgtgagccactgcacctggctactctcttgatgttgccttctgtgttggggcacaactctgcacctttgtttctgggaagctccattggctagggtgagtttgttgtttttttccttcagatccaccctcctagttggttttg

SEQ ID NO: 392940 - DNA, 374 bp, Homo sapiens
aaaaaaataaataaaaatttttaaaaaataggagttgaggagcaagcgttttctagtggaaagatgaacacatcagcacatacaatgtgatgtgagatggcaggatgacatgatgtatgttacaccctcagcttgggagcaccttactgcctgggccagtctggggccagtgggctactatcagtactttccaatagaaccatgtgctatgatggggatgctctacatctgccattcagtatatcagccacattgtggcaactgggcacttgaaatatgactagtgtgaattacaagtttaatttcatttcattctggtgaatttaaatgcaaatggccctgggtgccctgtagctagcacattagacagtacg

SEQ ID NO: 392941 - DNA, 484 bp, Homo sapiens
  misc_feature (240)..(240): n is a, c, g, or t
ggggggtggatcacttaaggtcaggagttcaagaccagcctgggaaacatggcaaaatcctgtctttactaaaatacatataaaaattagctaggcgtggtggcatacgcctgtagtctggctacttgggagggtaggggttcctccatgtccttacagccctacttatattttttattaaaaaaaaaacacaactggttttttggagacagagtctcactctggtggcccagggctggnacaacaaggagcaaaactccatcttcaaagacaaagaaaaaaaaaaggtatcctaaataggggctcgggcttggggccagccacatcacttttagctaattctttccccttaagggggggtgttccatccaagctttcctatccatttaaattcatttaatgtaagccctttctggtgtcccagttaactctgggccataatggactttatatgggtctaatagggagccaaacagcagagggc

SEQ ID NO: 392942 - DNA, 406 bp, Homo sapiens
agatggttgacttggtaaacaaattagttcaaagcttaaagatgttgacatactctaagttaaagactgaatacaaagcagataggtcagagagaaaactcaatgagttaagaggcatgaaggctcacatagaagtataaatacatttgtgaatgttaaatataaatacttacaattcagtatatttaatgcctgtttttccctgttaacttatgtagacacttcaggtatttcatctttgcttgattttaagtacccactcattcatttattcattctttattcaacaaatagttcctgagtgcaaggcacttgccatgctttttaaccgtgtgagataaataatggcactagctgcagcgggcctgcaaaacacaacaggtgtccccttctcagtgaattagga

SEQ ID NO: 392943 - DNA, 318 bp, Homo sapiens
caagctcatattactccctctgactgtgcccccaaatcccatccaactttcaaggcctagccccttagggaaaccgttcccagcccctaacaatggacatcacttcttcctccatgcactcaatatgcagaagtgaaatgaaatgtttgcttttcagctcaagagaatcgtcagtggctcacgcctgtaatcccagcacttccggaggcagaggcgggaggatcacttgaggtcaagagatcaagaccaacctggccaacatggcaaaaccccgtttctacaatttttttttttttttttttttgagagagagtctcg

SEQ ID NO: 392944 - DNA, 349 bp, Homo sapiens
gggtcaggggctgctggagacatctgacgccaacttcatggccaggagccagcaggtgtaggttaagggtgtgtgtggggggatcctcacgatccttttatctccccttcccaccaggagaaatgcacatctcaggaggagtcgggaggtgctgaatcttggagccactgggtatggcagcggggcaagacattttaaggaggccaaaggcaaacatgttttaagctgcaagccttctaaagctgaatgaacaggtacttgctaagagaggcgaaggttaaacaaacgttagctgggatagacagaagctgagggtagaggccatggctttcagacagaagagcaaatg

SEQ ID NO: 392945 - DNA, 443 bp, Homo sapiens
accacagtgcagccacagctcccactgtgcagaggacacgcttcttcacctacctggcctcatgcatctttgcagcaaccctataacgtatggttgattgttctcatcacagatggtcacttgcccaagcccacttcatcagggagtgacacagctggggttcaaaccgagcccttctgccccaatcccatgctctctacacacctctgcacagcaactcccctcctgcccccgagtgctttgtctctaatcaagtgctttaaaatgaaggctgagtcaaccgttggcttgcgtaaacaccaattttccacggtgaaaaaggtttccttcagaaagatcaatttaaacaaaatactttaagagaaagaaacattctcttagccatcttgcaatatcagtgtgacccacgcctttaaccacttcctcaccatatcaggatccct

SEQ ID NO: 392946 - DNA, 495 bp, Homo sapiens
ttcccattcattgcttactagtgccaggcacagtgtcaaggtcttttcatgtgctttcccttttgatcttcagaacagcctaagatattggcattgtactttttacagatatagaaattcatacatagaaaggtgaagtactttgtccaacagacagcaagtgatagaactaggacttgacacgggtctgtctcatatgaaaatctatgctcagccaggcgcggtggttcacgccttcaatcccagcactttgggaggtcgaggtgggtggatcacctcagttcaggagttcaagaccagcctggccaacatggtgaaaccccgtctctaccaaaaatacaaaatttgccaggtgtggtggtgcacgcctgtaatcccagctacttgggaggctgaggcaggaaaatcacttgaacctgggaggcagaggtttgcagtgagccaagatcatgccactacactccagcctgggtgacagaatgaaactctcatctc

SEQ ID NO: 392947 - DNA, 135 bp, Homo sapiens
catgtctgcacacacctcacacactccctgcacatctcacagacccctacacgcacaactcctgcacgcgtgcctcacacacaccctgcatacatgcctcctgcacacacacctcacatatcgcccctgcacaca

SEQ ID NO: 392948 - DNA, 603 bp, Homo sapiens
agttagctgattttcatttctgttatgattccatagcatgaaaataagtcactttcccaatggcttaccattatagagtgctatgaactttttgtatatgactcttggtgtacgtatgtgaatttctctagagcatatacttaggaatggaattgctggctgcattagtcaggtttctctagaggaacagaactaataggatatatatatatatatatgtgtgtgtgtgtgtgtatatatatatgtgtgtgtgtgtgtatatatatgtgtgtatatatatatatgtgtatatatatatatagtcccacaataggctgtctgcatgctctattaaccatcacactggctgatatggtttggctctgtgttcccacccaaatctcatcttgaatagtaatcccataatccccatgtgtcctgggaggcatcttgtgggaggtaattgaatcatggtttccttcatgctgttcttgtgataggagtgagttctcacgagatctgatggttttataagcatctggcatttcccctgctggcactcattctctctcctgctgccctgtgaagaggtgcctttcaccatgattttaagtttcctgaggg

SEQ ID NO: 392949 - DNA, 528 bp, Homo sapiens
attttttaatgaaaacataacattaacaaaataccctgttgcaaaattttaaaaacaaaaccaaaaagcttattccatgaaggataagactacatataaccagctaagtaattccacaaagtgtaagttattgagcaattacttactattcatgacaattccagtctttatcaactatttggtttgttggtggggagggaaaggggtggggcattttctgctttttatcatgaatcattatttgggctttaaaaaatgcacaggtaaacctaatgaatcaaagttcagttttctgaaaattcccagagaaagcagtcatataattgtgtatttgtcgtttatagctctagattcttaccctacccttactcaagggtagagcaatctaacaagcctaaataattgtaatttcactttcataaatgatctcaaaatttgagctgaaatttcaagccaatttggttgaacttttccagttaaaaactaattttggtcaaaaatgatttatccaatgactcttttacaaat

SEQ ID NO: 392950 - DNA, 334 bp, Homo sapiens
atgagtagtaaggaaagctttactaaatatcttgtacacttagggaattagcaagggataggtgttgtcggggaaggaagtaatgcttaaactcaattctaaatgtccactgggggattatgaggcagctaaagaaggcagagcattcctgggagtggtaactgcctacaaagacatgagagcggagcaagagcactgtcacagcctgcagagcaggcccacatggctggcccagcctcacctgatgctgtcaggggcagggctcacagggcattcctccagcaccgtgggagggctgagcccagcatgagggccgacaccctgaacgggcact

SEQ ID NO: 392951 - DNA, 1035 bp, Homo sapiens
cggggaagacgccaagatggcgacgagtcagtatttcgacttcgcgcagggcggcggcccgcagtacagcaccctcctggaggacgggactttggtctggttattccccgctgctgtgacagcgcccatgacagcagctggtccccactggcacccaggaagtatttatccaatgactcaatgaatctgccgccggatcgcccgggactgctttcactttctgtcagtccagaagtggagaccactcccccggcccttgcatctgggcttccttgtgccctgccttggacagttggctgcagtggaagtgacgctgtgactgccctgtgcccaagcttaagaggccttgcctgcatctgctccatcttatgggaccctgcctggtgaaggacccaaggctggcctgctggaggaggagatataaggagaagagtcacagtgccccatccaacaggtagctgccctccaggggcagagaagcccagccatggtcaggagagccacccagctgaggcccacctccaccaggattgccacccagctgaaccccacctcagccgggagagccacccagctgagccccatctggccaggagagccatccagctgagccccacctctgccaggattgccacccagctgagccccgccttggccaggagagccacccagctgagccccgccttggccagaagagccacccagctgagccccgccttggccagaagagccacccagctgagcaccgccttggccagaagaggcacccagctgagccccgcctggccaggagagctgcccagctgatccccgcctgcagaatcacaagtgaaataaatgattgttgctttgagtcagaggtcagcggaccttttctgtaaaaagccacatagtaaatatctttggctttgtgagccacaccatgtctgtcacattagtgaaccctgctattgtattgcaagatgagccgtggacaatgtgtcatccagtgggcttggctgtgtgccaataaaactttatttttttggacactga

SEQ ID NO: 392952 - DNA, 877 bp, Homo sapiens
cggggaagacgccaagatggcgacgagtcagtatttcgacttcgcgcagggcggcggcccgcagtacagtccagaagtggagaccactcccccggcccttgcatctgggcttccttgtgccctgccttggacagttggctgcagtggaagtgacgctgtgactgccctgtgcccaagcttaagaggccttgcctgcatctgctccatcttatgggaccctgcctggtgaaggacccaaggctggcctgctggaggaggagatataaggagaagagtcacagtgccccatccaacaggtagctgccctccaggggcagagaagcccagccatggtcaggagagccacccagctgaggcccacctccaccaggattgccacccagctgaaccccacctcagccgggagagccacccagctgagccccatctggccaggagagccatccagctgagccccacctctgccaggattgccacccagctgagccccgccttggccaggagagccacccagctgagccccgccttggccagaagagccacccagctgagccccgccttggccagaagagccacccagctgagcaccgccttggccagaagaggcacccagctgagccccgcctggccaggagagctgcccagctgatccccgcctgcagaatcacaagtgaaataaatgattgttgctttgagtcagaggtcagcggaccttttctgtaaaaagccacatagtaaatatctttggctttgtgagccacaccatgtctgtcacattagtgaaccctgctattgtattgcaagatgagccgtggacaatgtgtcatccagtgggcttggctgtgtgccaataaaactttatttttttggacactga

SEQ ID NO: 392953 - DNA, 1283 bp, Homo sapiens
tgtcctggtgacacacaattttctgccacctccacaactgtcggctggtgttacaccctcaacaccctagcacgtttattttgtccctcggcgcctagaaatctcgctagaggggtggttctccccacatatttgtcaccccccccaccaagtgggggggtctttcctcacaaagattcctccagcatgcaagttgtttcacctaccaacaacagtgtttatatacacgccctccgtctcctgccttttaaaaataacgcctcgctattattgggccccccttgtgcacaaaaaaaggggggaccccgaaaaatgggccccccccgggagagtatttttagagcccccccccctttttttttttttttttttttttttgtttttttttttttttttttttttttttgtgttttcctttttcttcatccacccttatatccatgcccttcccaccatgtccttgctactcttccagtccagaagtggagaccactcccccggcccttgcatctgggcttccttgtgccctgccttggacagttggctgcagtggaagtgacgctgtgactgccctgtgcccaagcttaagaggccttgcctgcatctgctccatcttatgggaccctgcctggtgaaggacccaaggctggcctgctggaggaggagatataaggagaagagtcacagtgccccatccaacaggtagctgccctccaggggcagagaagcccagccatggtcaggagagccacccagctgaggcccacctccaccaggattgccacccagctgaaccccacctcagccgggagagccacccagctgagccccatctggccaggagagccatccagctgagccccacctctgccaggattgccacccagctgagccccgccttggccaggagagccacccagctgagccccgccttggccagaagagccacccagctgagccccgccttggccagaagagccacccagctgagcaccgccttggccagaagaggcacccagctgagccccgcctggccaggagagctgcccagctgatccccgcctgcagaatcacaagtgaaataaatgattgttgctttgagtcagaggtcagcggaccttttctgtaaaaagccacatagtaaatatctttggctttgtgagccacaccatgtctgtcacattagtgaaccctgctattgtattgcaagatgagccgtggacaatgtgtcatccagtgggcttggctgtgtgccaataaaactttatttttttggacactga

SEQ ID NO: 392954 - DNA, 479 bp, Homo sapiens
aaaagccagaaaactcaatagaaaaatgggccaagtcttgaatttcccataagatatccaaatgaacaagaaagatataaacatataaaacaatgttcaatcttgttagttatcagtgaaatatacatgaaaaccactaacacagccgggcactgtggaaaatcatttggtattatttactacagttgaacatacacatcccctatgggccagtgaatgcaattctggatgtataaccaggagaaatgcacctgcactcatatatttctaaataacatatataagaatgttcctagcaaaaatatgcataatatccccaaactatcaatgatgcaaatgaccatcaacatcaggagagataagtaaactgtggaatattcacacaacactaggagtgaacttataccaactgctgtacacaacaatatggatgactcataagcatgatgtttagtgaaagaagccaaacaccaaagagt

SEQ ID NO: 392955 - DNA, 1054 bp, Homo sapiens
catttttgattgtcaggtatacatacaactcacaattacacatagttgtcctctggtaactatttgaaacatactgcacttccagtcacatacacagtacttattaatatagatatgtgccaagctcttaatatggaaacagttactgggaagactccttttgatcaccctgaaaggcacatattaaaatgcaatgaaaatgtattcacatatattaaaatccccaagggtatgttaaaaaccccagccatatcttctaaatgacagtgctgctctggccatggtcttaataacaaggcagttcatggtaaactgccagcactgttcagggagtggaagaataaataaattcaagttctaagataccccaaattaaatgtgtcttaaagttcttatatctctaaatgatgagtcagccaggactctcaacgctagaccatacgattccagagtgagagctaaaaccctatctaaacctaacactttctcttgagggcccctttccgtattatcttccagcttcagagcagcagggctcctgcctcccacttctctgtgtgtgagttatgaatgtcttacccctgaggcatggaggaatggtgacttcttttcaagcagtaatgttccttgcccccggtttaaaacgcctgcatttaaaagccttagttgtttcctggcagcattactcacagtagccaaaaggcagaaacaacccaagtgtcattgatggatgatgaatgtaggtgtttcaaaacctcacttttaatgcatctcatattagtaaaagtaatttcacagcagcaaagagaacacgataaattttgcacggtgcaattggtcatcttaaaatcaagattggagattgtgggttcgggcatctgtgttcttggggttggccaattaagttacgtacttgggggaaatttttaagcaggggggcaagggaaagaaaaactcatttatattccagacagtgtattttaattaattatgttactgtacacaaaaaacttttattttcaattaaatttcttaaattttcaattgcatacta

SEQ ID NO: 392956 - DNA, 628 bp, Homo sapiens
ggaattcataatagcctgttttcttcttgcatcaagctggacactcagtggatcctttcaaatctggagacatgaccttcggttctgggaagctggaaggcacaagtgctgtttttacaagctctgaactcatcttgtttctgtccccacctgcccccccacttccagagggaccttgtgactcccaggctatgtatctggggggcctctggccttgaatggttccctcgacatgcagaatttggttgcagcttcctccactctgcctaggtgattactattaattttccagcttcgaaaattctgtaggctggatgcggtggctcgcttctgtaatcccagcactttgggaggctgaatcaggaagatcgcttgagtccaggaattcaagaccagcctgggcaacgtggcatcgataaacaggtgtttatcgatgccactgaaggacttttcccagtcttcagtggcacttcccaagatctcccttcccttgtgctctgtgctgattttaggacagctaagatgactgccatgtgctgtggcagtcctaatttgtcttgttctttcctttccatatcccagtataatctctgttaatcaacaggactaccccaagaacccatgtgct

SEQ ID NO: 392957 - DNA, 721 bp, Homo sapiens
gacttttacttagcataaagacccctttcaactcaatagtagaaaccaaccaattaaatatggataaaatatttgaacagacacttgaacaaagatatatgcatggccaaaaggagcttgaaagatgtgtaataacattagtcatcagagaaatgcaaattaaaaccacaacaagataccactgtacattactgaaaagacttacataacactttgtggggtagttagaactctcatacaatgctggtggtaatgcaaaatgtcacaactgctttggaacacaggttggcattttcttataaaattaatcatcaattgcttctccaggtatttagccatgagaaatgaaagtatatgtcctcacaaagagttgtacacaaatacttgtggctgttttatgcataatagcttaaaactggaaacaacccaaatgtccatcaaaacaaatgagtgataaactgccatgtatccctctcatgaaataatactcaacaataaaaagttatgaaacactgataaatgcaacagcatggatgaatctcagacacattattgtgagttaaagaagccaggctgtatgattccatttaatggaaattctagaacagcaaaactacattgtaatgacagaaagtagatcacagattgattacaaaatgttgcaagggaatattttaggatgatgaacaatttctataatttgatttaatagtggttatat

SEQ ID NO: 392958 - DNA, 563 bp, Homo sapiens
  misc_feature (556)..(556): n is a, c, g, or t
atattttgattgttacagttacaatatattattactgaagagaaagaggttgtgcgttatgctgaaaacaaatctgccacttgagttatattctctgtaaatctattcattttttccttgagataatcaatgcaataactacaagactaatttaatttaggtcttgttagtgtcagcagtatatggtttacttgtttgtttattttaattacatttggcttctttgcgatagaaataagctaaaagacaaaataacttgaaacactaacaaaatctgccttttgaaaggctttggatctggatctggatctggtgctggattaaaaacaacaatcacatcatgcatgatgtgattgtggactcgctggccaaatctaaatcaccctcttccggatgggcgctgtccaataggtcctcttcctccgcaagctttctgtctggccccacgctacttgtgtcctgtgcaaatggctgctccagctcggaactttcttcttttactggctcagatttacaagtttcccccaaaatgtcgagtattttctcattttctggntccaggg

SEQ ID NO: 392959 - DNA, 193 bp, Homo sapiens
tcagtgtctccccactgacttgaggataatgcccaataactgcacacaaagcccttcatgacccactctgccctccttaatagacacacagcttctgcccactgaagaaagcttataccaaattcctttggtttccagatgtagccccttctcttagggttctgcaccttataagttatatttccactgcttg

SEQ ID NO: 392960 - DNA, 246 bp, Homo sapiens
aaccacttatctgatttttattactgtagcttagttttgcctattataaaaccgtacagaaatatgtgtatgtgcacttattttaaatgttgcatacggccgggcgcggtgggcagatcacctgaggtcgggagttcgagaccagcctgaccaacatggagaaaccccgtctctactaaaaatacaaaattagccgggcgtggtcgtgcatgcctgtaatcccagctactcgggaagctgaggcag

SEQ ID NO: 392961 - DNA, 381 bp, Homo sapiens
tggagctggcacttcaaaaatagttgttctatgtatcaataccctaagtaaacagaagtatccctggtacagaaagaaccaagaagaaacaaagtagtggagatggttattggtcagtttttgaattcctgtgcactttctgtcctgggatatgcattgttttaataggctggttaatgtttctctctctctctgtctctccccctctctcacacacgtgcaggctcacatacaattaagtgttctatgaacttttggctacgctttaagtataatttcatttaaagccatgccatgttccaatttgaggccccagatttaatagaatgtgaccttgattccaagttttaagggaggaaaaatgttttacaaactatgcca

SEQ ID NO: 392962 - DNA, 471 bp, Homo sapiens
tacagcagtaatgacaaataatgagtgactgtattcaagattttaggctctaaattatctattttatataagaatttttattgttttgcctgagattatttggtccaccctgctactttggatgtactctactggggaaaatgtagagtggtgtaggaacaaacaatcaaacactagtatcttgaatgaaagttctgtgtgtagtttggacagatatacttacagaagaccagaacactggtggtatatgatatataaccaagacagtaaagaaatgcaacattgcaggagcaaagagtaagtcagacctaaagcctagttccctttaactacacaggtgtagaccttggtcaacacactatccctacctgagtttccccatataaataaatgagattgttggattaaaggatattcaaggacatatgcatcttcaaaattttaattataaaaatgaattgactccagaaa

SEQ ID NO: 392963 - DNA, 788 bp, Homo sapiens
tatgctatctcatacctgtaattccagcactttgggaagccaagggaggcagatcgcctgaagtcaggagttcaagaccaacctggctaacatggcaaaaccctgtctctactaaaaatacaaaaattagctgggcatggtagcgcacgcctgtaatcccagctccttgggaggctgaggcatgagaattgcttgaacccaggaggcagaggttgcagcaagccgagattgcaccaatgcactctcgccgagtcaacagagggagaccctgtctcaaaaaaacaaaacaaaacaaaacaaacaaacaaacaaacaaaaatgtcttacaatcttggtggtctatcaaaatagaaaagaaagaattaagaaattaagcgttttgacctcaccatggcaacaataacgagtagcaacagtccatgaaatgtttctaatgctaagaaactgcatatgttctttaatatatataacaaatctaacaattaaattcaatacacaaatgggactatgtagagtcttcatggagaacattttaaacttgaacttctaacttgaaatagtttgatctctctatctaactacactaacaggcaaagagtgaaaagataacacttgagaggaatgatcatcaacaaggggcactgcaccagcctgatcaacatggtggaaacacgtctctagtaaaaatacaaaaaattagccaggcattgtggtgcacgcctttaatctcagctactcaagaagctgaggcacaagaatcacttgaacccgggaggtggtggaggttg

SEQ ID NO: 392964 - DNA, 353 bp, Homo sapiens
caagcattgaggagctgcgggatctactgcctggaggagaggacggacaaggccagccatgaggagtgcagggagaggagcactttgggaagaccacagtgcacaggactcacacccagccttgctggagaaagcccatgccccaggcttcttccaggcagccccactgtaagacatctcattgcctcttcctgccctgggctgtctgacccactgccccttcccccaggaacacttccactgggatcatgagtcactctgaagccactctgaaatcactctgaagccaaagctgggctcagtggggaaggtcaggaatggagaaattgccttttctcgttagcctcctcttg

SEQ ID NO: 392965 - DNA, 305 bp, Homo sapiens
gggaggctgaggcagaagaatcgcttgaacccgggaggcagagttgcagtgagccaagatcgtgccactgcactccagcctgggtgacagagtgagactccgtctcaaaaaaaacataaactctccttcagcatttttctctgtcctgaaatcactatccagtgtcagtttctctcatgtgcaaatcatcatgtcaggtgttaatagttgaatcaataaagaggaagcccagttctcttgttcagagagtcaaaaaggaatagtatcataattggactcaggcagaaattggaaatttttttagt

SEQ ID NO: 392966 - DNA, 225 bp, Homo sapiens
agacaggtgtggacacaaccacagtgcagacaagggtgagtgccaggagagaggggtccagactgttgggctcttccagaaaccccagaccaggtcatagccactgaaaatggatatatttcatattcaccttttaccctccacccccaaaagggcctatgagatggccctgctcaaacatctagaaagaaagagataggatctggcctctgacggagatgagtg

SEQ ID NO: 392967 - DNA, 290 bp, Homo sapiens
aagtctaaaatcaaggtgtggtcagggccgtcctccctctgaaagctgtaggggagaacttcttagcctcttcctggtttctagtggtttactggtataggggagtaacagtaatccccataggttcttagttggaaagcacctttgttacaaaagacagattgacaagagaaaaccagacagaagtttattaacatgtgtattttgagtatacatggagacaccaagagaatgagtagttttcagaggtggctttgaatttcagcttatatagcatcttcaacaaagaa

SEQ ID NO: 392968 - DNA, 369 bp, Homo sapiens
ctccttgagccagctgaacctgcggcctgctcaccggcaccaaagccctgtaggcccaaaggcaggatccggaacgttccagggcagtccctgccataccccaaacagcccctttatgtggtgcccactgtgggtcctgggatctcccaggcttggatttaaatcctgactgtgctccttagctatgtgaccttaggccagtgactttgcctctctaggcctcagtttccccatctgttaaatgctgttaatgatcattccaacctcagcgggtggttgtgagacggtgaggtagctgccaacaatgtggtttcctgagggctcagatgagccaggcacttggtaagccctcaatacgcctgcaatccc

SEQ ID NO: 392969 - DNA, 361 bp, Homo sapiens
acaggctaggagaaacgaactttgagtagatgacctgggttctaaattctagttctgatcaggggagctaggataaggtgcatggatcccctgagcctacattttctcattttataaataaggagactaaaaccaataatgtctcaggaaacactggacaagctgtttgggctctctagccttggattcctcatttgtaagacaaagaagataatcctaccctattgcccatgttggtgtgggaatccacaaagaaggacacggcactgttccaagtcaaggttacagggagaatggaacaagtttcagtagaagaaacttcacctaacctctttaattccaacagttcttgaatttcctg

SEQ ID NO: 392970 - DNA, 532 bp, Homo sapiens
gctattgtatgactttattggcatgtaatttaattcatctaatccacatgaaaagaaggagtagagaggtgcttggaggcatgttttggttctaatgggagcactgtggtcagtatgttgcagcagggactgtttgttcccagctccacgttatactagctgtggagccttaaagttatttccatctctgagccttgcttttctcacctgtgaagtaaaaatactacttaccttggaagaacgctctgaggcttaaaatgaaatggaatgaaatataaaacctagcatagagtctggtacatgtcataggtccttagtgtcacttcccttcccagtgagtgctgtgaaattgcctgtaaactgtttaacttacttgagaaataaccctgccgacttattttaaaataataatcgctaatatgtctatggcacttaactacattccaggtgttctcctaagctcttggcatatattgatttatgtaatgctcataacaaccccttgaggtaggtaccatgattatctgtgctt

SEQ ID NO: 392971 - DNA, 914 bp, Homo sapiens
ccttattttaactctgaaagatagaggtttacagcaaccaatgcttaaccaggagaaaggcaacttaaatatggtaagagatctctgtggtgttttaacttaccctagctccaacccctccccagcacagggctaatcttgaagacagcagcccaaatttctggtgggggttcctggttagggagggagcagagaagatcttgatcccaatgaattgtgtttatcttttttgactgtctggaatttcccttgaagaactgatgaaagggaattctctttgcttcacgaatctcagaactctctcaaggcagagcagctacacagaggatgttccctgaaaactgctaaagaacaaaagaacaaggaactgctgcctgaagcaaaaataacagttgaggcaaacaactgataccctgaaagactgggaaaagtttggaagtgatatttttgggagaataagggcttcaaaaagttcccatgtgtactagagagagcagaaagcacacccagggtaggactcatgtgcagaaaaggcccaataagacaataagctttcatctctgtctggtctttgggctcagcacaagcaggaagtgaaggctaaaacagagctgtaaattgcctggctaagcttaggagtgactccacacagagccaatctgcaaagacctagaaaattctttctttttcttttttccttccttccttcctttgttttctttttcgtattcttctttattctttttgtttctttttttatttgtttctttcttcttcctttttaaaaaacaaaacaaaactttttttttagtcgcaggcatttaaggaattctatgttaggtcactggctgactactaaaataacaaaatgaagccttcagtgaatacaaagaatacagtcttcaaaaaaaaaa

SEQ ID NO: 392972 - DNA, 240 bp, Homo sapiens
gtcttcagagtctcacacacctccactcaatgactttaacatacactaatccattctgtgatggtgaatacttttatttatattaatatcctcatagactaggttagaaattcagatgcattaacacaaccctctcctgtagatcttctcttgtctagctcgagatggaatgctgtaagtgaggagccatgtgttagtttgttctcacactgctataaagatactgcctgagactgggta

SEQ ID NO: 392973 - DNA, 700 bp, Homo sapiens
cacactaacaagagcatatgttgtcattttaaatatgtatgtataataaattttatatttatagattgacttctttcctatcaaatgcaaagtatttctctgacataaatcacagttagtcttaccttacttgacataattatggttgtaattatttcaataaatattttctctttaacacatatagatacatacttgtataatgttttgagtatatattaattcatgtttacaaacaaatgccttaaaagttctgaatattatgccttgacttaaaacagattcttatgatgaattaatgggttttaactttaatttttgaaaattggtaataaatcagcatcattatggaaattcatcaaaattgctgatttagtcaggttttgaaattcattttttatattatgttgtcatctagcattggaataataaccacaagtttcattaactgagaagcagaaactagaaaatgagatgtaaaccagtgaactgtgaaaatgatgatatattcacatatactctattgaaaatgattttgcattctctgctaatgcagatgtgatatgggattgttgaggtggaattatttaaggggctgcttaagaatttaagcatatatgatattcatacattgactaaagaagattttagtgaaaattattttcttagaatcactgagcattagtacttgaatgaatta

SEQ ID NO: 392974 - DNA, 338 bp, Homo sapiens
ctttgcttctgtgattatggccacagttttgaaaataaagtcatgtggatagagttgtgatttttagggatcaggatgcctcataaaacaacaatgctgtattcttttgtagaacaagatcctgcctaggcctctttcctagtattaatctttggtcatgatgaatgtgctcccaaccatccaacctatccctttgcaaccaggcttttgtgagatcaaataatttttagagttgaaatgaagttattaccagctctaaaataaggtactacaggagggaagtaaggaccgacaagagttaaatcactttctagggttgcgcaggtaactgggaatga

SEQ ID NO: 392975 - DNA, 353 bp, Homo sapiens
tgcccagctaatttttgtatttttagtagagacagggtttcaccatgttggcaagcctggtctcaaactcctgacctcaagtgatctgcccgctgcagcctcccaaagtgctgaggcaggagaatggtgtgaacctgggaggcggagcttgcagtgagcagaaatcgcaccactgcactccagcctgggtgacagagcaagactccgtctcagaaaaaaaaaatgggtatagagggggaaaaagttatgtcaaaagacagaaaaaggccttaatcactatcacaccacttccccaactaaaaaatcttcagtacccctactattccttacttttccatatggaaagtcctctg

SEQ ID NO: 392976 - DNA, 421 bp, Homo sapiens
cacaggaacctacacttagaaaagcgctgggcttggcttaatattctactgctgctgccttgaaattctgaagaattttttaacaaggggtcctgaatattctttttgcactgggccccacagattatgtagttggtcctgattagggtgtagagcaaggtattgcagtaataaagtatttgaatcattccttcctcagaccacccccccacccaggagaaggaaaaatccattccaactgttctcactttatgcaggagcaggtgcttgtgactttaagagatgggcttgcaggggaaatggaacagctcctggaagacatggccttttgagggtgcttaggagatttgagcagcacatactaattggatacagataaaatgctcttcagattttagttttctgctctgtttgtttagtc

SEQ ID NO: 392977 - DNA, 398 bp, Homo sapiens
actgcacaggacagacagaccctgctataatctcagcgaaggagatggataagaagcaaagatacaataagtgatggtgactagatagtgctaagtgctgtgaaagaaagcaatcagggttgcatggcagaatgggacaggatgtgggctgctgttttacatcaagtggcctgagaagcctctctggggtggaggggtctgagctgagagttgaatgagggggaagaagcctatgattttggagatctgaaagaagagtggcttaggcagagggaagggcaagtgcaaaggccctggagcaggactgagccttgcatacctgagggacagaggaccacctctgtggctggagttggtgaaaggaaaggagagagctgcaggcagaagaagagtgggct

SEQ ID NO: 392978 - DNA, 576 bp, Homo sapiens
aagtgatccacagcgttaattatcagggaaatgaaaaataaaaccacaatgagatactgttacatacccaccacaatggctaaaagtataattaaaaagaccaccaccaccaaatgctggcaaggatatggaactctcatatattgttagtgaaagcattaaatgtaccactttggaaaacagtctggcagcttatcaaaaaacctaacaaacacctagcccaagagcgattccactcctacatttttagccaaaagaaatggaaacattatgtccacaaagatttgtataagaatgttcacagcagctttattcacaatagccaaaaacttgaaacagcccaggtattcatcaatatgagaaccaattgtgatgtttatagaaaactattcagcaacaaaaaaatctattagtatctgtaacatgaataaaaatgaagaataaagtaaacagattccatttatgaagtttcagaacaggcaaaacgaatctgtgatgtaaatattcagaacactggttgtcctcccttctcccccaggggaagggaaggtattaactgagcagaggcagagagct

SEQ ID NO: 392979 - DNA, 354 bp, Homo sapiens
ctactacatccattaagggaaaaacgatcttcagtgcttcacttgcccttctgcagtcccacctttacttaatattcagcctgagtatgaatctgcttcttaacagtttatgaagttagtcaagaaggcttaacatattttttattcagtattttaaattgtttttaataggaaggtagttctggcacttaaccattttgctaaaatagaagtcatgctttagatatttttcaaagaattgtcattagctaataactcttagctatagggtgggggaggaaaggagagaaaacacgatcgaacaatctcatctctgactatattccaattcttcccggagagaaaacacgatcg

SEQ ID NO: 392980 - DNA, 875 bp, Homo sapiens
tgctcagagttggatgagcttccatttttaacatgactgactttcaccagtcttcctgggggccccaaactgggtgggctcttttcctctgctccaggccttatctgtgttaggttgtatgattaggatcctaaagtcactgaacaaacagggtaggagtctccataacagaccttttgttcatatacatttcactggctttcgctggagaagtcagagaatggctatcatctccacactaataatatccttcagtaaatgataaagtcaagtccaaagtaaactgagaagctttatcagcatgtcaaagctatccccttacagctctgtacttgccaactgtgcatccttttccgagacaaagacttgatgcacattaaaaggcacttaccagagtgggtgtttgtttgccaaaggagagcaggctgccctctgattccaggcaccccggtcgtcactctcatcagaggaagggaggtatactttacagctagactccttccttgatgatctcctgaatcgagtcagggggagattcagagcttcctgccaagttattccttctctttctccttgttaatattaactgatggacttctcagagggacagtgtatttctcactgtgagtagagagaacgctgtggtcgaccagttactcttccaccctgttgtcagagaagatgcatcaaaagggatttacacacccagttaattctaacagatggcccttccccggtattctgagagaagttgaaaatcaatccacatttctctccaattccaaattaggcaaattagcacactggccttgatttttggtaagcagatttagcaaaatggacacagtgaaaaagaggaaagatgtaaaaaattt

SEQ ID NO: 392981 - DNA, 502 bp, Homo sapiens
cgtggtggcagatgcctgtaatcccagctcctcaggaggctgaggcataaggatcacttgaacccagggagcggaggttgcagtgagctgtgataacaccactgtactccagcctgggcaacagagcgagactcagtctcaaaaaaagagaaccaaaaacttattttagaacttaaaaaatacaataaccaaattaaaaagctcagttgggctgggggtggtggctcacacctgtaatcccagcactttagagaagctgaggtgggcagatcacttgagctcaggagttcaagaccagcctgggcaatatggtaaaatccccgtctctaccaaaaataccaaaaataaattcgcaagacacggtggcatgcacctgtagtcccagcttcttgggaggcggatgtgggaggattgcttgagcctaggaggcagaggttgcagtgagctgtgatcataccactacactccagcctgggcaacagaggtgagaccctgtctcaaa

SEQ ID NO: 392982 - DNA, 285 bp, Homo sapiens
taagacaggaataatccttatactataggaagaaagcaattcagatagtttgtatcagtgcagggatatcttttcatggtttcttttctctcttgtacaaattaacaaggtggttcttcttgccatcacaataaaagattgctagtacttgtgcctttgcttacttgatcctctttgactccattgccctccgttcttttttttttttttttttttttttggggggaaaggggtttggcctttacacccatgcggggggccgggggaaaaataattgctaaacca

SEQ ID NO: 392983 - DNA, 625 bp, Homo sapiens
taaatgatgacaaatcttgtcaaatgctttttctgcatcttttgagatgatatggttttttttcaatctcttcatatggtgagtttcattgatttttcttttcaaatgttgaatcaacttatgtttctagaataataagccatacttgtcatgatatcttattgttttaatatgttgttgacttggcaatattttgttacatatttttggatctgcctgagggctactgatctatagttttgttacatctttggttttgctctcaggatgatgctggcctcatagaatgagataaggtgtttcaaacttttttggaacacttcgtgtagaatcgtggttatttatttatttatttatgttgataaatgtttggtagaattcaccagtgaagctatcttgggtagagattttcttttttgtatgttagaagatttatgattacaacttcaggttctaatagagatacgtgttacctgtttctgagaagctttggtagtttatcttttaagaaatttgtccatttcatctaagttgcttaaaattgttcacagtattcccttattctttcaatgtctattgaatctatattgatgtcccctctttgttgtcattttgtgtttgtttt

SEQ ID NO: 392984 - DNA, 138 bp, Homo sapiens
ccatgcacgtccctggctgaagagctactcttggctggaggcatacctccctggtttccaagcccccgagagcttgagcttaccttgccctgaaagaaggaaaaggggatgctctttaaggtcatggtctgaagccag

SEQ ID NO: 392985 - DNA, 379 bp, Homo sapiens
ttaggacatattaaaattattcattatttatttaaagctcaaatttaggcactggatattttatctagtcatctggtttcaacaccatctgtacactgagtcattatggatttcttaaaatcccacctggaaactattttgattattaggaaaagaatatgccagccaggcgcgatggctcacacctgtaatcccagcactttgggaggcagaggtgggcagattgcctgaggtcaggagttcgagaccagcctggccaacatggtgaaaccctgcctctactaaaagcacaaaaattagctgggcatggtggtgggtgcctgtaatcccagctactcaggaggctgaagcaggagaattgcttgaacccaggaggcgg

SEQ ID NO: 392986 - DNA, 119 bp, Homo sapiens
tgcagtttgatcagcatttcctaagctgttgaacacaactctatgccgatgattttttatttgcttctcaacatttcagctactcaaccaatgtggattgaccacttgacatgagctag

SEQ ID NO: 392987 - DNA, 339 bp, Homo sapiens
aaggatagataggtgccaactgctctccagacactatcgtgattcaaacaatattaaggggtgtagtgctttccttgagtgattgaacccattactggttcctcccagtcataacaacaaatatgttacaaatgttcaactcacattacaaccttgctttccaagggaccagttgatcggttacttacaccacatagggtttaatataggagagaagaaatggaagaatgtctatgttatggctcttcacgagcttactaattcagcctatttgctacaatatctactttgttccattctgcacttaatgaatatttgctgggtgctcactctatgaaa

SEQ ID NO: 392988 - DNA, 784 bp, Homo sapiens
ggcccacagaggggtgcaggaactctcccaaggccacacagccggtgctagaacaaggacacggtggtagaactgaatgtgaacacaggtccacctgacgcaaatgcccagtccttccagcctccacagctgacctccaagtcggacagttccaagaatcatgcggaagggacccaccaagagcacatgtgagttactcagggacgggcctcacctgtcagtgagtggggtgatgaccagccgcggcgtgttgcccagatactcataggaatactggatttgggcatcgcagatgttggcaaagcagtgtcgcttctcttcgtcccagcgatgccggagctgggcctgccaggtgaaggcctgagaactctccacctgcaggatgagccggagctcttgttgccaggtggaatacaagagctagggctgcctaaggaaggccagcatgcctccaaggccggtcccctgctgcccagggaaccctccctggccctctttccccctccagcacccacatccaactgtatggccaccctcagtggaatctcgctacagaatggcacttccaatgggcgggcaccgtcatctgactgctgtgtgttgctcaccaggggtgagtccgggcaaggaggttaggaggcagctgcagccagcaacagagtcagtgccccaggaagaggaagtggcagggtctgaagtccctgaatgcactgccctgaaccgggtcccttgccttcccctggcccctgggacaggggcgctcatgccttggccacgatcattt

SEQ ID NO: 392989 - DNA, 352 bp, Homo sapiens
tgctttcctcttagaattgtgagatgggtataaaagtaaaataatttagcacagtgtcttgtacatagttaatgtgtgagacttattattaagttaaaaagcaaccacattttcacattttgcattttagaaagatattttaaacgtatttcacatttgcctgatgatacattattccttattatgtggtttctgtcactgctgttgtcattcatttgctttttaatatctgcagaatatgaaatatgtctcttttaagttcttattattagtgtgtgtgtgcacacctgtgtgtgttttttcatctgtctcagtaggagtaccgttcaatttggtttttcaaagaaagtaa

SEQ ID NO: 392990 - DNA, 184 bp, Homo sapiens
tgggcaatgtacagagaccccatgtctacaaagaaataaaagaagaaaattagccaggtgtggtggcctgtagtcctagctactcactcaggaggatgaggtaggagaattgcaagtaaatgagcaagtaaaccacagaagaatattaattttctcttttttctgctgcataacaaatgagcac

SEQ ID NO: 392991 - DNA, 750 bp, Homo sapiens
tacaaacccaagtcatttctcacacttttctctctcacatacctccttaacatcctcctattgacaccacttccaaaatctacctcaaatccattctcttctctccatcaccttattaatccaagccaccatcacctttcttgatggcaatggcctccaaatagttgtccttattgccactcttgcctcccttaaattcattttccacagagccaggctactcatattaagatgcaactctaatcctgaagctccctcacttaaacccatctgagaactgccatttctactaaggacaaaattcacatgacatacaaggccctccatgatgtggcccctgtcaatccctcactctactgctcacttttgttctctgttttccagtcacacccttaactgattatttccagcctttacacatgctgattccttcaacctagaacgcttttcccctcattctaattactactcatcctacatgtcattttctcagaaaagctctcactgagcctccatctaaattgggtttcctgccattctttctcaagttgccctgttcttttctttgatataataacctactgtccttatttatatgtttctttaacatatgcctctccaagtagatgataggttctatgaggtattaataaatttgaatttaacacgtcaaaaaactaaactcctgatctcctccccatcagaactagcccttcccacagccttttccacctcagttaatgacaactc

SEQ ID NO: 392992 - DNA, 533 bp, Homo sapiens
ctatctgctcagggacttcaattctctggagcctctagcactggaaggacattgagtaaagtctgtgggtgacttgtgggtgtctgaagtaagagtggtgtcataaactcttaaggctggatttttaaaaattttgtctatttaaaaattctttctttgtacatctttttctattttttaaaaaactaacttagtctacattgtacatattattatacatgtgtccaaacctaagagtgacccctattgtaaactacagactttgggtgatcatgatgtgccaatgcaggttcatcagttgtaccaagtgggccactctgggcagaatgttgataatgaaggaggctgtgcctgtgtggggacaggggtatgtgggaaatctttgtaacttccattcagttttgctgtgaacctaaaactactctaaaaaaataaagtcttaaaaaaaaaaagggctggccacggtggctcacgcctgtaatcccagcactttgggaggtcaaggcgggtggatcacctgaggtcaggagttc

SEQ ID NO: 392993 - DNA, 147 bp, Homo sapiens
gaatttgccctgtaagctgggggaggggtgaggaggcataaccagtgagaagggttgaatggcataaagttaatactaacattggtccagaggaacagggcagagttccctggaggaagggaacctagtcaggagatcggggcaggc

SEQ ID NO: 392994 - DNA, 564 bp, Homo sapiens
tattcccaaggctattgatttatagactggaatgggagaaaggacagcacccagggttttgggtctcccgctggactcctgcttgagggggtggtcttatacagagcacatagggcccccatttaaccccagccagaggaggggctgccttgagaccaagcattcattacccctgtccagggaagtataatgaacagtagaggtcatggaacattctcatgttttattcaactttgtggatcacttcacgtatttcaccacatagacagcattcccttgtgccatatttctgattactttgtgcccagtgaggatccttcattcatttattgcttctttccttcccagttacttgtgtttcttttgtctggacagaagaaagcggtaatgtctgccagtctgaggacagagcgtgtgtgatggtgccctgtaagactctattgaattgagatactgtctgcaggaaggccatttagtctaaaaccagttatcacttctcctgagctaaaaagcattcagttctatcttctggtcactccagaagagattccatagtacaagcca

SEQ ID NO: 392995 - DNA, 357 bp, Homo sapiens
gggtttgcggagctatcaggggtgcctgtcgcatagcctggaaatgtgcttacactatcttctttgcccagtgagcgaagggaaacagaggacacgaggcagatatcatgtgacttaagaacgcgtggaagaataggaaacgtcttctcaaacgtgggcattctcagaccacagaggcttcgggaatggctcttgaagctgttggaaatttagcagtggggaattctaggcttttaccaaacagtcttttctttttttggtggtaaaatagacatggcataatatttgccactttaaccatttgtaagtataagttcagtagtattaagtccgttgatgttgttctgcaaccaccac

SEQ ID NO: 392996 - DNA, 373 bp, Homo sapiens
tttcccttctctctctgcaaaaaggggaaattggcaagtatcacgaggtggcgatgtaagttgtaataaggtgcgaccttctcccttcaatcagcacaggccctggaggggcctgggcagggagggcagcaggacagaagttgcataaagaatttctcagccgggcgcggtggctcacgcctgtaaccccagcactttgggaggccgaggcgggcggatcacctgaggtcgcggagtttgagaccagcctggtcaacacagtgaaaccccatctctactaaaaatacaaaaacttagctgggcatggtggtgggcacctgtaatcccagatacttgggaggctgaggcaggagaattgcttgaacccgggagg

SEQ ID NO: 392997 - DNA, 893 bp, Homo sapiens
acacttaaaaaaataaaataggcctttcaaagggcttgaatttaatgttacttctgaaatgaaatgatatatgttttataagttacatgtttcacaatttcatttgatcttcccaccctcatttttgctacagagccaggggtaaaatcaggtccagggtttctttccttctcacaagaatcttctcatgaactcaagggagaatcatgaaatcttagaaacaatctttttgggaagacaaaacagactcactttcctttgtcatttcaaatagactgtcctgaaatatcctaaaatcacatcaaaactagtaaaaatgagtgtaatcattttcaaagttctgccataatataaacatgtttgagtgaaggccttagctttgcttgtatctccacttgtacacctccagcaatgtaaaacttagtagcaaaggctgcctattctattttgagaccgctggtatttctggcaagttctaaatcagctgctttatatttctcacccttccttagacctatattccctttttctggacccacacgaactaatacctcttctgaaatttatctgacatttgactgaggtaaaagtatgcttgggttacccaggcatggtggtgtgtaccaccagcctggccaacacggcgaaaccctgtctctactaaaaatacaaaaattagctgggtgtggtggcatgtgcctgtagtccagctactggggaggctgagctgggacaatcacctgagcccagggagttcaaggctgcagtgagtcatgatcatgccgctgtactccagcagcctggtgacagaccctgtctcaacaaaacaaaaacaaaaaacataaaaagtatgcttgggctgcgcgtggtggctcaagtctgtaatcccagca

SEQ ID NO: 392998 - DNA, 651 bp, Homo sapiens
atgcaaataaaatcaagtcatagttaaacttgcttatgtcaacgattctgttcttgcaagacctacctggcctcaagagaaattattttccagggcccaacacattggtgttttatcagcacctaattgacctggggaaagcagaatgcctaactccagcctgtggtattttgttatggcaggctgagcagactaatacagactttaatatacagactaaaagtaaagggatggagaaagatacccctagtcaaaataaagaaagtagttatgttaatctaagacagagctgacttcaaagcaaggaaacttattagggataaagagggtcagttcttcaagaagacataataattatttatgtttacatgcctaaaaatagagtgtcaaaatatctgagacaaaaacgtggaactgaaatgagaaatagatggatccactatatagttggagacttcaatactcctctatcataaatgaacagactcagtgacagataatcaggacatacttgcactcaacaccaccactagtcaactggatatgttataaatgacatctatagaatactttatctaacaactgcagaatacacattattctgaagctcacatggaacattcaaaagatataacacagtttgagccataa

SEQ ID NO: 392999 - DNA, 274 bp, Homo sapiens
attgctggaggggcagaagcaatactcattcacagcaatgtatcccattaggaaagctgtaaataaatcctaaagtctaatcatttgattaaagtaattaagatggcatcttgactcttttgaggggtaaatagagccaagatttttttaaagattttatatatatatgcactaatatgtagtacatacatctaagtatatacacacacgcacaggtagagatgaaattttttttaaaaccttagaaacatgcatgtttagctatttctttaga

SEQ ID NO: 393000 - DNA, 385 bp, Homo sapiens
taaacacctcctccacattttcacttgtttctgcctggttcccaggtgagggttgcttgggaggtgctgttcagttccaagatgctaaattaaaagatggagacgagtcactcaacctggggaatgtagaaaagtcaggagaagaaaagctagaagtcctcccttgcatccccccacctattcatgtaagagaggttcctctgtgcctcctctttttcctggggttatccacgacaatgaaaaatccactgggaaaaggcataagaagcctgagaagatcaactgatttatccatgagtagagcattgcaaactgtaatcagctattaaatccattgacaaataaaatattaattgaatgccaacatgtgcaaagcaatctggag

SEQ ID NO: 393001 - DNA, 245 bp, Homo sapiens
aattgggatgcattactggcttgaggtacaatcagaaccttcatctttctggtgtgtggaagagaggctggggactgggaagagctcaggctaagaaggacttgggttgggatttaggggtgagtctcatcagactgagcacttggagagaagtttggtagtttgaatttggagctaagaatctagcttgggcagggtgtggtcgcttgcacctgtaatcccagctaattgggaggctgacgtgg

SEQ ID NO: 393002 - DNA, 569 bp, Homo sapiens
ctgggcatggtggtgtgtgcctgtaatcccagctactcgggaggctgaggtgggaggattgcttgaacctggaagacagaggttgcagtaagccgagactgtgtcactgcacactccagcctgggtgacagggagagactacatctcaaaaaacaaaaacaaaaaaaaaaaagagagagagaaggctgacctgggtggaggccacctagacctggggacacatctgtttgtgttccgtgtccaggcaggtgtgccatgaatgtgtcctgaatggaattaaatgtaatcgaatgggccagttatacatgcttgcggggaagtaggatggcaacacattctccttaaacgtggtcatttgatctgggtgtagattgcagaaggtctgacctcagcttaatgtgaatgatttgcaccccaggagagcagggggtaaccctcatttgcttattttctcatcccacattatcctcagtgcacaacacgaacacgctgcccgcccccactcccagttggcagctggggacacactcgtcagttgaagccatttgccagtatagacccagcaaaac

SEQ ID NO: 393003 - DNA, 569 bp, Homo sapiens
ggtagctgctctactacaggctgaaggacagggcctgaagccttttggactgtagaactgtaaaggtcccataaagactcagtataaatggcctgatatgtgagatgttaccagctagagttcagtggcataacctgttttagaaaacataagctaaaaccgaaatgaagaggcttgtcacaagtaattaggttttcatgttagtctttgtaaccacatctgcacactattagttgcccctgtccgtactttttaataaaggtaaacactgttaaaaaaaaaaaaaaaaaaaaaaaaaaaaaaaaaaaaaaaaaaaaaaaaaaaaaaaaaaaaaaaaaaaaaaaaaaacaaaaagaaaaaaaaaaaaaaacaacaaagaaaaaaaccagagaacagcccacaaaagagagacaaacaaaaaaccagaaaagagagaaaaagaagagaagaaaaaagagaaaacacacaccagagcagaaaaagcgacgaaacacgaaacacaggaatgaaaaaaacgaagagacgcaacaaagcggagcagaaagagggcaacaagacccaagcacaac

SEQ ID NO: 393004 - DNA, 293 bp, Homo sapiens
cctgcctgagcctcccgagtagctgggattacaggtgcatgaaaccacgcccggctaatttttgtattttgagtagagttggggtttcaccatgttagccaggctggtctcgaactcctgacctcgtgatccacccgccttggcctcccaaagtgctgggagccaggcatgagccaccgtgcctggccccttcttctactctttttcccagcttctcactactacacttaactagtcttaaaaaaaaaaaagaactatactcatagtacttggggagacctgagccagccagg

SEQ ID NO: 393005 - DNA, 282 bp, Homo sapiens
atgtaggtaaatctatatagcaaaacgatgatgacgtttcatggtggctaaaatatatatggaatttaaaaacacaagagtatagtggcaaataagttgagtaaggggtacagtatggaaggaaatgaataggattaaagtgtcttaggtttcttgcactgtctgcaaaaacaaaacaattaaattaacaaattatcaatctaatctaatttacttaatttattaacagtttgattaaattaggtcaagggtgcatgctgtgatctctaggacatgaggtct

SEQ ID NO: 393006 - DNA, 338 bp, Homo sapiens
acctgcctcctgataactaatgtgtctaatgccaccagagcgtctcccaggcccaggggctttcctgtttatggaagagcttattctgagagctgtagaagcctattggattccctgtcacgcacgagaacaatccatgcatgacataattctaacctgcccgctgcctcaccccacttttgggagcagatggaattgcatcagaagaatgagacacttcgagccctgaggtttcttcccccctgcaactctctggacctttgaagaaattaagatccagattttaagagtggctctcaggggtgtttgtggtagtgtccatggtgactaatttctca

SEQ ID NO: 393007 - DNA, 593 bp, Homo sapiens
ggttaaacatgctaagccctccattggtgagaaccgattcttatgaatcggccccgccccacaaacggcggggggcggtgaacgcagaagccacttgctctggaagccggagggcggagccggctcacagccgagagagaaagccgcagttgagcaccgccgggggattttcctccgccgtcttctcttcccccgcgcactcctcatgtcccgtagctcccagctccgcagctgttcgagactccgcactggatccgccgggtgtcggattcagcaacagtgattggtgcggaggatccgagggagacgggccgacacagggtctaccttgacatggctcgacccctctacagaagcagaggggcgctcgaagagtcgccagggaaaatggagccttaaggtttagtttgggtagtgaggaaagaggaaagagctgtcggaggctgtttcatttttcccgctttgcgacaaggtctagagagagttacaattttatttgaaacagtaaatagacacattaatgtgacctgatagcgtgcaccatcagtatatgataaaattaggagaaattaggaagtttagcaaaacgtgtg

SEQ ID NO: 393008 - DNA, 277 bp, Homo sapiens
ataataagtggttattaaggagaataaagggacctggaagacagaatttaacttgtaaatgattctctttggaatctgaatgatcctgagagtcaggaattatcttgtaagaaagtccaatgttccccatctcccctgttccctgtgaagggtaaataagcatctgtaccccattaagttgttgggtaatcacactgctatgaaccctcaccctctgcacattaaataaattttgtatgcctttttcttctattaatctgccttttgtcaggtcatt

SEQ ID NO: 393009 - DNA, 263 bp, Homo sapiens
gtttagctcggtaccctatttttttgcatacaaaaagtgtatatataatatgtatagtttaatgaataatgaaaacaaatcaaatgcttgtgcactaaccccctgggttgagaaatagggtattactggtaagtttgaaccctctatcttttttctattatattttctcctcctcccatagaaatgactacttctttgaattttgtcattctttttcttttcttcatagattggccagatattgttggatctctaaacagtat

SEQ ID NO: 393010 - DNA, 410 bp, Homo sapiens
gaggaaaactctccctactgtatcctatgagggctattaaccctaaaaagacactcaaatgtatggcaacatgtgtgtgtgtgtgtgtgtgtgtgtgtgtagaatctcttttctggtacgtattttccacattcctgttaggtttactttaggcattttgatagtcactgggatttctctccaccctcctcccatggactttttaaattggctattagcatatagaaatgcctgtttaaaaatatgaatcttatatgcagcctcttttatcaaattttttattcattctaatgctttctcattttatttttttttttacatttcttaggaatataatctatttgctgcaaatgacagttctcctttttatcccttgcatattgtgatttttcaggggaatacatgtgagg

SEQ ID NO: 393011 - DNA, 356 bp, Homo sapiens
tttgttttctcatgcagtgtttaagccttctcagatattcttaaatgtctcagggatactcatgagttgactttctcgagagttataagccccgctgggtggatattatatttgattttctggagccttgttgcccgttaacataacattcagttcttgaatgattaatctgtcgtttcccaaatacatacccgctgtattttaagcaaacagttgcgtgctgtaagcctgaagtgggtgtaacttctgcagtcaaccttgaggagggcttctcccagcccttggtgcacgtcaatcattcatgggaggtggaacagtagtgattttcagccatgtttctagcactgtttttaagc

SEQ ID NO: 393012 - DNA, 558 bp, Homo sapiens
tgagcctcagtgtttctcatctgcaaggtgagatagtaactctaacctctccaggtggttgagaacataaaacaaaatgaactctgcctataaagtcccttactaatggctggcatataacaggagtgcaatgagaagtagtccttattatctccccctctatactcgcccatacagcagagagctgggcaataggaccagcttgttcctgagtgcagaaataaccacagtggggtgttcatgcccaggttatgtatgggcttggtcatcttcatgaaaagatgtgtgcacagtaaagagagaacacatcactggggccaggaaggaacagtggtagaaggaaccccaagcttccccaaaactgcaaattccctgcctccaacctggggcacctctggcagccagccacgttggcagcctcgtactttctcttgggctcttcctgttggcatagcccaccctgttttacaaagctccagtggttttttttttttttttttttcaagggctccagctgttagataaattttcagggatattccgggggaggtacaaacc

SEQ ID NO: 393013 - DNA, 160 bp, Homo sapiens
tactaatgatgagagtgatgagtgtctcccgtggccgtgtcctctctgaatctctgagcattttatctttcatctctgtgggagttgcggcttagtaataataattagagtaccctgagcatcggtgctttgtagaacacagcattaagccctgtttctg

SEQ ID NO: 393014 - DNA, 413 bp, Homo sapiens
gacctagaactccccctctctcacgttggttctggtcacaaatgcagtctcaaaacctcttcagagtcatcttatggaaaactcaattcgctgaggaatccaaactaagcaagagacccaccattataaataagctgccttagtcctgaaggctttttaaatgtaatttctttctacagggcactttaaacatatctgatagatgccaatgagaaacactaatctagtcatctaagaactgtgtaaacagagagagtactactttatatacctgagataaagtaaaattaccagatttaagaacatttaccatgtgacaaggactcaatttttaaaaggtcctactgtaagatcaaacaactatgccataataatggaacatcaaaacactcctcatcgtgagagaggaacac

SEQ ID NO: 393015 - DNA, 500 bp, Homo sapiens
tattgtatttgcctactgctaccttaaaagctaacttcaaacttaagtcttaaaatatttcacagctttgaaattttaagtgacttacagccgaaggaggaaaaaagggttatctatcgtggaaggtatgtaggaaccactttatagatcgctaaagataatttagtccgatttaatctattacacttatcaggaaactagcacctctgcatccttctggggaacctaaaatgcttatatccagggcctggcactagtgatgtgaacctggattcagttctttttggagcgcttccatgttatatgttctgaccgtcatagtactgtctcccagtttgactgcttttgcttctgttgttttactccagacaaggaattcacagtagatggttctgagggatggttctatgagaattatttattaattgatctaataagtatgtattgagcactcctaccaaccaggcctggctctgagtgctagggatgtggtggggcac

SEQ ID NO: 393016 - DNA, 280 bp, Homo sapiens
atcacatagtaattataggcttagctatcacagtaaacaatttacatcttgttattcaaatatcttagaaaccagtcacatttttagctaaggaactatcactgagagtatcaaatctgtaatgtatacatatctttttgaattttaatatggataatttgactttaacttatactcacaatcatcactataaacattcatccatgcattgaacaattactcaaaacactgtcttttggaataaaaaacagacacagtctctgtcctcacagataatcaa

SEQ ID NO: 393017 - DNA, 315 bp, Homo sapiens
tgtctcaaaaataataataaatgttagcatctcactcagttctgtgtgatccagctcctgccaacccatctgatgagctcctggttcactctccttgcttcctgctttcacctcctgtggcccctgtcccgttcttcccatgtgccaagctcattccagcccccagacctgtccgctacttttctcctccagatcttaggttaggtaacactccagccccctctgagatcacctacacaccttctgttcacttctgtcatcctattgctaaattactttgtctcaaggttcgtaatctctgtgagggagtcctct

SEQ ID NO: 393018 - DNA, 427 bp, Homo sapiens
agtgagctgagatcatgcctctgcactccagcctggtgacagagtgagactctgtcttaaaaagaacgaataaaaagtccagttaaatgtgccttccctttgagtttccagagctttccacattctagtgaaacctaggagacctgagttaccacagtcaagtggtgaactaagtgtgtcctgatcagaacaaaatactgttcctcggtatctttccctttcttttttatttaccattgacagctggctacagagatcatataatctccagaaagaatgctggtatagcttctgtgaggacaggaggctcctgacgatcataaagtctttttcatggagtcaccattgaccctttggaagtgttcagtgccacttctttctcatatcaacgtaaaactctgcaaagtcatctccttctcatctgtta

SEQ ID NO: 393019 - DNA, 439 bp, Homo sapiens
atctcacagaagtaaattctattcataaaactacaaaatctctactctgcaaagggcactgaatagtaaattattttgttagacagtcacagattgaaagatacacacccatgtcaagattataatttaaactagtaggcagaaaaacagatccttctggttctcattctctttgaaagttctggggcaaattctccagattgtatctctcattcaaatacatgttccttgggtaaatttagataagactgaattcaaaagaaacaggcacctgctaaaaccctatcttccttaaggggtcagtcatgaactgagatctataatggttattgttgcttttattgctgtatgtttgcagaaccttttgcaattataaccagtagttattcaggtccttaaattctctgcagtttatgctgataaagggatctcattaagg

SEQ ID NO: 393020 - DNA, 296 bp, Homo sapiens
aattgttgggcaggttggggagggctagtcacggaacaaaactgtaagctggaccggttgtgagtgggggaggcgatagaaggattatagggtgggagagtggaagctgaggaagaactgggacctcgcttggcctggtgaggagcagtgtggggaggaggggagaggtcggatgagttcacagaaaaagaagatttaaaggactcagagcttggggtggagactgaaggaacagacaggagagaaagaagaaagatctggaatgagtcacattgggagcagagactagggaggaa

SEQ ID NO: 393021 - DNA, 360 bp, Homo sapiens
gtttcaccatgttggccaagctggtctccaactcctggcctcaagtgatctacccgcctcggcctcccaaagtgctgggattacagacgtgagccaccatgcccagcctccattctattctattcactgacctcctctcttggtccagtgctgggaaatgtcacctttcaggactttcacagagatgctagaaatctctgtcccttccctactcacagcccttccctggttccccactgcccttggtgaaaaagacaaaatcctcactgtagcccacaagggcttatgcatttggcctctgtccatctctcagcccttccctgctccctctctacccattgctctctgcaccgcagccaa

SEQ ID NO: 393022 - DNA, 427 bp, Homo sapiens
gcccctcctccctgtctttgtgtcctcttgtctgcttctaagggcaccaggtgctgacccccggcaggccctgatcccatatgtgaatcatgcactgatgacagctgctaccaccctgcttcagaaaagctcctctgtgaggccccgggtgcaggatgctgagtagcgcggggaacagcactgctggggaggaacgaaaattgcgaggtccctgagcgggggacctggcagaggccaaacgtcagaggtcgggggctgcagtaagggcctttgaagttagatttcatcaccatgtgcgggggggaggcactgggcatttcagcaagggagaggggccactggctggagaagggactatgggagagatggggcagggagcccggcgtggatggccgccgtctagacgggcatggggtctgtgggcgtg

SEQ ID NO: 393023 - DNA, 757 bp, Homo sapiens
tcatctcaattcttagaccttttatacctgtttttctcctttacttattccgtttagtttttcaattcatacaaaaccgtatccaggtcatcaccaataattctaaatgacgaatgtttcttctaacaaccgcacaatatcaccccttaccacaagacctcccttcagcttaatctctcccactctaggttcccacgccgccccgaatcccgctcgaagcagccctgagaaacatcgcccattctctctctccacaccgccccccaaaaattttcgctgccccaacacttcgacactattttgttttatttttcttattaatataagaaggcaggaatgtcaggcctctgagcccaagctaagccatcgcatcccctgtgacctgcacgcatatataagcccagatggcctgaagtaactgaagaatcacaaaagaagtgaatatgccctgccccaccttaactgatgacattccaccacaaaagaagtgtaaatggctggttcttgccttaagtgatgacattaccttgtgaaagtccttttcctggctcatcctggctcaaaaagcacccccactgagcaccttgccgcccccactcctgcccgccagagaacaaaccccctttgactgtaattttcctttacctacccaaatcctataaaacggccccacccccatctccctgcactgactctcttttcggactcagcccgcctgcacccaggtgaaataaacagctttattgctcacacaaag

SEQ ID NO: 393024 - DNA, 251 bp, Homo sapiens
ccacacacagtaggttctttaaatgtttctcagtttcattctacttcaagtcaagtaatcctggtagcattcatgactgtggaagacaaaataacccagttcctgtatccaagaagcagattctaattgaccagctgacacgttccagtatggagagcatctgacatagaatgaaaatgagcaatggcatagcactttacaagccataatcatgacctggtttgattcgcacaaggtgttaagaatcacat

SEQ ID NO: 393025 - DNA, 228 bp, Homo sapiens
tgaggcgggaggattgcttgagcccagaagcttgaggctacattgagccataatcgtaccactgcactccatcccgggaaacagggcaagaccttgtctctaaaaaaaaatgcttcttgcttgatgacttgtgatatatgaaaaggaagaaagaaaagaaaagctttgccctgtgtgcctggcccgaagtaagtgctccataaattggccgtggtgtagctgtggatt

SEQ ID NO: 393026 - DNA, 207 bp, Homo sapiens
ctcccaaagtgctgggattatagggatgagtcatgaccccggctgtgaatgtgcatttttaataaatatcccaggtgattctaatgcaggtgctctgtgggccacccttttgaaagttatgggaagaaattacctggaatgttttgctgggatgacttccttctccagctgcgtgatacagatgcccctgcttacgctcagctgcag

SEQ ID NO: 393027 - DNA, 560 bp, Homo sapiens
aacgaggaaacagttatactgagcgtcgtattacacatcaggatccgagcctataaaccgtgggcagttcagataactcctcccctgtgctatttggctttttagggagtagcatcatattgaggtcagaggggactatttagtgcagaaatcccgtctggatgaaaaaccaactaggagcacaagatgagtgagtccggggtgttctctcaaattcacctggagatggtattggactgtgagtcagcagcatggtgctgccatgaagaaaagacagctagaaaggaaagcgcaagtcggggtggagccaccaatccgcttgagctaactgcacactggcagaggccttttctgggctgttcaatgtgggggaagatagataactgtgcaccagctttaagcattgtccttgttctatggagcttatagtctatgctaattaagtagaaataagaattaaggactgggtgcggaggctcatgcttgtaatcctagcactttggaaagctgacgtgcgtagattgcttgagcttaggagttggagaccagcctaggaaacc

SEQ ID NO: 393028 - DNA, 234 bp, Homo sapiens
tgctaggattacagatgtgagacaccgtgcccagcctcatatattttttgatgaaagtctgctgaggatgaattctgtccacttttattatctgaaaacatctttattttgcctcattttaaatagtatttagattgggtgtagacttctatattgccaattagtttcttttagcactgtaaatacagatgtccagtattttcagattcagttatttcagctgaaaagctagct

SEQ ID NO: 393029 - DNA, 519 bp, Homo sapiens
tgttctagaggatccctctaaacgtatcagaacccgttctgcttgaccttgtctgagttgggtgtatgtctaaagcaatcacaggagacccagtcctgcagtttaatggcacagagtgaccagcgattgtccctgctgctccccagcaaggctttctcacaaggcctgtttctctccccagtgtgtggttgtgagctcattccccaccctgcaggcccccccaactccagtggggaaggccatagtccctccatggggctcccctcacaggaggttgtgcctgaggattcctaaaaaaatgctctctgtggttacatggtggaatttttccgtctctctcatctgcctcaagtaacctgaatgattgtgttttgacaagggtgaaggttcgtctggagctaggtcccagttcagggttcactcatatccacagcagatgctctctgaggttccatcccaccctgagccttgtactagtgttacacgtggtctgaggttggaaaaataactatttttgga

SEQ ID NO: 393030 - DNA, 275 bp, Homo sapiens
aaaaatgtaaagtgagaaatgcccattaaaataatgtataacataaccacatttatttaagaatgtactcgaatatcaaatgacaaattccaacagtgtaaaaactgtgattccttttgcaccaacctcatactagccaggcatctttctactgaaactggctggagaccatgtctcagtggtggagccggtataggaggcttcacatttcttcccctaggacacgctgtcattgtttaggtttcttgttttgttttttcctgaaacagggtctc

SEQ ID NO: 393031 - DNA, 105 bp, Homo sapiens
actatttgagagcttactatctaggcattgtgatatatactaggggtatacagccaagagcaaaacacagtatctgccttctaggaacatgtagttacagagctg

SEQ ID NO: 393032 - DNA, 291 bp, Homo sapiens
aaacattaactattgttattatcaccattttccaaaagtgtgcaaaggggtgtatggttagtccctgtctagctactaagtggaggaattgggttttctgactccagagcaaaccgtttttctccactccgtactgcctgccgatggctgctttggagtttgtctggctctgggttgtgccttgaacgcacaacttacctaatagagcctggggctcttttctccattaaagacaagctcactgtgagctgggcaccatgtgttgccagagcctcatgctatatgtcaggc

SEQ ID NO: 393033 - DNA, 360 bp, Homo sapiens
  misc_feature (15)..(15): n is a, c, g, or t
  misc_feature (32)..(32): n is a, c, g, or t
ggggaaagcaacccncacaccctttactcctngagatggaaagagtgaacattaatgggaattgcaaagagagaaggaaactgaaaacgagttaggttgatagactaaaatatgagaagtttataaaatcatgaatggattagacaagaggaacatggatttactatttaaattctggattatagccctttaaaaatccctgaagagggcaacatggcaaggctctgtctctacaaaaaattttaaaagttaaccaggcatggtgttggacatgtgttatcccacttacttgggaggctgaggcaggaggattgcttgaacctgggaggtcgaggctgcagtgagtcgtgtttgcaccac

SEQ ID NO: 393034 - DNA, 1715 bp, Homo sapiens
gaatgcattttgatgaagttgtgacttcatagcaacctgaaagacaaaaaagcagttaccagctaagaggggtgaaagagctttccaggccaaggacggggttagtgtaaagtcttagtagatggagacaagggatgctggaggaactagaaggctgggggagtgctgggcagagacgatggctggaggggccagcagacacagtgtctcacaagccttttaggccttatgaaggattttggtcattagtctcttaggagcaattggtagccctcatatggttttaagaggaggggatagacattcaataagtaatttttagaagaataaatgagtctgttaatcacttatctcccaaatcacttatcaaattaagtagttagtcacttatcaagagcttgaatgtacgggacacagcaaaggatgttttggtagaaaaaagggatgggaaaaatccggaaggtgaggtgctgtcttagagttgaggcccagacactgtgtcacagtggggtccctgggccctgcgggaagatctgagtactgcgcacctggcatgggtgtgtggttcaagacagatatgctgaggaagaaaggggaggatattccagtgtctttaacatcaaagacgctttgcttacttcatgacttgagatcagggttaaccattcttgaatatgttgcaggtggaaaaagaggaaaacctagtgattatttgaggcctttactgagccagtcacatctcctaaaccagttagaggagttcattatctgacatggtaaaatgcagatgtccaaactgaaatgcaattcaacccttataaagacattttctgatcctgacatttactgaccctgactttctatgtctgtaaattgggaataatgatacctatctcactgggttaaatgagaacatgtacatactgtgctcagcatagtgtctgggatctgtggcagcagctattttcatggcaattattctgtatgtatgacataactttaaaacttctctagggaccaacaaggcaatgcaatcaaacaccagcacagccaataaggggcaatacggagtggtggggactgtggcaaactggagaatccttacctgtccaaagagggcaacagctcctctttagtttcagctattagctactgagcaagaactcaaaacaagtgctttctgacttttccagaaatgctggaaatcctaatgcataattttgttatccaattcaaataaaaaactgcaaacaataacaaccaccagaattagcaacactatggaacacaaaaaacaggttctggagcaaagctaggctgaaagcagctaaaacaaagttttacaaagaccaagctgttctgggaagtcagatctgcctcacagaaaagactctaaaagcatgtgaaaggtcataataaaatcaggtgcaggccaagcgcagtggctcatgcctgtaatcccagcactttgggaggccgaggcgggcagattacccgaggttgggagttcgagaccagcctaaacaacatggagaaaccctgtctctagtgaaaatacaaaattagctgggcacggtggcacatgcctataatctcagctactcaggaggctgaggcaggagaatcggttgaacccaggaggcagaggttgtggtgagccgagatcgtaccattgcactccagcctgggcaacaagagcaaaactccgtctcaca

SEQ ID NO: 393035 - DNA, 198 bp, Homo sapiens
ttgattcaaggccttcttcttttttcccaacaatttttcatagttgttgaacaacagactctaattctcaaatgtaaggttgataactgatgattagctaatgttctcaacaaagggataaaattcaagctgagttttcagccaggcaggtggctcacacctgtaatctcagcactttgggaggctgaggtgggcgga

SEQ ID NO: 393036 - DNA, 844 bp, Homo sapiens
tgcgccggctcttcgcgggcaccgagaacctgccggtggccgccttccgcgcctcgtgggggggtcggggccacggacggtccccggcgccgcaattgacgccagaggtgaggcatcaagaataaagattctggagcaaaactcagaattacctcaacgtgtatgcggctggaatggcctgcgcaccttgtgcatcgccaagagagttctgagtaaagaagagtatgcctgctggttgcaaagccacctagaagccgaatcctccctggaaaacagcgaggagctcctcttcctagtctgccgattcgcctggagaccaagctgtcacttgttaggtgccactgggattgaagaccgcctgcaggacggagtccctgaaactatttctaaattgctgtcaagcgggcctgcagatttgggtactcactggtgacaaacaagaaacagctgtcaacattgcatatgcctgcaaactgctggaccacgacgaggaggtcatcaccctgaatgccagcctcccaggaggcgtgtgcagccctgctagaccagtgcctatgctacgtgcagtccagaggcctccagagagcccctgagaagaccaagggcaaagtgagcatgaggttctcctctctctgacctaccctccacgtccactgcctctggccgcagacccagactcgtgatcgatgggagaagcctggcctacgctctcgaagaaaaacctgggaggacaatttcctcttccttgccaagcagggccgatccgtccttctgctgtcggaccaaagctctgagaagagcatgggggtgaaagctggtgcgaacaaagaccaggcctgaaccc

SEQ ID NO: 393037 - DNA, 691 bp, Homo sapiens
atccatactggagagaagccttatgaatgtagagaatgtgagaaagctttctgctgtagctcacaccttactccacatcaaagaattcacactatggagaaacaatatgaatgcaacaaatgtctgaaagtctttagtagcctctcatttcttgttcagcatcagagtattcatactgaagaaaaaccctttgaatgtcagaaatgcaggaaatccttcaaccagcttgaatcactgaatatgcatttgagaaatcacattagattgaaatgtgatttctatctaatgaatgccatatatgtgggaaagcctttagtcataggtcatccctgcttcaacatcacagaattcatactggagagaaaccttacgaatgtattaaatgtgggaagaccttcagctgtagttcaaaccttaccgtacatcagagaattcatactggagaaaagccatataaatgtagtgagtgtgggaaagcttttagcaaaggctcaaatcttactgcccatcaaagagtacataatggagagaaacccaatagtgtggtaagtgtggaaaagcctttagactatatgaatcactatacatgtgagaaatcttacagaagagaatgtatatgaagcagtgtttatcatggtaaagttcattcatagatcctcatttaacatcagaaaaaattatactggggaaa

SEQ ID NO: 393038 - DNA, 249 bp, Homo sapiens
gctcttctgaatttttctactgctttctgaaagcagcctagccacaatttctctgtcatgaatttctttaatcacaacaaatttctactacttgaattatccattaagagtattatatatcacaacccccatcttgtaaccagtgaacttaatacatgtcttcagtgtaaatttatcacattttttttgcaattatgtatttgtttctatcatactttaaatgaaaaactttatgaagtcaggcacaat

SEQ ID NO: 393039 - DNA, 1353 bp, Homo sapiens
ctctgcctggttcggcccgcctgcctccactcctgcctccaccatgtccattaggggacccagaagtcctacaaggtgtccacctctggcccccgggccttcagcagccactcctacacaagtgggcccggtgcccacatcagctcctcaagcttctcccaagtgggcagcagctgctttcggggtggcctgggcggcggctgtggtggggccagcggcatgggaggcatcaccgcggtcacagtcaaccagagcctgctgagcccccttgtcctggaggtggaccccgacatccaggctgtgtgcacccaggagaaggagcagatcaagaccctcaacaacaagtttgcctccttcatagacaaggtacggttcctggagcagcagaacaagatgctggagaccaagtggagcctcctgcagcagcagaagacggccgggagcaacatggacaacatgttcaagagctacatcaacaaccttaggcggcagctggagactctgggctaggagaaactgaagctggaggcggagcttggcaacatgcaggggctggtggaggacttcaagaacaagtatgaggatgagatcaataagcgtacagagatggagaacgaatttgtcctcatcaagaaggatgtggatgaagcttacatgaacaaggtagagctggagtctcgcctggaagggctgactgatgagatcaacttcctcaggcagctgtatgaagaggagatccgggagctgcagtcctggatctcagacacatctgtggtgctgtccatggacaacagccgctccctggacatgaacagcgtcatcgctgaggtcaaggcacagtacgaggagatcgccaaccgcagccaggccgaggctgagagcatgtaccagatcaaggatgaggagctgcagagtctggctgggaagcatggggataacctgcggtgcacaaagactaagatctccgagatgaaccggaacatcagccggctccaggctgagaatgagggcctcaaaggccagagggctttcctggaggccgccattgcagatgccgagcagtgtggagagctggccattaaggatgctaacgccaagttgtcgagctggaggccgccctgcagcgggccaagcaggacatggcgtggcagctgcgtgagtaccaggagctgatgaacgtcaggctggccctggacatcgagatcgccacctacaagaagctgctggagggcgaggagagccggctggagtctgggatgcagaacatgagtattcatacgaagaccaccagcggctatgcaagtggtctgagctcggcctgtgggggcctcacaagccccggcctcagctacg

SEQ ID NO: 393040 - DNA, 577 bp, Homo sapiens
ggagagttgcccacattaaagaacatcctccatgggtctcctgcatctagtgggctaacccatggtcaggcctcaatcctccctagttaatgggtcattttataagtcattcttgtagagccgtacttctttttttttttttttgatggagtcttgctctgtcacccaggctggaagtgcagtggcaaagtctcgacccactgcagcctctgcctcccaggttcaagcaattctcctgcttcagcctcccaagtagctgagattacaggtgtcagccaccacacctggctaatttttgtgtttttaatagagacggggtttcaccatgttcgccagactggtgttgaattcctgaccttaggtgatccgcccacctcagcctcccaaagtgctgggatttcaggcatgagtcactgcacccggcagagctgcacttctaagggaagttaaatctgatttcttctcttctgagctaaaaaggttgaaaggaagagaaacctgccccatctcccttttttttgtctcgggtttgaaggtaataatcatcataccacttgactggtttaccaaaaaaaaa

SEQ ID NO: 393041 - DNA, 332 bp, Homo sapiens
tatcaaaaatagtaaatggagcccagtaggtttttatgaatgtttcactgagaatggtttgaggtcctggaaaatagtatatagtaatttctcactgatttcaactctggtatttgtgatggtttggggatggggagtgagtataattgctattcagttggcagtacttaacatttcctaacagtatagaaaaaattttaaatgctttttaagtttcctgcccagaaaaggagtgctttctcaatcttgatgttagcagagcccactatctccctcccatgcctgattgaagcatcacgcatctccttggccctttgaaagcttatgtggtg

SEQ ID NO: 393042 - DNA, 383 bp, Homo sapiens
aaaaaaaccataataatcctaagctttaatcttacaacctttttcttaatattttgagaatatctcttgtgcttttcaaaattacctgaagttcagcagtatttctgttttagtttagatttattttcctgttatcttcaagcaaaagatctatctcactatggttaagaaaaagattaaagagattagaggtcttaaaaaaaaaactatacatgttaactttaagaccttcccctttctgttcttaccttccaatttttattggctttaagtgtgtgtgttttaaggttataagactggtgacttagtcaattacaattgtactggttgtataggaatttggggcagtgtgaaattgttttgctggggctgaggaaaaaatt

SEQ ID NO: 393043 - DNA, 650 bp, Homo sapiens
taggaaaagaggttggaggaagatatggggaggtaggaaaatgggacttttttcctccatttacttttgatgtttgaatttcaaacatgagtatatttgtgtattattttgcggttaaaaacactgaagattgcataaagatcaaagagggaaatttaagggaattaatgggttatgattgcatttgttcagaatggttttggtggctcatgacaacattttgagagagagagattttaatggcaccaatggcagctaggataactagtttaaagtttagggcctgtgttaatagattttgctttctagtttcagaaagattctcttatagtactgttttaatctgtttttctaagccctctgatttatgtatatttaataggccacaaaataatgtcaaatatatggcataataaccaacaaatatttgaataagtgaaaggtactctacaaaatgctatgggaaagacaaaaataaataatatccctttctttgagggattaacagtgttaatatcccttgttttcatttgatttgaaatgccacttgcaagtggaatatgcagactaaatggtaaagagaaaaacaagcagcatcttttcatttcacttacagctcactgtatgaccaataatatgttacttgacct

SEQ ID NO: 393044 - DNA, 405 bp, Homo sapiens
cagggggcaggacgaagtagggaagaaaagagctcaaaattccaaaggcaaggcacaaaataagtttcctgattctaactcagagaactattacagaaagaaaatagaaaaatccaactgccctgcagggaaaagattcatctggcatggggcattacctaacacacagaagtcagttttccaggcctgcctggcatctgccctagaacagtgcctgatttggggtaactcccaccaccccagtctcagtccatgtgactcataagaggctgggaccccaacccaaagctctagagccctacattcctctggccagtgatgggctcagaggcaggaacatgacccagcagagatggagaggccgagaggatgaccatgggcacgagactgggtggccctaagcct

SEQ ID NO: 393045 - DNA, 669 bp, Homo sapiens
gtttcacaacagccacacattaacattacttagctctattattaatagtatctgtcatgtactaagcagtttaaaaaatacattttgaatggtctaaaagtttaaaataatatgaccacattttagtttaaaaacatttacacaaaaattctcagtaaatggagttaaaatatgaaatttgaatgaaaatacagatatgtgccttttattcacatttttaacagtctgtataaatagtttaaacaagaattcttaaatttatgaagcccttggatatatatgcatatgtatttagctatctaaaactattgggttcctgagtttggaatgagagattggttattgttctgatagcaggggtggtttgtgagccatgccctgagttttggctagtaagagtctggatagcaagtgatacatgtgagtctggatagattccaatgcagtttttggaatctattcggttcctgagttttggaaaacgagaattcaaatagagttcaggtggcaaaggatccttgtgttatctctttgtatttctgtggttatatcagttgacatttgctttagcgtattatttgctgttgtttactatatcagaaaagagtctgtagtaataaactttcttttactttgagcaaggaaatactttttaaattaagtgtatgt

SEQ ID NO: 393046 - DNA, 286 bp, Homo sapiens
aaaaaaataaaataaacggcaagattggttaagaaggcagacttgagaagcagaattcagctcagccacttaatagctaagtgaacaaacactgtaaagttatttagcctctttatatctcagttttctcatctaatgattaaaacagcacactgctcttgaggttgttagaaagaaggcagtatgtaaagcgcttagaacagtgcctagcccacaaatgtgaggtgctaattttatgtggattatcttatttcattcttacagcagaactaagatgcagccatga

SEQ ID NO: 393047 - DNA, 697 bp, Homo sapiens
tgtaattccagctactcaggatgctgaggcaggagaattgcttgaacctgggaggtggagggtgcagtgagccgagatcacgccactgcactccagcctgagcgacagagtgagactctgtctcaacaacaacaacaacaacaacaacaaaattagctggacatggtgatgtacctgtagtcccggctaccagggaggctgaggtgggagaattacttaagcctgggaggtcaaggctgcagtgagctgtgattgtgccactgtacccagccttggcgacagagaccctgtctctaaaaaaaatgaaaattcagtttaatttctagtatcatctgaaggctgtttccaggttctctgagcctggattctacaggcttcgtggtttgagttgggaccccctaagtcaggaattgggctcacattcttggaaggtgatgtgaggggcagttatcactggggtccctcagccaggaaggtttaaggagaagacatggatacactcggagcaacttgggctttccattgccccaactgctttttcctgctgaggtggaggtgctttgctccctcccgctcagcagatttaagctgaaatctgaaagatcctatttagcctgtaccactgggattcatggagcttcatgaagcatatgataagaaaagacatgcatatttatgattcagagaggaaaaaaaa

SEQ ID NO: 393048 - DNA, 960 bp, Homo sapiens
cggggtggccgggtggcggcggcggcgctccggtcgcgatgggccagaggtgacgccgcagccgccgggagccgcgagggacggggcaggatgaaccgggccaagcccaccacggtgcgccggcccagcgccgcggccaaaccctcagggcaccctcccccaggagacttcattgctctgggctcaaagggtcaggccaatgaatcgaaaacggcgtccaccctgctgaagccagccccttccggcctgccttctgagcgcaagcgggatgcggcggccgcgttgtccagtgcctcggccctcaccggtctcaccaaacgccccaaactctcctccacaccccctctgagtgccctggggcgcctggctgaggctgcagtggcagaaaaacgagccatttctccgtcgattaaagagccatctgtggtgccaattgaagtgctgcccacggtgctgctggatgagatcgaggcggccgagctggagggcaacgatgacaggatcgagggcgtgctgtgcggggccgtgaagcagctgaaggtcacccgcgccaagcctgacagcaccctctacctgagcctcatgtacctggccaagatcaagcccaacatcttcgccactgagggcgtcattgaggctctgtgtagcctcctgcggcgggacgcctccatcaacttcaaggccaaggggaacagcctggtgtctgtgctggcctgtaacctcctcatggccgcctacgaggaggacgagaactggcccgagatctttgtcaaggtgtacatcgaggactccctgggggagcggatctgggtggacagccctcactgtaagacgtttgtggacaacatccagacggccttcaacaccagaatgccccccaggagcgtgctgctgcagggggaggcgggccgcgttgcgggcgacctgggtgcagggagcagcccacacccctccctcacg

SEQ ID NO: 393049 - DNA, 170 bp, Homo sapiens
cataatttctttttttaaagaatcaaacacattaaaaacccaggagaatcatttctggatttcttctaaattgtgttcactctgacattttccagaatcaaccaccattctttgttattgacctgtccataaacatctctagggtgttatttttcttttgtgacatcatg

SEQ ID NO: 393050 - DNA, 357 bp, Homo sapiens
tgtttataagagtagacaaattccttatagaaggtcatgaaaattgatcatgttggagataatattctgaatcctgctaaatacactactaaattatctcagtaggaatcttgtaattttccactctttgaagtccatggcttctgatgctgattcattcctaattaaatggctttagctattcaaatcctagtatctccctctcaatatcctccctgtcatcatcccagaccttttttaaaaagttttattttaatttatttttttttttgagacagagtctcactctgtcacccaggctggagttccgtggcacgaactcggctcattgcaacttctgcctcctgggttcaagtg

SEQ ID NO: 393051 - DNA, 406 bp, Homo sapiens
taggctcatgacataatgtgtgcccagaagtcaagatctgcatttgtcaagctgcagacccagaaaagccaatggtataattctagtcctagtctgaaggcctgagaaccagaagagctgatgatataaattccagtctgagtatcagtctgaaggcagaagaccgatgtcccagctcaaatacagtcaggcagagagaaagaattctttctcagccttttgttctattcaggcctttagtcaagtggataaggccacactggggagggtagtctgcttttctcagtctaccaactcaaatgttaatctcctccagagataccctgacagacatacccagaaatagtgtgtaaccagttatatgggcaccccaaaattaaccatcacaatgggcacacattatgga

SEQ ID NO: 393052 - DNA, 266 bp, Homo sapiens
ctaaaggtagcttaacaaaggaatgaaacagttttctaacttgtgtttactgttaatcgcaagaaaagtattgtaaatgctgagctaaaaagcatccatttaattgacatacttttgcaaataaaaaccagtgaaactaaaaaaaattaatgctaatttatcatttcatgtatctatgttctttgcttttatttatcagtatcgtttacttacagcttttaaagttcagtaattagccctgtggtttttgacaagaaaacttaaga

SEQ ID NO: 393053 - DNA, 275 bp, Homo sapiens
ccacccccagcctattcctcttctcaatattctgctggagagtgcaggaacagtgaactctatgcaatgaacaaatgcggtgttccaaggccaggcacaacggttcatgcctgcactttgggaggccgaggcgggtgaatagcctgaggtcaggagttcgagactagcctggccaatgtgccaaaaccccatctctacaaaaaatacaaaaattaaccaggcgtggtgggggacgcctgtggtcccagctacccaggagcctgaggtgggaggag

SEQ ID NO: 393054 - DNA, 127 bp, Homo sapiens
caaaacaaaccagttattgaaaacaagcataagccattccaaagctactggtcacagaaacctgaattatcaaccgggtggtagaggagccaacaagaaacagaaagatgaaatggagtaagtgcac

SEQ ID NO: 393055 - DNA, 130 bp, Homo sapiens
ccctcaccatcagcctctcagtcagacacagcacccctcacggccattccatcattccattctgcatgtgcaaatgccgtcgcccagcacacacatccctccgagtcagctggcagggccaccctgccag

SEQ ID NO: 393056 - DNA, 118 bp, Homo sapiens
tggccatggcaggatataacaatgaaccagacaaggtttgtggactgaatgaatggtgagagaacgcatccaacgcacatcagaccaggcctgtggaatagacaaagtgctggcaaag

SEQ ID NO: 393057 - DNA, 542 bp, Homo sapiens
aagggcaataaccagtcgaaaaattaccagagcactcaagaaaacaaggcagagagagaaccaacaggaaaaaaaaaatgtgttttttaaatgcagcagaaatatattggcattgccacttggcgtagttttcaagcacagatataaagtaaatatgcttactgtatttaacaaaataaacatgaacaataattgcagagaacagtaaactataaaaagtgacatagcagatttaaggagtaccaaatgggacttttagaaaagaaaaatgataaccaaaattaaaatctccgtgaacattttggcagcacattgcactcaacagaagagaattaggaaattaaaagataaactagaagaaattacttcagtgctacacagagagagacacagtggtggaaactgcagtagcaaagaggagaagggtgcggaagacaacaaatgtaggtttgatggaagctctaaagagagaggagaggttggctgagaattttccagatttgatgaaagacaccagtcccaaacaggaatagtaaaaagaa

SEQ ID NO: 393058 - DNA, 1331 bp, Homo sapiens
agtgtttacaggcatgaatgctggtggaaagagcagagtaagggcagattgcacaagaaccgtggaggccctggttcccatcacctccacctcagcacagacttcagagaggagaggaggcactggatgcatgacagcagcacttgagataggtgctccaggtggaaggcactgcacatgcaaaggctgagtaggtagttctctgtgtgaaaatggtgatgtttggggtggatagctagtgaaaaagactggattgagcccaagtgaggaggatctgtgttgtgaggtatggagctttgactaaaaacatacattctaaaactaggtgggcttcagatttccattctgaggctctgccacctactggctatttaatcttggacaagttggttagcctctctttgcctgtattatcttgtgtaaaatgagagtaattataagattaaatgtgagcacttaagagtatattagtctgtttcatactgctgtaaagatactacccatgactgggtaatttataatggaaagaggtttaattcactcacagttctgcatggctggggaggccttgggaaacttacagtcatggtggaaggggaatcaggcacgttttacatggcggcaggagagagaggaggaggaaggaggaactcctaaacagatcttgtgagaactcactcaccgtcaccagaacaacatgggggaagctgcccccatggtccagtcacctcccttccttgacacatggggatcacaggtccctcccttgacatgtgttaattacaatttgagatgagatttgggtggtaacacagagccagatcttatcatacagccagtgtgtagttcagtaaatgctagctgtaattatcattattattagctccagttgtacaagagttccaagagtctgtgttcacaccaagcattgtctggggactaaacacaacctgcgtatatgtggctttttgatgttcatagctcctaatttcccattacgttttagagattagtaagatataaatttattttaaagtttattgaatttgcaggaactattttttattgggataaaatacacataatctaaattttacccttttagccatttttaaatgtataattcagtggcatttggtacattaacagggtcctgcaaccatcaccactgtttagctgcaaaacgttttcatcaccccaagaggacaccctgtactcatgaacagtcgttccctgattctccttccccctaacctctggcaactgctaacctgttttctgtcttttgggatttgcctattctggatatttcatataaatagaatcacgca

SEQ ID NO: 393059 - DNA, 282 bp, Homo sapiens
ggtttcagcttctcactgttataaaatatgttccagttcccatctgtgtaaatatatctgtgaacaaattcagcagcaagtaataataagctaagaatgatcttctgtcttcatcacgtaaggaacaatttggagcacattttgtgcaagggcatccaaagagtgaacacacaaaaaattagggaggaaacacaggaggtagaagggatagggggagagaggatgggctctcatgtactgtagtgcagtaagaccagggatgcccaacaggggggtaccgag

SEQ ID NO: 393060 - DNA, 497 bp, Homo sapiens
tagaagatggtaaatgatatgagaggggtatagagcttagagcatggagaagtgacctctgacagggtaaatgaaggatagcctccaggaggaagtagcatttgagctgggctttgagtgacctggacatgtgaggctgtccagctttccttccagctggagtaaagggagcaatcaaaggcaaggacctgagatcaaaaactcggctacctgtggctgggctcagtggcacaagcctgtaatcccagcaatttgggaggccgaggcaggcggatctcctgaggcccagagtttgagaccagcctgaccgatacagtgaaaccccatctgtactaaaaccacaaaaattagccagcctgtagtagtgcccacctgtggtcccagctactcaggaggctgaggctggagaatcgcttaaatctgggaggtggaggtggcagtgagccaagatcacgctactgcactctagcctgggacacagagggagaccctgtctc

SEQ ID NO: 393061 - DNA, 278 bp, Homo sapiens
gcaggatgcccactcatcatgttatcaacatgccttgaacctccaaggtgtgaggccaagacgtgccctggacactcaggatgctgaatgggggaaggcactggaggctaggccggctggagcgttgaggtcacaaccaggacgccctgggtgagctgccggtcacagacactactatcacactatcccgtacccacccctcactggcttcgccaatcctgattctgtttggtttaagttgtttcccactaccctatgctacaccaaccagaaaccag

SEQ ID NO: 393062 - DNA, 510 bp, Homo sapiens
tctctggtcttgcaggccctgcgtcaggcgatttcactgctgagctgaccggtccataaacaggccatgggcagtgtcacacgttttctcacacaacatgactgtggtttctcttaatttgtctcttctctgggcttcttcccgaggcctcaactgtgcggcagctgaaaaccatcttcacgctcatccggggtgagaattaaacagtcctgttagtaaagctctgtccttcagctcctctgtctttagccgccctccctgcggcatggttttaggaggagtgggagccactcagcctctgactggaagggaagagttggcccccggcacagggtctccagcatggagccttcagcctgccctgtggctgcccaccctttggccttcatgactcaagttggggccgctggtctctcttggctgggtcagggcccagggcggctccttggctggccagctcttgttggctgtgggtttctccttccctgcccaggaggtctgcccccgctc

SEQ ID NO: 393063 - DNA, 398 bp, Homo sapiens
gagaatccgtacaaagactgggaaccgaacccagaaagccttccatccttggtttgcctgcctttgactatttgtaccgtaacccccacactcccatgatatcaggcccagtcagtgcctgacctaggtacaatctcaatttgcacatcctatatattttttctagattccccaaccagaaaaagctgagatttaaattctataggttatggagaactaagtgtgacccaaatgagaaaagaaagctggctaaacaaaacacaattatgcgcataaaatgtctccaattttcctattcagcaaaagtcttgtaaagtaaaatggcatattacaacaatattagctcttggatgtaaggagcagaatgcactttagcatgggaaagataagagtctatc

SEQ ID NO: 393064 - DNA, 197 bp, Homo sapiens
tcccttcctgtatccctatatcctaacgtccttttctcttcttttctcttcaaaatttctcttcttcctatttccgtcccttaacactttgtaaatcttgtccttttatgaaccatatcacctgaacctcttttaggttttttttttttttttttttttgttttttttttttttttttttttttttttttttttttt

SEQ ID NO: 393065 - DNA, 523 bp, Homo sapiens
ttcttaccatctgagtaaaatgcaactccattattctagttcctcaagccaaaaatcttggcagcttttccagcaactccctgaggctctggcctctaacaagccagtatctgggaacccatgtagcaaataaagaataaacctccttgagcctaaacagaagggacagcactctatgtgccttcttcccctggcttacttcaggcgctaatcccagccatccactgtctccttggaaaaaggttggaggcctctgccagcaagaacaggaggaacagcaccctctgcgctttcttccctggcttgctcctgagataagtttctgcaacctctcattagaaggaggcaaggggacctctccatgacaagaaagagaaggggatagtccctgtgtcttcttccctggcttgcttcagggaactccagaccaaaaggttacccctgcaaggtgcatgtgagacttcttgcttgaacgggagagtaagcacactctgcacctccttccctggcttgctccagacac

SEQ ID NO: 393066 - DNA, 600 bp, Homo sapiens
ctagagttctcccaacctgtctctcgccatcccctccctggccaggtcatggcaacctgctgatcactcagtgcacttcctagtgccaaccccagtgagaaacaaactccccagatttctgtctcccacctttttaagaaacacgaaggaaaaggaggagccaggcccaggtgcaggctggtgaacgggattagagcgattgatatctgccaagctggtgctaatcttccttcccacctcttcccctccaaaatcaacaaacaactttcctctctctgccttgttctctgacctttgttccctccacacaggtctcagagctcagcatcctagaacagtttgagcaagatgtcagtcctgggggtgccaacctcacccacctccacttgtccaaagttggtgacccagaggacaggtgcaaccctaaatggtccaaccaccacagcctgtcctgtggccatctggggcccctctcagggtctggctgaggctcatctcagacccacataggaccaatatcagcacctgcctcatgctcatgtcacagcccactgggaccaacctcagaccctatatggtgccacccttacgccctcctga

SEQ ID NO: 393067 - DNA, 708 bp, Homo sapiens
ggaagaggattgagagcaggatccacgtttagggttttgtgccattgaaggtcagaggcagagagagtcgagtgtggtggcagtgtggaaatagcagctcagaaatctacctggagacatgaggaatgcagtagtgattaacaatggagctgagtcccaggtttcttaggatgtgacattggaccacctggatcacaagtttgtaggggcaaagtccaagacatctgaattgtattaggcactcagcgggtctttcctgtatactgaggtttcaggacctctcgcctactgaaatgtgagtggaaaagtgaatacaaggcatgcagttggcagaaggcacaggaatttgggaggagaagtgattgaaaatggcacatactctatactctgcatagtaagtaaattttaaaatatattcgattatgtatttataatatgttatttttaacttataattctgtgggcaatatattctattccaaagatagaataaggtgttatgaagcgtagtggacataaagtcagaggtcctggattacagtcctagtatgccatttattggctttgtggggttggcaaaccacttggcaaatctcagagactgttgtaaggacaagcgaactcatatgcacgggtagactgccaaaaatatgcacacaaaataatgatgattattttctttgtactgttaacatttctaactagtaa

SEQ ID NO: 393068 - DNA, 486 bp, Homo sapiens
cacacagactcacacagacacacatagactcacacattcccccacacacagttctcacacacatgcacacagacacacacacatgcattcccccacactcacacctgcacacccggtttccctagaaggctgctgaggctccctgctcaggcaggcaaggcctccggaccctctccctgccagcctggaagctgctcgcatcctcctgtttccagcccagagtcacgcacctctgtcaccctgccagaccttctaaatcctcaggaagtgggtcaggcctcatccagttcacacccccaacccccacatttcataaatggggagatcaaggcctggagaggcttggggacctatccgaggtcacacagggttgggcttacaacccagggctggagtgagagcaggcccagcgtgtactcatcccagccggcctggctgggcccctctgggactgacccaggactgggcatgagagggcctaggact

SEQ ID NO: 393069 - DNA, 229 bp, Homo sapiens
tatgacaacctatgaactgtctttgcctttcctcactaaagtggggaggcaaaaccccaatggcgaggcagcaggggaagagcactcaacttagaagaaccgggttataggccgggcgcggtggctcacgcctgtaatcccagcactttgggagtctgaagcgggcagatcacttgaggtcaggagttcgaaaccagcctggccaacatggtgaaaccccgtctctact

SEQ ID NO: 393070 - DNA, 142 bp, Homo sapiens
cagtcaaaaataatgcccaatttaaccttctgagcttatatgatgaaaacaacattttcaaaagtttcctcaacagatgattacactattaataatagtctcgctctgtcgcccaggctggagtgcagtggcgagatctcag

SEQ ID NO: 393071 - DNA, 256 bp, Homo sapiens
caacattgcccacacttatttgaccagggatctctatccatagagcctgtggtaagaagaatgcttagattccacttcagtaaatctcgatgttactcttaagtccattgtatgtaacttattttactaatttaataataactaaactttattaggtgatatgggtgacatttaaaaagactcttgatttaaaattaccacatgacaatccctaatttgtttaactgtatcatagctgaatttgtatatgttctgg

SEQ ID NO: 393072 - DNA, 330 bp, Homo sapiens
acaccctacactgatctccccagttagctcggcacccccagccccactctgccacctcaaactctgactcttctcaaccccagcttctgtctctctccctctgaaacctaccaagtcactttcctttctccatccactcccagattcctcctcctacctttctagaccatctcccaaagcccgcagcctttaacctgctgcctgcatcttccctgtgtctccctgaagctgaggagcttccccatgctctgggagctgatcttttcccaagaactcctcattccacccccaactcattccacccccaatccgcttcctccctccgcagac

SEQ ID NO: 393073 - DNA, 168 bp, Homo sapiens
gggattcttctccctcagcctcccaaagaactaggattttaaatacctagagcaggtatttaaaccccagaaaattctgtaaaggggctcttgaggccctatgctcaggccactcccaccttggggtgtctacattcattttcaataaatcgctgcttttgttgcttc

SEQ ID NO: 393074 - DNA, 677 bp, Homo sapiens
ggctgcccgcgaggtcggatgggacttccggcctcacccctgaacggttgctccgggtagctctgtctgcggcggcccgccagcctggcacaggccccgcccggcaccgccttccctcacgtcgtctagggcgtccgcggggcagcagccacgtgattcgcggttagggattccatagttcacgggttacggcacacacgcgttacgtatatatcgaggtgacgtggaagtcccccagtagttgaccttaaacagcctgggttgactggcctggtaactgcgccttcattcgctttttgtagagcaaatgaacgcgctgtctcacgtgtttctagcagcatcccggggaactggccacagatagaaatattccagtttgacacataaggaaatacactctgaaagatgaaagggatgtttctttttttcttttctttcaaattgctcacacaattttaattgcaatagatataatttccaatataccattcaactacaccatttgtatgtgctggagtgagacaggagtattttgattgagtgtccagttctctttaaaactagcgtttgcagttaacgacttggaaaatacaacacaaaaagccatctagccttttttttttttttaatctctatttatcccttcaaaattccctttgtggccatatacatactag

SEQ ID NO: 393075 - DNA, 254 bp, Homo sapiens
cttgattctcatggaagcagcattgtcctgacagtctgatcactgttctagaaatcaagtttttccagctccaagttactgacaagtctgtctgcagctttaaggacagccttgcttagagagctattttctttgaagtggatgtcaaactaacacagtgatcatactgtaacaactcggttttttttttcctttattaaagccacaggtcgacccacaagccacggtcaacccacaagccacggtcaacccac

SEQ ID NO: 393076 - DNA, 561 bp, Homo sapiens
ctaggagtgtcttcactgacctatgtaatggttgatgctgactgtccactgggacctcaactggagctgtcttccggagcacctgtgtgtagcctttgcatgtgacctggacttcctcacacatggtggtcacttcttacatgatggtcaaactgcttagatggcagcttaggctccaaaagctagtgtcatagtaaacaagatgcattgcctttaatgactcatctcaaaactgacaaagctatcacatctgccgtactttatggattagaacaataacaagttcactcagattcaaggggagaaaaattaagccctgacacttaattgtggaggagcaaggtcacagtgtacaagagtatatgcaatgggtgatgctgtacagttatatttggaaagtacagcctgggcacagtggctcacacctgtaatcctagtactttgggagagcaaggtgggaggatcacttgagcccaggagtttgagaccagcctgggcaacatattgggacctcgtctctacgcataatttaaaaattagccaggtgtggtggtgtgtgcc

SEQ ID NO: 393077 - DNA, 546 bp, Homo sapiens
gcttttctccaaggccagtttgttacccagtaaccaggggtgataggagaaatacttaaaatgtactggaggcaggccactcccaaatggactgtggccagccagaggaccagcagggtctgttggatagtcttctgtgccaagtgtgaacacttcagttgctgggtcttgtggagctccagtgagtcctggggaagtaggtgcagaaggagagaacactagggcagcttttatctactgaatattttaacaactgctgtagaggtaacggttggtactcagtgaatatcagctttccctctgcactcttgacacccactccaaattcatgaggcctgaaatatgtgagtaggacaagtcacacacctctctttgctcagtcttcctattttggtgtgtttttaagcaacttagaaactcatctcctaattttttttttcttaaatacctgaattggcatgcaacatatgcaaaatcccactgttaaacaaacttgaaagtaagttgcagattttgcagtacattctgcaaaatgttataaactcc

SEQ ID NO: 393078 - DNA, 396 bp, Homo sapiens
catgatacaatcgagctcggtcccttctccagtgagtcctggggaagtaggtgcagaaggagagaacactagggcagcttttatctactgaatattttaacaactgctgtagaggtaacggttggtactcagtgaatatcagctttccctctgcactcttgacacccactccaaattcatgaggcctgaaatatgtgagtaggacaagtcacacacctctctttgctcagtcttcctattttggtgtgtttttaagcaacttagaaactcatctcctaattttttttttcttaaatacctgaattggcatgcaacatatgcaaaatcccactgttaaacaaacttgaaagtaagttgcagattttgcagtacattctgcaaaatgttataaactcc

SEQ ID NO: 393079 - DNA, 600 bp, Homo sapiens
acctctactttatttcattggctaaagcaggccacaggccagcccagattcaaggggaagggagagagagacctgccccctccttctacccgcccttctaacaggagagtgcaaagtcatcttgccaagctgtgggtatgaggagcagggaatcgtttggccattactgcaaacaatttgtcacagctgtctgtgagctaagcatgttgctttcaatcatcacaagagttctttggggtaggtagtatgattgtgattttacagatgagaaaaccaggtcactgagcatccagtaacttgctcaagatcatgcagctagtaagtggcagaattgggacctaaactggtctctgacgtcaaagcccctttcttccctattttcccttcctgcaagtgtctgtttacaagggcagactagagggcccctcctccctttgcttgttaggcatgggaataatatttttgtggatgatgattatctcataatcagggtggactgagggaggtgatcatcttgttgtggcttgcatgtttactgtgcggggattggacagctgtatttatgagaatccctttgaggtcacagtggtgtgttattga

SEQ ID NO: 393080 - DNA, 138 bp, Homo sapiens
gattcacccacctcggcctcccaaagtgctgggattacaggcgggagctaccgcacccagccaacactttttaatattaaattctctctgttgaaatagcttgtgtgatttcttttaaatgggcctggattgatatgg

SEQ ID NO: 393081 - DNA, 673 bp, Homo sapiens
tgaaattctcccccaccaggaacttcaaggctgcagctaatttacaacccagacaagcccgagatggtaccagcccaattcaccagatggggcaataactcaagataagtcattggaacaagtcacgtagacttgcaccatctcgccccacataccctccataccaaacatcctcttcttaagccctagcattttgcctgagaattccgaagtggttttattaaggcaggagcctgaaccatctccccactgctagcgctgaaaaataaaggcactttccttctactgcaccttgtccttgttattcaattttgcaagcggagggcagctggaacttgtgttttgttggatatttcactaccaaaatatatgaaagagctatagttaattggcttaaagaaaaagtaagtgcttaaatgaaatattttatccagaaaagtagaaatgcactaaaatgccttttaattcttgtaacttgggtaaatttttggtaaataagactagttttttggtttaatgaaagcagcagtgtcatttgatcagcaaaacgtccatgtattaaccttagggcttttgctttggtggtgactgcctaacattcacaaactgtagaaatgattaataaagaaataagatgatggctagatttgtccaatgtttcctgaaaatttcc

SEQ ID NO: 393082 - DNA, 436 bp, Homo sapiens
ctgcctcagcctgctgagtagctgggattacagttgcgtaccatcacagccagctaatttttgtatttttagtagagatgggggttttgccctgttggccaggctggtctgaaactcctgacctcaggtgatccacccacctcagcctcccaaagtgttgggattacaggcataagccaccgcaccaggcttgatcccttttcttgaacaacttatatatcccaaagcaacacaccagaatattcatttacaatgagaatgaaactatccccacaggagcgacaagaactgcatgctgggttctggacagaaatagagttataattaagcattcatcaggctgcattttggcccacttccttgttgctaaaagtcaggtggcactagttcctgaccattgcataccattgttcctgtagataggatttctgacatt

SEQ ID NO: 393083 - DNA, 373 bp, Homo sapiens
tctggaagctgtacatccagagaagggtgcaggcctggtgagtctgggaggggtgtctggtgcggcccttgcagctgtgactccatttctttcagtccatcagtctctggcgagagccggagaggttcctattaattcccacagccgtgggagcctggcatagccccgtagagggcctgatggaggcacaggatgggcgggaatacaggcaggtcctgtggcctgaggagctgccctgaggatgttagcttttgtcctgaggggcacggcaagcctgtgtggggcagaggcatgcgggctgactcgagacgcatcactgctgtggggtgggcaggtgcatgctttgctggtgaatgtggggcagagagggagt

SEQ ID NO: 393084 - DNA, 433 bp, Homo sapiens
caaaagaattgtaaagagtccgccttgcctacagagtaaaggctgcacacctttgtgtggcctctaccatctgcacccatagggcaaaaggagccagaggcctgaggctggccctcgggtggcagtgggaggcacctgcttgaacagtggatgctccactccttacttctttacccagtttatagacagacagttgagctatagtcctctgcacacatggcttttgcttcaaacttttccgcatgcactttcctctgcctggaatacttttccctttttcctgcaaactgcaattccaatactgcctcttccttcagttctctctttttccctgggccaaaagtcatctcccgccttctatactcccacgccccttacctgctgctctcttgctacctcatacttcctgcttgctcttgtagtcacttgtgta

SEQ ID NO: 393085 - DNA, 302 bp, Homo sapiens
ggaaagatcacttgagtccaggaaatcgaggctgcagtgagctgtgatcgcgccactgcactcctgcctgggtgacagagtgagaccctgtcccagaaaaaaagaaagcccatggggctcattcggtttgtactaagctactttccctcaaacgtttatcttcaaaagtagaagacagtcttcaggctagtgtcaaatcataggggaaagtctttagaccatcagcactctgacttgaacttcttgaagatatattaccttctgttattataacaattatgtccctgagtcattaaattact

SEQ ID NO: 393086 - DNA, 424 bp, Homo sapiens
ctcaggtgggactcaggaggctgcagtgcagggaggtctgtgcatcttctgggtgtcgtccttaccaccatgtggctggggatttaggcagcagcccagtggcctcttgctgtggagcgcgggggcagcctcccgggccatctctcccccctacttgcgggttctgcactggccacctgggaggcccctccttgctaaggcccacacggccgtctggggcagctagccacagtgatgcctgcaacctggccgcagaaacaggtgccaagaaataactcaacagcagcagtagcgacaatgtcccacgtccccaggatgtttgcagaaagacatcccccggggatgggaaaggtgcttcccttgtcctggcccacactctgcactcggggtcctgggatgcactgcagcctccagagaagctgtg

SEQ ID NO: 393087 - DNA, 266 bp, Homo sapiens
taatttttttctaatttttgtagagacacagtctcattatattgcccaggctggtctcaaattcctgggctcaagcgatcctcctgcctcggcctcccaaagtgctgggattacaggtgtgagccactaagcccagctggaagttgtttgttttcctgaatatgaaccttaaaagtttagggacatcctctgagacctggtttcctccaggagcttggtagcaatggatcagctcttcccttacacacatttatctaaatccttta

SEQ ID NO: 393088 - DNA, 399 bp, Homo sapiens
cgactctccagcctcacatgtgcttgtcctaggagctgccatcttcaagccaggcccctagcacgtgtctttactatgaagctctgaagcacatgctcaagttccaaggttctctcaggcaggggcctctccgtggcaccatctacaataccttactagtatttttgccttaattttttttaaagagggccttccagagcatataaactgcaagcttagtatccactcctagtggactgtattctaaaacttgcaaactgtgttattcttaccaggattcatataccttcgtattaaatagatattagtttgaaccacatgaaattgcctgatttttgcaaatcaaaaacttatcaggtatcaacagtggcattacggttcaacctaaataacttctag

SEQ ID NO: 393089 - DNA, 215 bp, Homo sapiens
catgctatcacagtcacagtttggtaaatggagtggtccaaaactgttaggggatatctgtttttggaagcctattataaagactgaccctcagtactaatatttttaagcctgagaaaaactcctttatgagatcagaactttttacaagcccagggttctttttccaggatttgtgtatcttagaggaccagacgaacaggctaaggatgaga

SEQ ID NO: 393090 - DNA, 376 bp, Homo sapiens
gagggcagggtcttatttctgattccacagctaggtgagcagtgcctggctgggccagagctggttacactggaacgaatgaacacagaaacaaaggaagaaagaggaaagtgacccaggtgtcacaggtggtagagaatgaccagaggagactcccttccccagcctctgtagcgaaacccaacacagaccgtcctccacgatggctagcccagcccttcccatctggggtctccctggctcatgagtcttagggggccttccagccctcctcaacagtgtgtgagccagtcctctggcttggccaggcagaggttcttgcccaggactctggatcttgggcaagtgctatggagatggggcagggagaattcac

SEQ ID NO: 393091 - DNA, 581 bp, Homo sapiens
ggtctatactagctctcttcacttcctcatcaaatcactcactgcacataaacaaatttcatttaagtacctacagactaaaagaagtccaatccaacagattctagatctcactttccccctcaagagcatctgttagtgttaaccatttggtctgtaatacactttcctacttttctcttcattcgatatgtcttctattcaggatccttctcttcaacatctaaatataggagtttctcaagacctagtagtaggtatcttctcttttcactgtatttagcccactcaactgttttctggggagaattaagaccaaataccctaaggcttccattatgagtatgagtgaacttctgtgcatctagaatgttaacagctaccatctttgacagaattgacaaaaccccagttgagaaaggctgctctataacctcatctacatttcaccttatctacatcctggtttcaattaccacctctatgttaatggataagatttctatgtgtaacttaactatcttctatgaactccagacataaagtgctgttcaaaatgtccaacaggatgtttcaacagt

SEQ ID NO: 393092 - DNA, 406 bp, Homo sapiens
ctctagaggaaggctacagacatttcctggcacgttcatccagacgttagctgtcttgctgaaactccttttttcacccttgaaaaccactggaagaatggccaagaacccagctatcctgagtaagttcacttagagaagcaaaatctaacatgagtggcaaaacggacattggcaccaggagtgtgggtcagagtcctgccccttggaactacatcattgcttgcacagtgtaccccccaggcaccaagagaccaggccaagacccctcagtggccctgggcctctggtcagtgtcttcccgcctggcacacaggcaggccctcataaaacaatgagtactgaaaattccagccttcttggtgggttctcagcaccctgtcatgagccacaccctgccccaggg

SEQ ID NO: 393093 - DNA, 537 bp, Homo sapiens
tgagacggagtctccctccgttgcctaggctggagtgcagtggtgtgatctcggctcacaacctttgcctcctaggttcaagccatcctcctgcctcagcctcctgagtagctgggattacagacgcatgccacctccccggttagtttttgtatttttagtagagatggggtttcattgtattggccaggctggtctcaaactcctgacctcaggtgatacacctgacttggcctctcaagtactgggattacaggcctgagccaccatgcccggccaacactaagcatcttttaaaattgtcttaaattttttattatggacattttcaaacatatattaaagtagagaataataaatggcatgaatccagtttcagcaattgtcaacatgtgagtaatcttgttttgcctatacttctatctgtctccatgctccctctccccacaatggcttattatgaagcaaatctcaaacttcatattatttcatctgtaaatgttactatctttattagttgatttaattaaaaattac

SEQ ID NO: 393094 - DNA, 438 bp, Homo sapiens
cactccatgtccatagggaggaataaagagtagggctcaaggtcagtaatgtttagggaaaacctcttggaagctaggagaatgagaaagaagcattccccaacacatagtccctagaacaagtaatctctcaaaacaccaaaaaaacacattgcctgacagcaccttttgagtggctttctttaaacaccacaagagtgacttactaccactacccctgttaacctagacctttcagaaatctctggaatctaacagcaacattcaccagaactgaattcctagtccatcttcctcaggagatgacaacctcctgaccagctgctgggctcaggagcccctttagagtgctgttgttttctaaagaaggggttgatctcaaatgtgactatctcaccctactcctatgtatatatctatgtatgtttgtgtgtctag

SEQ ID NO: 393095 - DNA, 448 bp, Homo sapiens
ctagccaaaacttccattctaacatcagtttacaagagattttatttatatcatagcttaaatatatgtaacagtagagaaaaaaaattaagtgtgtcaaataagaaaaatattgaataaaaactattataaacatttatctgccttgaacactaaagggttgtcttttagcaaaaagaacagtctccaatttttgcctagctttaaccattgtgaaacacagagagaagtccaaggggtagctaggctctgctgcagtcaagagtctgggacaaccagttccagagctctgcaaacacaatacccagtgggccaacccagcactgtgttacagagctcacatgatccagccccagacctggcttgcagctttggatcatgtagcctttttctagagtgagattcactgcagtgtttatatgagctcccaggtagggcatcagaatga

SEQ ID NO: 393096 - DNA, 201 bp, Homo sapiens
gtgtgactggacgtacgtataatggtcgacgtgtacctggacgacgggtgatactcacccaaaaaaggagcattttaaccaggcctgtttagccagaaaggaatcgccaatcccagtggtccaaacttgagttcctgcaagcctcatcagtgcaggctaaagtgttctgtggcccaaaataaactggaaaggcaggctagg

SEQ ID NO: 393097 - DNA, 356 bp, Homo sapiens
tacaaaactcagatccgaggacaatgagagatgtctttgtcatcgtgagagaggcacaaacagaaaagggctcagctgcagcgcagcaaactgtagaaacacaaatcattccacactgaaggacgctgagagatagtgaagcttacacctttctagcactggaaaaacgcactgtgtcctaaaccaattagatcctttgtgggatagtgggtccctgacagacacctctttctctggaatcttctagagacattcacatgcaaatccctcaaacactttaagactatttcacgtcccccgtgagccttctccaagacttcctctctggaggggaacccaattaatcaacatcctta

SEQ ID NO: 393098 - DNA, 393 bp, Homo sapiens
ttggggagatctacgggttgatggttgctgtagaccttgaggacacacagaatcttcaacaaagtataaagtaagatacttcaggtgtactccattgtagcttcagaaaggttaattctttttcccattattacacatttagtatcaaggggaaaaattgctatttaaaaccatatgagcctttcaagaaagatgattctgctagaattgtatagattctttggttactgaagaatagatggtcttctgtttcacctgaacagtttgatttttttttcctccgatgtgcaggggaactgaatatggaagtagagctggtatagttgaaattgtctgtaaaatagagtgagatggatttggaattcctggaaggcatgcttgaagtataagaga

SEQ ID NO: 393099 - DNA, 297 bp, Homo sapiens
atcatattttggggttttgagggggttagggtgccctccggggcttggcaaagagtgtttctgcaagccagagcatgtccagaagtgccactcagtgtggttgtattcccagtgaattggacaggaatcagggacaggcatctaccagttatttgaacagagagaatttaatgttaaaaattgcaaatctagtattgatgagatgaaaggacaaaagataactctaggttttcttggaagtagcaactgcaggcaacagccaccacctcaatagttcgtatgggaggaggggcagag

SEQ ID NO: 393100 - DNA, 626 bp, Homo sapiens
ctaggtatctacccaagagaaatgaaaagacaggtccacacagacttacatgacatcggatcttcatagcagcattattcacgatacagtaaccaaaaagtcaaaacaacccaaacaactggtgtatctgggccacatttttattgctgactagcaataaaaggaaacaaaacagatccatgctacaaaaacatgatgctaagtcaaaaaagccagatgcaaaaaccccatgctgtgtgattccatttatatgaaatatgcagaaaagaactatagagacagggccaggcatggtgcctcacgcctgtaatcccagcactctgggaggccaaggagggcagatcacctgaggtcaggggttcgagaccagcctggccaacatggtgaaaccgcatctctactataaatacaagaattagccgggtgtggtgatgcgtacctgtagtcccagctactgaggaggctgaggcaggagaatggcttgaacctgagaggcggaggttgcagtaagcagagatcatgccactgcactccagcctgggcaacaagcgagactctgtctcaaaaaaaaaaaaacaaaaaaaaaaccacctctggacagaaaggtggttaaaggttgctgtggg

SEQ ID NO: 393101 - DNA, 468 bp, Homo sapiens
  misc_feature (9)..(9): n is a, c, g, or t
acacttggnaggctaaggtgggaggatggcttgaggccgggagttccagatcagcctgggcaacatagtgagaccccaccatctctaaaaaacttgaaaaacaaaggcaaaaactataggtgcatgccaccacacccagctaatttttgtatttttagtagagatggggttttgccctgttggccaggctggtcttgctctcctaacctcaggtgatatgcctgcctcagcctcccaaagtgttgggattacaggccaacgctcctggccagggatcttatttacaccccaccctagcaaggaccgtcagaggctgctgctcatctagtgtcctcatcggctgtgcaggtgcaaggtgcaggtgtaaggggagctgcctgagtccaggtccagcccttactcatctagcagatggaggtcttccataggtgtggctgtgcagggcttgggtggcaggcagctactata

SEQ ID NO: 393102 - DNA, 465 bp, Homo sapiens
ctccctctgtcacctagacctggagtgcagtggtgcaatctctgcttactgcaacctctgcctcctgggttcaaatgattctcccatctcagccttccaagtagctgggactataggtgcatgccaccacacccagctaatttttgtatttttagtagagatggggttttgccctgttggccaggctggtcttgctctcctaacctcaggtgatatgcctgcctcagcctcccaaagtgttgggattacaggccaacgctcctggccagggatcttatttacaccccaccctagcaaggaccgtcagaggctgctgctcatctagtgtcctcatcggctgtgcaggtgcaaggtgcaggtgtaaggggagctgcctgagtccaggtccagcccttactcatctagcagatggaggtcttccataggtgtggctgtgcagggcttgggtggcaggcagctactata

SEQ ID NO: 393103 - DNA, 1053 bp, Homo sapiens
cccaacagattttcaggagagatatgatgtgttgcctgtgttcatttctaagcatgggaaattagctgatcttgaaggatacctgtagtgtgtcagctttttggtatttatgggtcattttgcaagcatttggaatgaccaaaattctttcgctgtctctgctcaggataaactattcctttgaaatttggtagttcctttccaagaggactatttgatttggattctggtcttcagaatattttataagtttttaaggggtcagctagaatcttgaagcttgtcctagctgattgatctgactggtgctgttgctagatctgttacattctggattttctggggttcctggtcgagagaggagtatagctgacagcattgacctttattctgcccctctctgagactattggaatctcctcttcactttttatgtctggaaattgtatgtaaaattggaacacattgcaaatgcagaggtgactgcttgtttatttcttgtgtttttatccagggatgtggctaggattgtataagagctgaaattcagttttaattcaaggtgctttaaactagactgatctctgggattggagtttcgagaatctggggaaaatgtcttttgtgttactatccaccttgggatttaaagaaaaaggatatattcatgcatgcatgtatgtatacatacatacctgtatatgtgcacacacatacttgcacacgcacacactcgcactcacttctccccattttgcctcaccttgattattcttcctaccaaagcaatacatatttattaaaaattttttctgtcattgtcttagtagtgaatatcctccattaccttatccctcaacgagtaattgtgtttaacatttcaaaacatagtacttagctgagtataagatgaatccaaattttacaaggaagttttgggtgagaaaatttaactatttcatcgtatatgtgtaagtgggaggtgtaaacagcataatatatgctgaaagtatatgaatgtgaattttggaaatctgctttctagccataata

SEQ ID NO: 393104 - DNA, 437 bp, Homo sapiens
tatccactgactgagcttcaagggcacacacactaccgcctgtgttcttaacattttcccaggctccatactatgcatccaccatcaacacttctcaatgaactgtagtaattcccaatgggagggggatgggaaagagtagatgagcaggctcacacagtcctctccccagagaatctagaaaagggatatctgtgtaattattagtgcaggcactccctctgctgctgccctctctgcctagtccattcacatgttaatctacacacatctagagacatatgctacacccagtaccttctttcaagcagactacagagtgcatgggtgtgtgtgctcaggtggatgtggcagaatctggagggaggctggctgaaggtatatgctgcagacagagtagtaagagagtgagcaggtaagaaagagaagaagcaatc

SEQ ID NO: 393105 - DNA, 549 bp, Homo sapiens
agaacttgtgcgaccttgtgcgagtcacttaacttctctgtgcctcagtttcccataaagtggagataatagtacctacctcatgaagttgtagagactagggcttggaacattataaatgcccagaaagtaacctctgggtaaagggaatgggaaatgtcagtgacctttgctgtttactttacttatatctgtactaagttttttacaaccatgtatttattctgtattaaaaagcaactaaacataaaaccaacgaaccattaaaattttaaaaaggtcgactgtcatcacccaccaatgtaaacagtatactgcaatacaattaaaatgttcccatttagcttgggagagtttctataattttatccaaaataatccaaaaacgttatacaaaatacaccaatatgccaaaagtgaagtgaagaagaattaagagttagccacactgcctctcagctcacagagtgaaatcacctcttaaagacatttctttcaacttgcaaaattccacttgaaccactgcaaggcgtcatcagaaagtatcac

SEQ ID NO: 393106 - DNA, 589 bp, Homo sapiens
taattcaccccagggaccgcacagagcaggtgggatggtattgatttgtgggccttttggcaaaacatactcattcctaactggcgagggaaccgccagttcatttattcatttactcttctgagtccagcaacaaccttaagaggcaggtgttacctctggtttctgtttaaactgatggccagcaaggtagggcaatttgcctaaggacacgcagctcctaagctactaaacctcccgctcgcctggaagagaagacaggacgggcctatagtgaatcatgagtgcagcatgagagtgttaaaggtcacaggacgcctcttagtgccaagggagttcatagtggagaccccttttgcctgagggactggggaggtggtagttttgaactgggacttgaaggacagactggggtaaaagcaagaggagaagcttgagggaggacggtgtgtgccaggacggtgggactcagagggtggtggggggcacatccactgtccccttccatcctgcagccactccctgaggtggcatttccttgaatgacaggagaggagcctgaggcacgggaagattaagtaaccggtcc

SEQ ID NO: 393107 - DNA, 287 bp, Homo sapiens
tctctagtgtacaataccacatgcttatgcattgtaaaccaagtgtgtattcctgtgtatagaatttagtagaactgatttctgcttcaagagaagctgcacctttaatttaataaggttgaaatgggcacagaaatttttttaaaacttcctgaactcacagcaacccaatgcaaacacaccatagcattttggcactttctttccaatgatacttcgtttctcttctgtatagttgagatcatttatcctttatggtttgtgtccttagaatttctttccatcaa

SEQ ID NO: 393108 - DNA, 374 bp, Homo sapiens
gttgctctctgctgaatctagatctctggggctctgccagcctgggggagcatgcttggttctcttggtggcatctgtccctcactagctacggaggacctgagccagacatcaccctggctgcggtgttccatgtctcacagatagcccagttcagggaggcgacatgcccaagagtgctcagttagctggtgtcagaactgggccttgaaccttggtctgcccacctccaggtctcactcattcccttctttcaataatttgttagtatttttttttttaactcctgggcttaagcatcctcccacctcagcctccagagtagctgggacttacagacatgtgccatttctcctgagactttgaccagctgt

SEQ ID NO: 393109 - DNA, 510 bp, Homo sapiens
gggggacacggaggcaggagacagcagctgaactaaatatcaggaaatgtgccacgaagctctgctttgcgtcaacaatgatattttcatgttggtgacttcatcattacatgatttgattttgactcttatttatcattttgtaccaatttgctagctagtgaatgagtccttttgatgtcttttgagtttactagatttacagtattgtttattaaaataaattcctagttactaagtgttcgcccccagttaataaatacaacagagtaaaagaaagaatgctacaccaagacctcagattgaattttggaacagttaagaattgaaagactgacgtggcttattctaaaccaacagcaagaacaacaacaacaacaaaaatactttattgcttttaaaatagttttatttttaaattgctgtggttgctacccattttgctgaaacagtaacttgagcaactcagtgactagaaaaaaatcagctgacagcaatcccagactgata

SEQ ID NO: 393110 - DNA, 468 bp, Homo sapiens
aaagtgctgggatacagacgtaagccaccgtgcttggcaacattagttttttaaatatgttaacatcatatattaaataaagaaaacatattgtaatatttaaatttgctgagaggaaatctccagtattctcattactaccaaacaaaaaaaggtaattatatgatgtgatcggtatgttaattaccttgattgtggtaatcatttcacaatgtatacatatatcaaaacattacagtttatgtctcaaatatatacaattttatttgtcagtcatacctcagctatgcgggggaaaaaagagcttgggtgccacttctccagttctggaatcatctacctctagtcctttttttttttttttaaatttaagacagtcccttggtctgttgcccaggctggattgcagtgcctcaatcatagctcactgaagcctcaaattcccggtctcaagcaatcctcccattt

SEQ ID NO: 393111 - DNA, 471 bp, Homo sapiens
cgatttaatattgttgagactttagagaatggatgctagattaaaatagtaattttttcacactttcttcttcattatagtttataaaaatgttattgagttttctgctatactattttctgtgctgtaatgactaaaagtcacaaaataatggatgatagtcttaaatatactgtagattagttaactggagcttgaatcactgaaagttggtcaaatatgttggataaattataggctaaaccattgtgagttggagcaatagctagtaggatatgtgtgatgatttaatttgaaatgtaggatactgctctaatatttatttttttaagtacatatgattggggaaaagaatgctttacaattttggaaaaattagtttaatgaaatatatttttttttcctcgtgttcttagccttcattgttaaacacacaaagaatgtaaataaagactggaggagttgtttatg

SEQ ID NO: 393112 - DNA, 362 bp, Homo sapiens
tcaaccagcctcttcctgtcttgggcccctttatgcccatcatctcattgatattcacaacaacaggtgaaaccgggcctagggcagtggaggcagctgccctgtgtcacacagtgggtctctctgactctgctgtgctctgcctgggctctgtccagctctctgtgccatctctatggacataaaggacactaaggacataaagatgctactttgatttgctgactgactagggagaagtagcctgttacagggagatcagtaagaaccccaggagtttgtcctgagtccccagagaaaggtacagtcaatgccataagaggcaagtggagcaggagagggagagagcagtaaggactggt

SEQ ID NO: 393113 - DNA, 288 bp, Homo sapiens
gaaaagataggatctgtatcttatacttttgttaagtgcaattttaggtatttaatattatttatgtatagtattattgggactttaagcaatttattttatctctgattttctaccaagagggaagaaggaattaaacacaaatgttaaatgggaagtgtcttctacccagaggaatgcattcatgacttgtgagtccaaaagggaatttaaaaaatcaaatacataccaaattatccaaaagaaatttaagagattgggattttagaagataggctagctttttgg

SEQ ID NO: 393114 - DNA, 169 bp, Homo sapiens
tactttcaatattgttgtgtctcgggaataggaggcccgaagagaatgaaagagacagttagtggagcagtcagaacacacaaaacatttatctatgaagtttacttaatagatatgtcttatatgtcttatatgggtttggtttatggtgccctcaaatattacaata

SEQ ID NO: 393115 - DNA, 365 bp, Homo sapiens
taggtccgcttggtctactatatctgtctctcagctggttcaggaagggttcaggataagaggaaaagggagattctgtatcagctaggaagaaggatctgaattcagtctgggaataagaacgggagtaaattaaaccatggtttattacgttaagggttacagggaaatgtagcaaataggatcatttttaatttgaaatgttgttttctatatatcataatttattttaataaaaaattagatttttcaatatgaaaagaaaaacaaagtgagtttatctctagtaatttaaatctgtggcttaagccaagatgatccacttagtagtaagttatttatgtgcctatgggcagcacatcatt

SEQ ID NO: 393116 - DNA, 353 bp, Homo sapiens
tcccccaatgatcaaagttgtttgtgtcccgcagctcaatcagacttctggatgccatcaaggaggtctgcatgacctaaggatcattgttctttgaaaggaaaacaagttcattaatcttactggctgccagggttaggatgcaaagttaatcaattattagtgactaccgtctaccgaatgactacgtgcaagcagtcatgcatggaggaagaaaaggacaaagagaaaggaaaataagtaaaaaacaaacgtttaatgattttgataatataggctcagttacatcaccacaaacatgataagtatgtcaggtcatgcatgtcataattagctcaatttccactttgcct

SEQ ID NO: 393117 - DNA, 326 bp, Homo sapiens
gcgagttagcgggcaggcaacgctggcccacgacggagtgcaggagcactaacagtaccttagcttgctttctcctccctccttttatattcaagtacctttttatttctcccttgcgttacaacctttctccctgcagcaggccatctttccccacccgtctttgtaagatcttcagagagtgggcttgccaccaccacccggccttttctgccagcccttccaagaaggaaagcatcttgttctcagtgaacccaaatggactctgtcctgctggtgggcattagctctgctggggttaggcctgggtgcccgctaaaccagag

SEQ ID NO: 393118 - DNA, 192 bp, Homo sapiens
agttcgacggagactctcatagagttcaacttggatattcaacaggtatcacaaacttaacttatctaaaactaagcaccacattctttctctccacctccaggaagttgattttcctagaatttcgtctgcctcaaaaaatgataactccagcccaaaactcctggaggtggagagtctccgtcgaactgg

SEQ ID NO: 393119 - DNA, 306 bp, Homo sapiens
attgttaaacattcttattttgtgacaattgtagatttacatgtagttgtactaagtaataaagatcccgtatactcttcacctagtctttctccatgtagcatagtacaatataaaaacgagcaaattgacattcatacaatcattccaccttactcagatttaggcagttctacatgtactcctttgtagggtgtgtgtgtgtgtgtgtgtgtgtgtgtgtgtgtgtgtgtgtgtgtgtgtgtgtgtgtgtgtggtgtggagggggggtaggagggagggggtggggaataaaaaaggaaaaga

SEQ ID NO: 393120 - DNA, 366 bp, Homo sapiens
aagggctgagagtgtggaagggaaagagaattaacacaactttttacagtgttcatttttgaagactcacatgagatatttctcacatctcattactatgaaaaaccaatttttttcctcccctaagcaactagtagtttcttagcttatggactctaggagtcaagtaatgcctgtgtatctctctttgctttggctgccaggacactctgagaccatgtttagcccactgcttgacatatggaaccttatcccgccatccgtcatgttcccctcatcagggcattttctgctttggcatcatggtgtatatttctaagtcacttctcagccctttttaaatgaagccaggtataagtgccttta

SEQ ID NO: 393121 - DNA, 419 bp, Homo sapiens
acacagatcagtatgaacccaaagatattatatatctgatatgtaccaaattcatgacagttatattcttcactatctttgagccaggtcttgctgtgtcgcccaaggtggagcgcagaggtgtgatcaggattcactgcaactacaaactcctggactcaaagcaatcctcccacctcagcctccctagacagctgggattataggtgcgtgccaccatgcccagctaatttgttattttttatttataggtagagacaaagtctcgctatgttgccctggctggtctcaaactcgagcccaaagcgggtggtaaactccatctaaggctaaataccggcacgagaccgatagtcaacaagtaccgtaagggaaagttgaaaagaactttgaagagagagttcaagagggcgtgaaac

SEQ ID NO: 393122 - DNA, 364 bp, Homo sapiens
tcctggcaaggaagttacactggggctcaaatcaggctctagcagtgcaaggttagggaaggggcagggcctgcctgagctgtctggggtgggtgcaggctctgctggggttggcagagaagaaacaagccaggtgctccagaatttgccaaactcagatcttacacagaatcttataaagatctaaacacaggtttggagtgaccatccctcacatgcagctgggcactgactcctttcccatagatccagctcacctctggggactctggtcaacccaggggcctctcagtcacctgtgggaatacccagtgcctatggtgcaggtcagccttggaccacaccttccctaacctaaccccca

SEQ ID NO: 393123 - DNA, 515 bp, Homo sapiens
tactttgctgaatattgcctagtgaatattaagtatttattctcaccttgcagacatgaacttgtgaattcaacacgtgaagatttacaacttgataaaccagcttcaggaggtaggtcttcagtcttaagtcagattagaagattatgtgaaataattatttaatgcttaacattgattttttaatggtatcttccacatgaaataatattcctctaacatttaattacatgccaggacaggagaattcatgttgtcaaaattctaatactctctagaacagtaaactcattttatttgtattaacccattataaatacatgtaaatgttgcatttatgggtagacagaactaaaagaacaatatttttcctacttttgagatgcaaaagttgtctggcataatgcattgaacaggttattattgaagcttgcaccagacaactgaacaaacattcctcaaatgtccatgatacccaggacataagaggcttccttttagagtatggagccatg

SEQ ID NO: 393124 - DNA, 457 bp, Homo sapiens
agagtcaaagagcaaagattatcacatatttaaaggaaataagagcagatgaaagctgttcctgaggaacgaagtaaagagagtttgagacagtggaagatggaacaggaagaaaaaaaataagataaaatggtgacatctcttaaaactgttttggaagagtcatttacacactatggatgaacagcaatttattcctggaaaatgcttgttgcccaggttgtgcaaattctcagttatggatagatttggttattgatcagtcatactgctttcaagaattttaatgttttgatttcttaaaaagttcccatgtatataaacaaagtccatttacttgttggcattatattagcctcagggtgtttggaggacttgcatacttggagacaagggcattccagacgtcggatgttttcaggacaaccctctcacccagtgagacagattgtatgtt

SEQ ID NO: 393125 - DNA, 632 bp, Homo sapiens
attttaatacaagagcttctggctcttgaaatttactttaagttttttaaaacaatgaataacattaagaggttggaatcattgtgttttggagttttttgggtttttttctcacttgtcccctaagaagttacaggatgccacctctgcaagcagatttggagttttaaaactacatgtttcagatctgttcaccgctgattgactgatgcagccaaatgtaggttttcctgatcagcagatagcctttcatctggtgattggtaggctgcgactcctttcattttatggctataccatcctgtaggaccaaggagtcttctccatcgagccagcagatgagcaaagaaaaggtggagaaaacccattacctcttaatcctaccctaactgtagcataaattgcttccactggcaaaaactaatgacatactggggctgacacagtccttgctgggggacctggaatctgtcctttcatctgagatcccattgaatgtcctataccaaatcccattccaacaagtcccaggtatattccactcttacgggctgcttctcatttcccaaactgagcctggagacattagaaaatagccctaccaactcttcattcctttgctgagctcctgc

SEQ ID NO: 393126 - DNA, 114 bp, Homo sapiens
ttagtccaatctgaaagaagtaatggagagtacttgaggtcgtgctcgagaaccttcctctccacattgccacagtcagaggctctgtggcctgcacagccctccttgtcccct

SEQ ID NO: 393127 - DNA, 516 bp, Homo sapiens
aactaatgttcatctcacactctcagaaaaaatagttgtttgttcattaaaataacctaccatcccctttgccctcaatttcagatttataaaacagaaaacaaaatggcattgtctacccctctccaggtgaatagtatggatctaaaaatgtgaacttttgaccttagttacctaaaaagtattttccttttttttcttttgttgagacagagtctcattctgttgagcaggctggagtgcagtagcatgatctcagctcactgcaacctctgcctcctgggttcaagtgattctcttccctcagtctccttaacagctggggctacgggtgcccgtcaccacatctggctaatttttgtatttttagtagagatggggtttcaccatgttggccaggctggtctcaaactcctggcctcaagtgatccacccaccctggcctcccaaagtgctgggattatagatgtgagccactgtgcctggccaaatttcaaaggatttaaatcatacaaa

SEQ ID NO: 393128 - DNA, 597 bp, Homo sapiens
tgagattccgtttctctctctttctgtgtgtgtgtgtgtgtgtgtgtgtgtgtgtgtgtgtgtgtatagtaaaattacggagttcatgacctcctggagagatgactagcaggaattgcaatggattctgaaaagatttggagaatgtggatatcatgggacgaagccaagacttgcacctggagatgaaggttcaagctgtgttttccaggacgtcatccttggcaagtcactcaacatctctgtgccttaacttcctcatctgtacagttggaaatataacaatgcctgccctgcttatctcatggagctcctgggaggatcaaaattaccagtgtatatgaccatgccagaaatcagttaagtgtgaggcacgttaaagcattttaaagcattatgtttggaaataatttcaagtttacaaaaagttacaaaatgagaaatggtacaaagaatattcatattcattttatccagatttacttattgtttgtagtttaacccatgtattatttattcttattctctgtctcatgtatatatactatatggacatgtggttatatatgtatgtttatacataattttttcctgaac

SEQ ID NO: 393129 - DNA, 123 bp, Homo sapiens
ttgttcagaggatccctcaaaaccgtatcagaacataaacaactctttttacttcgagcccaactctaatatcaaggtctcttgccaggctgggcatagtggctcacacctataatcccagca

SEQ ID NO: 393130 - DNA, 429 bp, Homo sapiens
catgagccaccatgcctggccagcagatattttcttatgaatatttttattcttagtatactgcaggatttggtttttgtttgttgacatttataacaatttgaatttttactgtcacccttaaaagatgcctaaaagacatgcagaagtgttgtcaaaaggttaagtcccaacagagagacaagataatacaaacgttttaggggcatgtgcaaggtgctccgagaaaaggtggtaaactgattaaccctgaggagagatttcttttttaagtctgatgaaggcaggaggagcatgaatacccaatgtgctcattatcaagtcccagaagtaccacatgctctgttaaatatttctcctgttttcaagaggctcattttgtccagtcccaacagacttcagcccttaaaggaaatctgggagatacat

SEQ ID NO: 393131 - DNA, 959 bp, Homo sapiens
aaacgtgaatgggtgaatgaaggggtgtatgaaggtatacacaggaacgccacagtcagctttgtgtaaagtagaccagtgaacagattgctggtattgcttctgacagctctgctcctcaggggaaaatggtgaactcactttagaactcgcctttgtcagctccaactagactctggaaggaacacaaatgctcagactttcccatgacagactgtgaagcaaagccagttacacagctaccgtcactaatatttttggtataaagcagttgctaaaattaattccagtctgaaacttgatgaattctcagtcatggaattaacaggtcttaaatgggaaaaataaaaaattagcttgattaaaaataaatgtttgtgctgaaatgtggagcctgtctgtccctaacaaactaaatatgaagtttttcatcttagaggatttgtttgcctttgagtattcatagggaaagtgcacgtttgtaccagaaatttagagacgcactcccagtaagttcttacgagcagtcagtattatcctttttgtataaggcaagcagtcagtccctatgaagagtaagatacaagcctggctcagcagtggcccccctgagcctatctgatgtgcagaaaagtcacgcacacacaactgtcttgaagggcagcctcctttcagccagcacccatttactccctcttattaggccttcctctgaatttatatcaagcaaactatttaggacgcatctgcgaagcaggaagtgtgtttcattttgtttttaatgaggtttcaaactctctcttcccatctctgtccctggatgacagcgcagagttttacgtcatttgctattagacatcttgtggcttgacatcctcgaaggctcagccacccctgggtgtgtttggttaatacagcaagtgaagcctgggcaacatatcgaggcctcatttctacag

SEQ ID NO: 393132 - DNA, 869 bp, Homo sapiens
gactcaggacctctaagtagcatcaaggtaccacagcaatctccctgctatagcacttcatgcagttccagcccaccccgatccaagcacatggcagaactgtacttcctggatctcctgagttatacaggaatatttcacctcttccctattttaaaaaacaacctctgcaaagacaagatatgtctgccatgtgcctgaatgtcaaaatatttgaataaaattgaaaagttgacactgaaatccgatatgacttcttcgacatataaagccagagggagatggccccaagaacaccaggcaccacctgcatttacatcatcgaaatgaaaaagtgaaaaaggaacaaatgtggtctcattactttccataaagggaaagctctttaccacaacaatgcctattataccagattatcaaacacagaatcacattgtaacttctggaaagtatggaatatgtatacacagaacagagccaaaagaactccagacaggtatgcctcaccctcagggactcatgtgttacagaaaatgttgggaaaactgaataatagggacaaaagaaactcgccatgttaaggttttctaaactgaaattattcttacttgttttaatttacttttcttacaatgcttaattctcatattttttaagtaagttgcatttatacctttgttaaatgtaggccttttgatataagaagtcagtttggcagaattgcattgatacatatttgatgacattcgttcaaatattttcattattccaaatagggggaggattccataatagcccctggtttataaaaaatcctaggttcacagccgtggatgagaatgagtgaaagtacctaaaacctactattt

SEQ ID NO: 393133 - DNA, 776 bp, Homo sapiens
gactcaggacctctaagtagcatcaaggtaccacagcaatctccctgctatagcacttcatgcagttccagcccaccccgatccaagcacatggcagaactgtacttcctggatctcctgagttatacaggaatatttcacctcttccctattttaaaaaacaacctctgcaaagacaagatatgtctgccatgtgcctgaatgtcaaaatatttgaataaaattgaaaagttgacactgaaatccgatatgacttcttcgacatataaagccagagggagatggccccaagaacaccaggcaccacctgcatttacatcatcgaaatgaaaaagtgaaaaaggaacaaatgtggtctcattactttccataaagggaaagctctttaccacaacaatgcctattataccagattatcaaacacagaatcacattgtaacttctggaaagtatggaatatgtatacacagaacagagccaaaagaactccagacaggcttttcaaaaaatcttctcccttcccagaagctgccatgttactcataaagcaagctattctaaaagcaatctttattctcttccaacttgttgcttctacgataatgttagccaggaaaccagatacccaagctagaaaactaaactcttaatgagtgaaggtctatggttgctgtcaatgaacgagacagggtctccctctgctgcccagggggagtacagtgtcacaatcatagatcactgcagccttcaactcctggactcaagtgatcctcctg

SEQ ID NO: 393134 - DNA, 109 bp, Homo sapiens
ctaagatcacgctattgcactccagcctgggcgacaagagcaaaacttgtctcataaaaaaggaaaataatttattatagaggagagtggtatattaagaagtttgaca

SEQ ID NO: 393135 - DNA, 474 bp, Homo sapiens
agggtagcagtgggaccttctgctcttaacctggggccagtgctggctctcagaacagtcgtcagatcagggcctgcttttcaggggatgcggcctttgtccaccaccctgcaggtcctggaggatgaatgtggctctaagttaactgaatgttgacaacaaaaggtctgcaaaatgggcagggcaacgccttggggaccctaaggagatggtccccgcagatgctgttggggcctaatgttttctgaatcctttttagggtcacgtgcagtatagagctggctcatctacgcctctgccacagcaaccctgggaggcgaatcttggcatggaaaaagtgaggctcaggaagattgcgtgacttacccaaggtcacgtggcctgtaggcaactgaaccagtccttgaattcagagctgcctgaatcaagctcccacattttcaacatgtgaccacactcctccaagctgagggc

SEQ ID NO: 393136 - DNA, 411 bp, Homo sapiens
aaactgctctgtctactctctcaaattccatcctacacaccaattttaggttgttattcatttaactaggtgatattgaccagcatcaagacttgaaattagtaagaaatgttctggccgggcatagtgactcacatctgtaatcccaacactttgggaggccgaggcgggcacatcacttgaggtcaggagttcaagacagcctggccaggccaggcacggtggctcacgcttgtaatcccagcactttgggaggccaaggtaggcggatcacgaggtcaggagatcgagaccatcctggctaacatggtgaaaccccgtctctactaaaaaatacaaacatttagccaggcgtggtggtgggtgcctgtagtcccagctacttgggaggctgagacaggagaatggtat

SEQ ID NO: 393137 - DNA, 744 bp, Homo sapiens
agcttattaatattttgctaatttgttctcaggctattgttaaatagttactcatttcagtggtccgtgctttttgagaaatataattttggccttggtcctgtaaactgatatctaatttgacagaatagcctggaaagaagaaaggcctttgatgccaagcaagagtttggcaaagtactgtgtatgtgtgtgtgtgcatgtgcgtgtctgtttaaatctaattgtggcaatattttattttatatgagccttttaagtaatggttcatgtacttcagaaacattgtgtaaatttcattattatgagctgagatagatagaatgaatgcttaagtttccaccttgtcttcacttgctgccctcattatagttctaagcaatttgtttgggaaaacgtgtagttcatagaaagtccagtgaaattgaaggtaaattcaataatatacttaaatattcaggcatgttgtggttcctgccacttttcagttttatactttcatcttctgggctctactacagcatttcccaaggtatttgacagcatatctgaagggtcttaatggtctgaggaagaaaaaaaaagattctagtagccagtttatttgagatgctaagtttaaaagagttaggttggttttgatatttcagcactttttagagattttaatttattattaatatgttcatcggtgttcagtaagaggataataaaagagtttgcataatttaccaaacttttgac

SEQ ID NO: 393138 - DNA, 277 bp, Homo sapiens
tgacctggagagtgttgatatttttggattagctaatgataaagttaatttccttagtcataggtttgctaaaaatggcttcaacttggagcagccactgctgccatcacaagtatcccttaaaactgcattctgcccttgaaaaaggaataaaccttatttaactgatctttcccatctgttgctgtatcagcaatataacagaaataagtacggaatttttttagtaagaaagactgcttagcttattatgtcctgttaagacatgatcagaatg

SEQ ID NO: 393139 - DNA, 637 bp, Homo sapiens
cccaaaatagctctgtcctcatgggttcctcaccccctccctccagaacagcttgagacagtctccaagctgagctggatgggctaccttagaacccgtaaaacaaggggctttgcagtgacaggagcaatccaggacacctctatgtgagaccctctattttctaaccaattcacgaatggggaaagccgctgggaggtaatggagtaaaggataaaagtattatctttagaacagacagacgagggtttggattctactagatggtgactgtatgaccttaaagtagttattctctctaaagctcagtttccttgtctgcaaaataggacagctgtagggttgagaggaagcatatatagcagagccaatactgctgctgtgacatagtagacggtcagggaatgtttgttagttgagtactcttatttctctatcaggtaaaaggttggcccaaataccaatgaagttccttcctacttaaaagtaagtccaaggctgggtgcagtggctcatgcctgtaatcccaatgctttggaaggctgaggcaggaggatgatttgaagccaagagtttaagacgagcctgggcagcagagcaggaccctgcttctataaaaattaaaaattaaccaggc

SEQ ID NO: 393140 - DNA, 460 bp, Homo sapiens
agctcctcaaagcaacctggaaatatttctccaaaggcagtccacctaaagaggtcacctgaggctcatttccatattcaaacatgctggtgaaatctgtggaaattatcattcctggaaatttttgctcaatctgtgccagatgctgagctgtagattccatatattttgttatctcgattttgatccaggctagaatatctaatttgtcctcgttggcattgaaattacataggtaccaatttttctgaccttataaccatcctacaatggcttagaatcccagggtaaaggcaaatgaggagacttaataaccactatgtttttaatcatttggtgcttactagctgttaagtactacctaatcatgttacctgtattagcttatttaatcaccacaatgactttatgtggtagatgatataatttttctcattttatgaaaaatgaaattgtagcc

SEQ ID NO: 393141 - DNA, 1579 bp, Homo sapiens
gccaggatggtctccatctcctgacctcatgatctgcctgcctcggcctcccaaagtgctaggattacaggcatgagccaccgcgcccggcccaaggattcttcaactttacataggatactatttagaatacaaatcaatacgcataagctcatagtcttctcttttgtagtaattaacaagcacttcccatacatttctttgcaactctttgttaccacaaagtggttttccactaggaaaaataggttaggtggactatgatcaaaatcatgtgagaccactgctctaaattattacaaatcctaccttatgcattaagtatcaatgtaaatttcacaattaagacctctttattctataaaatatataagaggatacccagaaacagtcccatagaaaagcaagtgattaattcagcatgttatatgctgctataatcagtcaaaatatgtcttcgaatgcaatctaagccaacaatataaaaaaagtcagaggcagtgaactaaggacctactaagagtacaaaacgaagtcacaagtaatttcacccttgacgcctagcacaccccttgcttctgttcttgttctctattcttagcatctctctgaggtttattaatggttcctggatctcccagctggagcttctgctgaatccaaggcactacccttatcaaaagaaagagatgtgagaagtaaaacggatacagacaaatttaaaaataaaaagaaaacaacagaaatgaccacaatgtgaaagagtaacaaaaactacaaacagaaaaggtattagagagttactgacaaaataaacggcatgagaaaaagtaatacagactttttaaaagaccaaaaaaaaaaaaaaaaaagaggatgaacctacaagcactaagggatttaaagccgtccatttctaacatgtagtttgtgaaaatgttagcattggaggaatgttaattgaatttcatttaaccaggccaactaccaatttacaggaaacaaaacggcaaatgaacatggtaaatgacaccacagggatacagtcatcaaaatccagactgggaaaccttccacaaacaaattgtaaggcaaaaaaaaaaaaaaaaagactaagaggaatctatattttaaaatagattaaaaagacacagcaacaaagtaacaatttgtaaactttatttggatcctcattcaaataaataaatataaaaacaaggatgatctttatgggaaaattaggaagttaaacactgactagatatgtatatacacatatttttagagacagggtctcactatgttgcccaggctgcattcaaacgcctgggctcaagcgatcctcctgcctcagcttcccaagtagctgggattacaggcacatgctgccatgcccagcttagatacttaataatatttaaaaattactgttaataatttagataggtgataatggtgttgtagttatttaagattctttatttttcagagacgtaaactaaaatacttatgaataaaataatatctaggattaaaaataattccaggggttgcagcacagataaaacaggatcagtta

SEQ ID NO: 393142 - DNA, 1575 bp, Homo sapiens
gccaggatggtctccatctcctgacctcatgatctgcctgcctcggcctcccaaagtgctaggattacaggcatgagccaccgcgcccggcccaaggattcttcaactttacataggatactatttagaatacaaatcaatacgcataagctcatagtcttctcttttgtagtaattaacaagcacttcccatacatttctttgcaactctttgttaccacaaagtggttttccactaggaaaaataggttaggtggactatgatcaaaatcatgtgagaccactgctctaaattattacaaatcctaccttatgcattaagtatcaatgtaaatttcacaattaagacctctttattctataaaatatataagaggatacccagaaacagtcccatagaaaagcaagtgattaattcagcatgttatatgctgctataatcagtcaaaatatgtcttcgaatgcaatctaagccaacaatataaaaaaagtcagaggcagtgaactaaggacctactaagagtacaaaacgaagtcacaagtaatttcacccttgacgcctagcacaccccttgcttctgttcttgttctctattcttagcatctctctgaggtttattaatggttcctggatctcccagctggagcttctgctgaatccaaggcactacccttatcaaaagaaagagatgtgagaagtaaaacggatacagacaaatttaaaaataaaaagaaaacaacagaaatgaccacaatgtgaaagagtaacaaaaactacaaacagaaaaggtattagagagttactgacaaaataaacggcatgagaaaaagtaatacagactttttaaaagaccaaaaaaaaaaaaaaaaaagaggatgaacctacaagcactaagggatttaaagccgtccatttctaacatgtagtttgtgaaaatgttagcattggaggaatgttaattgaattgtgaacaatttcacttagggtccagttatatccttggggacaaaagataaattttcatttaaccaggccaactaccaatttacaggaaacaaaacggcaaatgaacatggtaaatgacaccacagggatacagtcatcaaaatccagactgggaaaccttccacaaacaaattgtaaggcaaaaaaaaaagtaacaatttgtaaactttatttggatcctcattcaaataaataaatataaaaacaaggatgatctttatgggaaaattaggaagttaaacactgactagatatgtatatacacatatttttagagacagggtctcactatgttgcccaggctgcattcaaacgcctgggctcaagcgatcctcctgcctcagcttcccaagtagctgggattacaggcacatgctgccatgcccagcttagatacttaataatatttaaaaattactgttaataatttagataggtgataatggtgttgtagttatttaagattctttatttttcagagacgtaaactaaaatacttatgaataaaataatatctaggattaaaaataattccaggggttgcagcacagataaaacaggatcagtta

SEQ ID NO: 393143 - DNA, 163 bp, Homo sapiens
tgcacacactcttgcacacgctctcccacaaccttcatttgaaacaccatcacctcttgccaacctcctaactggtctctctgcccacagtgttctagctctccagtccgctcctgaacaggcagccagagatatccttccaaaatgcacattgaatcatggc

SEQ ID NO: 393144 - DNA, 329 bp, Homo sapiens
tgtcatgcacacaaatattctccaggatagaccacaggctaggccataaaacctcaacagaatttaaagagaaatatacaagtatgagtagggagtggtggctgacacctgtaattccagcactttgggaggctgaggcaggaggatgcttgagccccggaggttgagaggctgcagtgagctgtgaacatgacactgcacaccagtctaggcaagagtgagaccgcatctctatttgtattaaataagctatattaaaaaaaaattacactcctgaagacctttcaggcagggaaattctcaggcaatttactcactgtagcttcatg

SEQ ID NO: 393145 - DNA, 1027 bp, Homo sapiens
gaggaccaatgtgctccagagggcaactcctggtcaaggcaggaaaacagaagaaaccagcatgaaatctgttcctgagacaataggaaagcaaggccatgagtactggccattgctgctgcagagagtagaggggttgggagggtacttgaaggggagaaagggagaaagggaagaggatattgatgttatcctcagaggctatcctcagatgtgtctgtaaaaccaaaagtggttctgtttaaagaattaaatcttttggacaaaatagaagtatcaaagactaagaggaggaaaatcagaaggggtctgtctgttggaagaaaggatgttaatatctttcttcacctgttaacactgttcccttgtctcagcacccctgctttcctctgctccatcttcttccttccctctttcttcttggccctagtgcctctcaccttcctcccatccctgtgtccctgctcttccctggccttcatgatgcatgctgtgaactggaaagggacacctaagtgcctttgctctcagggtgaaaggagttagtgttctaatttctaaatcttcccgtgatatttaatttgattttattttaataatatcctttatcaaatgttttgttcatgaagaatacttagatataagagaaaagaaaaccagaataagtaagtataagaaaaagaaaaccagagtccaaatgaatggatttaaataaacgaatttatgaatagacacacaagcaaatgactcaaaagccaagcctgaattttgaaatcatgattgtttcatggtagaaacccagtaactttcccatcttctcatcttaccatcttcccattttgcaactggccaggactgaaagtggtgaggaagtgttctgcacaggaagggtccggtgggttttcctggcaggtggcagcctccagtcttaacccctaaccatttccctctacctggcaagcatattctgggctttgtgcaggaggaaccagagcagagcagagcagtttccaaactgttccagcat

SEQ ID NO: 393146 - DNA, 497 bp, Homo sapiens
tacctacctcttcacctccttcacatggaccttatttcatagttagtctcgaaacaaacagtgaatctgttctttcctggaatcaaatgaatagggtggaggtaggaggagaagaggatcacagcaggaagagaggaggcacagggactttgaaacccgtcctcctccacggtcaagtgccttacctcctcctaccaagtgcaggggagaggggggaattcaaggtttgctgccttccctaaatgtagaattttttaaagtattattttaaaaatactgtttacatttagttacttccctatttttgctgatgcagacatttttatacagacatttttagcaaatgtcttttaaaaaagtgaagaattttataactgcagaatttctatgatccaaagagccaggggtgcacaggcctttgcatcaggaaggggaattcagagatggatcctctcatttgatgggtgagaagactgaggcccagacagaggtatcca

SEQ ID NO: 393147 - DNA, 304 bp, Homo sapiens
aaaaacaaacaacccatggagagtgattctgacatcaaagtctaataatgttacatgcagatgataaaactaacctgctcccttgaattctagatgataggatcaacacaagtttgttttgttacgctgaaggtctatataatcatgtaactagctgtgcaattaagtctgctatgaaaatgcagtgaaaacacctgcaaacaacagtgtgtggggatgtgtgcattttaaataaccagaagtcattttcaaaagtgaaagaacattgttaggaagctggataccacacctaagtggtttaacg

SEQ ID NO: 393148 - DNA, 161 bp, Homo sapiens
gggtatgaggggagtgggggacaatgagaaagaattagggttaaggggctgtgctatgagaggggctgaaaataagggcgttggggaaatagagtgagccggtcagataggcggtgggggtgggcaagtgggatacttgggattgagatgatgcagaggtt

SEQ ID NO: 393149 - DNA, 229 bp, Homo sapiens
cagctgctgtggaaaatatttaggcagtttctccaaaaagttaaacactgagttaccatatgacctcgcaattctatttctaggtatatatccaaaagaaatcagaggatcaactacttgtacaccactggtaagagcagttttactcacaatagctaaaatgtgaaaacaacctacatgtccattaacagatgtagtatacatataatggaatatacagccttaggaa

SEQ ID NO: 393150 - DNA, 220 bp, Homo sapiens
cctgccttctctttctccccacaataattcccaagaaaatagtcatccaaagggactctttgccctccaagaaactgagttacggcctgataggttagtaacaaagacttaggaccttctcgtggagatggtggtggcctttcttcgcggccatgcaagtcacagagaagcctagatgtggctacagttttaaggagcaaagtaaaactccatccctcta

SEQ ID NO: 393151 - DNA, 322 bp, Homo sapiens
acctgaacctgaaccacccccaccaccacccacacaacgtgcactggaaagaaacaattctcaaggaaaagactggagatgcacccacctttggttccaatattttcatgactgtgccttgcagaatcatagttgtggtgtctcaaacacaacattgaaaatgaaagagtcaggccaggtgcggtggctcacgcctgtaatcccagcactttgggaggccgaggagtttgagaccagcctggccaacatggtaaaacaccgtctctactaaaaatataaaaattagctgggcgtggtgggacacacctgtaatcccagctac

SEQ ID NO: 393152 - DNA, 311 bp, Homo sapiens
gggaagttttaggtagctgggagaagaggggcttctggctggcagatggctggcggttcctgtgctgagtcctgaacacgtaggccccaggggagctcagcagcagggctgtgcccccccaacacacacacacactcggcagggaccagaaggcagctccagggccccactgccacctggaggcttggggtgtggcaccctcagccagaagcagtaggggactcccaaggatgtggaggggcagtgaggcctgggagaaggcccaggctgctcgcaagcccggcctctgcacggatacgtttcagctcacg

SEQ ID NO: 393153 - DNA, 187 bp, Homo sapiens
tttgaggaagctgggaggaaaaggccttctctgcaaacctgccagcaattacagaactcactcagactctgcctggatgcaggctctggtttatgtctccctttgggacatctcttctgctttatttgaaacttccggcttcattaataggtactcttaatactcttatctcagcatgccttctggg

SEQ ID NO: 393154 - DNA, 248 bp, Homo sapiens
gagcctggagccaggatcagacctgccctggtcccctccccacccctacctgataggggagcaagattgggttctcccaaggacctggggacttcagcaggacacacaatctgctactgatggcttctgacccccgagggcaagggcttctaagccggggcgcttgtcggatttggagagtgaggaatagcataagtgtttttgctctgggctggatgctgagcacctgcgggaggtgcgctgggcac

SEQ ID NO: 393155 - DNA, 464 bp, Homo sapiens
cacgaggcttaccagctagggaggaaggaatctgtaatcattttagtatagagaggaaaaaataatctgagcacttgtggtccctccaaaggcaggattatattattgatttttagtctgttcaagctgttcaagatcttctcatttaaccccctcattttacagcgctggaaacgataacagagaaggaacgtaagactttcccaaaggcacatagctatttgtaataggactggcatgtgtacagttatatgaaaattctactaaaaatcattacaattataaataaaattgggtggagggtggagaatcaaagttgagggttcaggtacctgggataccttaggtttgattctccttcctgtcagtgctatatatgtgacatgattgtacatctcctatacttactctcccatttacattttttcaagaaatcatcttagggactacctcaaatcctgtgc

SEQ ID NO: 393156 - DNA, 366 bp, Homo sapiens
cgacaacaacaaaacaaaaaaaggtaggaggttaagaaccactgtttcggtacctggaattaacataaacagcagatcaatctggaagtaatcaacaagtgccaacaagcctagagggactaggccagaggcaaaaactatcctgccaatgctttccacaggataactaaggaaaacttaatagctactttttaaaaattcaagtgaaaatacctgttaagatggaaagaaactgacttgcttacaacttagattatctactttattgaacacagatgtatcaattagaaaatcagcactgttttataatacatactgaaataatatctgggcatattagaaaaactaagtcaacatactctctct

SEQ ID NO: 393157 - DNA, 478 bp, Homo sapiens
  misc_feature (50)..(50): n is a, c, g, or t
gcgaattcactagtgattgtgagctgagatcgcacccagtcgaacttgtnttcataggctacttccagtcaatgtttttccacttctcatggagtatgaaaaccttactattctatagatgatctctttacccttcttccctttatcccataatgttttggttatcttatgtattacatttacatacattgaaagctctatcagacagtactggctttgtttttaattgtcaaacatattttaagagacttgcagagccatctgtaacagatattcgccgtttctgtaactcttgctttataatgttctgggtttccttctggttaacacttcctttctgcattaaaaacttcttaagcaattcttttttttttttttttttggagacagaatctcactctgtcactgaggctggagtgcagtggtgccatctcggctcactgcagcctctgcctcccaggttcaaccaattctcctg

SEQ ID NO: 393158 - DNA, 342 bp, Homo sapiens
gagatcgtgccactgtcctccagcctgggcgacagagcaagactctgtctcaaaaagaaaaaaaagataaaacaaagtaacaaaatatgacctgtagagagcttttttggattgggcgttcagggaaacctgctttgagggggtgagattttagcaaagatctgaatgatgataataataagtgtgtcgcataagaatattctaggcagagagaacatgagatgcaaaggcgtggaggtaggtaagagcttgggtgttcatggaacagcacagaggtcagtgtggccagcagaagatgccacagagagagtggggagagttgaagttgagagggaggccgcc

SEQ ID NO: 393159 - DNA, 358 bp, Homo sapiens
tgtgcagctccctcgctctcctggtctctggcactatccacaaaccatcacggagtaaggagtcattgtttccctcctgcctatatatagacatggtctctgtattaaccggattactgaccaaaatgagcctatgccgggacaagaaggctatcaagccacaagagaggtgctctgaagtgaactcataagagctggatggcactgacagaaaactctggcttctttggctgaccagggttcagcgtgcatttctaggtacccaattacatccattggatgcatcttttggagcgaaagttattgccttattaagcaaacctaggatttctttttttttttttttttttgagacaga

SEQ ID NO: 393160 - DNA, 300 bp, Homo sapiens
tgcttattagtgccaggatgttataaaaatcatattatttatcaccactcactcccattttgttgatagtgatactgagctcacagaggttacataatgcccagagttacaaaaccagccagcaacactgctcctccaacagaaaagctcttttgactacaccattctgccctccaaagacccctcaataaatgcaaactaattgtaagtcttttttttcccaccaaatttcttagattaaaattaggagagttgtaatgaaatattcttaacttgtggataaaggggaaaggtcctggg

SEQ ID NO: 393161 - DNA, 562 bp, Homo sapiens
tagttaccctttttttgtttctgtgccaagagcagctaatgtctactcacttagcatggggattcacatacattttaaataacaaaacacagacagatattctctcatattcacaggtgaaataaggtaactgaatggtaacttagctgacccatgactgcaggtcaggagaaatatgcggaggccttagaaaagtaatcatctaaagatgatgtgctctaatccctcatcccccaagatgaggaaactcagatccgcagtggttgcaacattcagttaacaggggaaaagctagttagtaggaaagccagaacccaaacccaggcatgcataacaaggcctagttcaatgaagagagcattatccaaaatcaaacggaatgaccacggaattctcctaagggtctacttcctgcacccatgtgcacctgggcttctctgccaggctttgtggtcatgcgccctcagacacaggtgtcacctgatatcttctgcttcaatatattcaacactttgagcaggtggacatgactctcagcttgagactaagttgtgtcaatgat

SEQ ID NO: 393162 - DNA, 291 bp, Homo sapiens
tggcctcccaaagtgttgggattacaggcatgagccactgtgcccagctggcttcttagttttctttccatttctgttgtctacttcaatcacagtatcactgtggaatgttgacagcattgtcaccttcttggggtaagtgctgcagttgcaagcatcactggcgagtattctcagggcaaacaggaaaagggttaaagtaagaatcagagattaagagggacgtgtaatgatgaaaaatataacagttctaaatttgtatgcatctaataacagcctcaaaatacataa

SEQ ID NO: 393163 - DNA, 183 bp, Homo sapiens
gaggcagagtttgcagtgagccatgatcgtgccactgcactccagcctgggcaacagagtgagatcctgtcttaaaacaaacaaaaaaaacaaacttgttttcatttagactcttcctggcgttggggacctattggaataggtttagtgtgaactgagagctagaagtgttagaggagagag

SEQ ID NO: 393164 - DNA, 748 bp, Homo sapiens
tgtcaccaaggggccagagcttccgcgttggttacggagtgactgcaagtgccatcgggctgtgcttcccccctgctggagggatggtctggaatctgaatgctccctgctttaacttaattctctaaagctgggctttttctaagttgtaagtctgctggaaaagatgttgttggagctggctgtgagatgtccattgtgttcattgggaagaaatatagaaaggaatcacccggctcaaatcatatttcctaagggcctccaagtcaatagtccatgaaagtctgaactcttcgctttatttttaattaattcactttaacagttttactcattcattcactcacaattacttttttttctcataactaacagctaaagtaagaaaatggctaaattaaactatgtctggttttataaaacacgatttccctttttgcattttaggaacgggcactacaagtgcctttagtttgttctttaaagttcccagttccattactccaaaggttaagagatctgcctgccccgaaacacactcaattccctattattattgtctttggcaaccagcatcagagattaacactgtacatgccacctctgcacaaaagcaaaagcgtaagtccacgacagtgactctttgttattaattgttattgttattgttttggggagatccacattatcttgtcttcaagttaaaaacagtaattacgctgttcctgctgacaatgtcagtgatgag

SEQ ID NO: 393165 - DNA, 390 bp, Homo sapiens
gaagaatgattctttggctaccaaaaactatttagtttattttctaagagacttgcattaatatgtttgcagaaaaattaaaccagaacacctgacttctttatttcccaggagttttcctccacacctgcccccatcaggggagaaaattgatcaggaggtaccacccctttccacaccattcttgaatctattctacagaactctctcacatggtctagcaatatgtttaaggtagaaccctttttctatcaatatttcttatgtgttaaatttgcattattatatgttgactagaaattatatattccttcttaaacattaatcataatgaatctaaaaacctaatttatttcaaccaataaatttctctttaattcctgtcctcaa

SEQ ID NO: 393166 - DNA, 724 bp, Homo sapiens
catttgtagagtgcaggcagagtagatttagcataattcttaaggaccctaggatttttggaatgctaaatgagcattggcttcatcttaaagtcaccagctgcaattagctctgaagagtcagccttcctttaaagccagatactgacctcctatgaaagtacttgatggcatcttctggtatgaggctgtttcctctacattggaaatatggtattttgtgtagccatcttcattcatcagtgatattagctagatcttctggataacttactgcagctctacattcgcacttgtaccttcagcttgtacttttatgttctggaggtgacttctttcggtcaacctcatgaatcaacctctcctagcttcaaatttttcttatgcagcttccttacttctctcagccttcactgaattgaagagaattaaggccttgctctggattaggctttgatttaaaggaatgttgtggctggcctcagcttctattcagaccacataaagttttctccatatcatcaataagtctgttttgctttcttatcatttgtgtgttcactggggtagcacttttaatttccttcaagagctctttctttgcacttacgacattgctgtttggtacaagaggcccagctttagcttgtcttggctttcgacatgccttcctcactaagtttaattatttctagcttttgtaagtaagagacatgtaactcat

SEQ ID NO: 393167 - DNA, 572 bp, Homo sapiens
  misc_feature (35)..(35): n is a, c, g, or t
gcacttggggtggccaaggtgggtgggtcccttgntgcccaggagttcaggaccagcctaggcaacatagcaagacctagtctctgcaaacaaacaaacaaacaaaaaacccaaccaaccaaccaaacaacaaaaacaacaaaaattaaagattagccaggcatggtaaaatgcacctgcagtcccagctagttgggaggctgacacaagaggatcacttgagcccaggagttttgagcttgcagtgagccgagatcgcgccactgcactccagcctgggcgacagagcgagactctgtctcaaataaataaataaataaattaattaattaaaaagtcatccttttcagttctcaaatggcagaggtctgcatcctgccttgcgaacctattaacactcctttctttctttatgtggggtttcccttgggcctctgtggtcaggctattgtttgtctgagtttgtaataagcgtgtaacagcctccaatttgcctcaaagacaagtggtgttagttggttactagggacaggagacctttggaaattgtgattggaagctaactgttccag

SEQ ID NO: 393168 - DNA, 450 bp, Homo sapiens
actttggaacggaggaggcctttagaagaaagaaggaagttttagatcatgcctgcaattcagccttgcagagttgtttgcctgtttgaattttctcttatctctatggaacattgactacttcctcagaagcttatacactgttagagtactgggtaaaatttcatttgaaactacgggaactcctttgctgacctattgtggctgttcctaatgtttcttggcttcatgctgcttaggaccccatgggaaatcttggcagaacaccctgttatacatctatactgagtgcctctcacagcttcccttcacatcagatttttctgtttgtcacccgcttttgccccttttccttcttgtcttaaagagagacatccttcactcctgtctctgaggctacctgtctcctgtgttcttgatcccacgttgtcccttgggacactgcttcat

SEQ ID NO: 393169 - DNA, 239 bp, Homo sapiens
tggggtggatacattccaggcaggaggaacaacttgagcaagtcaagaaggcatcctacaacctagcagttgggagcaggaggttagttgtggatatggcaggtaaggtgagggatgaggctggagaattgataccaggagggcctggtgtggagcttccagaagttggaccttactctgtagcagtgtggacccctggagagttttagaaggatccccctggggattagagtgagact

SEQ ID NO: 393170 - DNA, 380 bp, Homo sapiens
caagcttgtaggaaaacagcttctgaatgaacatcttgttctctgactagcaagaagtatttctaccaagacatacaactggttatgatgtcttcccagtggaccctgccccctatagtgaggggctctggtaatgctgcattttcatttatcctcagtgatttgtcatttgcaaacaggcaggttcatgcgcctccatcctctcctttaggcaatgggtgagagaaaggtggttttaagcatcaaaaacttaagtgtgttaagaccacctccaataaaaggcatgaccctgggcttcaacacctaatttggaaaagatcatgaatcagacgatcttgtttgcaaacctattttgtgattacttttcacattctgtttta

SEQ ID NO: 393171 - DNA, 311 bp, Homo sapiens
tcccagggacttgtggacggtcatctgtctacaccgagccccagactgggcagctggctgttgcagggagtttgaagacctgcaggaaacccttgcctttgaataaggtacacagagagaaaatgtcctctcttccaaatacgtcttgccaaaatgcagggcaaccttgcctctctttctccagtgagggcctcgtgtactacagacttgggtttctaaatacctgacctagagtttcagatcctcactcaccgtccaacagaaacgtaacgtgagccacaggggtaccactaaattttctagatgctcag

SEQ ID NO: 393172 - DNA, 364 bp, Homo sapiens
tgctgggattacaggcgtgagccaccatggccagccctagatttttgtttttaatttttaaaaatattggagtgcacagagtatatctggcttcaatcatctcttttcattcatgttgctgtttgactgaaatcctctttctcctggcggatgggattggcgggtggtcctattttctaaagggaggaggcatttcctatttaatcttgaggatacagggaagatggtatagagttaagcatcaacccacttctctgtctcttctttttgcctcttctttctgcttcattggcacaaaatactgtttccattaagatgcttaaaagtgatgcaggtgcagttctgcaaatttagaaaataatca

SEQ ID NO: 393173 - DNA, 406 bp, Homo sapiens
gcacgagagattttcttgagagtgaatcattgtcaggtgacttaacctttgtcatctcgtttttttctttttgtttttgaggtagggtcttactatgtcacccaggctggagtgcagtggcgcgatcatggctctctgcaactttgacctcccgggctcaagcgatcctcctacctcagcctcccaaatagctgggatgagaggcacacaccaccacggttatctcatatgttttattacttttttgtagagatggagtctcactatgttagccagactggtctcgaacttctgggctccagtgaacctcctgtctcagagtcccaaagtgctgagattgcaggtgtgagccgccacgcccagcctatcttgttcttaatttaaaaagaacagttaagtttttgta

SEQ ID NO: 393174 - DNA, 334 bp, Homo sapiens
aataagccctgtatcacctccgtggcttttatctgtcatccatgcccaataataatagacattactggtagaaaggttgtgtattacatttacattttatttttgtaatttcaaattattttagaatagaaaatatattgtgagagcacctaaaatgctcaagaatgttgcttctactaccctctctggaattgtgtgtaagtatttctactccattagtagaatcctgtatctggatttatggaagttcatgatacaaaatcagcacagattggaaggaatttttttctttcaggctggctcatttcacttaattctgaagatgaacatccaa

SEQ ID NO: 393175 - DNA, 271 bp, Homo sapiens
tttacatttaaatcatgaaagaaacaccattctctagaatctttttctagaatttcatgtactttataactgatagacactgttaaatctttgtttcaatggatttttaaaaatcatctccttctgtatttgtttaaaatataccaaggtacaatattttattttcctctgcacagctttctacttttttaagagatggaggatatcttagaaactttgtaatctactttattttataggtgaaggaagtggtttattttaatgtagtata

SEQ ID NO: 393176 - DNA, 397 bp, Homo sapiens
cacgagccaccgtgctcagcctgtttgtttgttttttgtaacaaagtctcgctctattgcccaggctggagtgcagtgggctatctcagctcactgtaacctctgcctcctgcgttcaagtgattctcatccctcagcctcctgagtagctgggattacaggtgcacaccaccacacctggttaatttttgtatttttagtagggacggggtttcaccatgttgaccaggctggtgttgaactcctgacctcaagtgatccgtccacctctgcctcccaaagtgctgagaacaggcgagagccacagcacctggccagacatagggttttataagagcaccaatgtgagacagtggtcagggaaggctttccagaaaagatgacacctaaactgatc

SEQ ID NO: 393177 - DNA, 264 bp, Homo sapiens
gctgttgacagaaaacctgagtaggtaatttatgatgaacagaaatttattcgctcacagttctggaggctgggaagtctaaaatcaaggcgccagcatctggtgagggcctttttgctgcatcatcacatggtgaaaagcgagacagtaagagaatgagagaaagcacgaaggggccgaactcatgcttttataacagcaccaatcccacccatgagagtggagtccctgtagcctaattatctcttaaagatcccactgctt

SEQ ID NO: 393178 - DNA, 268 bp, Homo sapiens
gggcacaggtcggggttgctgggagggactcttctgggccagctgcctccatgcagcacagcttcctcgaggccagtctcctccctcatcacccttcaggccagcactggctcaaggtgtagctgccctcctcggggccgctcatgtccagggctgcagagcaagtgatcccgtgcattcacttgcaaagagcccctcagccctgagctgcctcggaagcccacggtaaggggtcaccagcagcactcttcccaggccctaagtcatg

SEQ ID NO: 393179 - DNA, 236 bp, Homo sapiens
atggatttttgattttgtcatctcttcaaaccccaccttccttgtatcatcacaatggtgataaggtttcaacataagaattttgtggggatacaaacatgcagacctagcaggtaggatttaactttcctaatattttgaactcagcatggccacatgactaactttagcctgtgaaatgcaaggagatgtgtgtcattgctaggcagaagcttgcagcaccattgcatgctttg

SEQ ID NO: 393180 - DNA, 288 bp, Homo sapiens
agcaccacttgcccatcttgctcctgagaccaaatggcttcttcacagaagaggcagccggcatggaatcaacctcaaccaccatctgcttttaacagccaggagaagccagtagtagccaacagatcgcgtctaccaaccagtttcaccaactagcaggtaactccgggtttccaatctgtttgaagagaaaagtcaatcccagccaaaacctgccaaccccagcaggggattccagcccagcccaccccacccagggaaaacccacacccacccgaggaaagccca

SEQ ID NO: 393181 - DNA, 308 bp, Homo sapiens
gtcttaacagtcaacaaattgtcaatgaatacttaatacaatgcaccatgccaaaaattatgcagaaaaccaagaaatacatgaggcaggatgatgccatttttgttaaaattaacaagaaagcacacatatatgcatggccatatgtggttaaactgaaagctctacaccaagagattaataagaactaacctttggtgatgggttctgggtgactttggtatttttttttttttttttttttttttttaaaaaggggcccggggaccccccttagagctacaccgtgcaggctttgaaagcttggg

SEQ ID NO: 393182 - DNA, 442 bp, Homo sapiens
tttcctatttgctgtgaatctttggtccttatttgatataaattaccttaagcaatctttttctctttaccacttatccttggataataaggacttcttatttaatatgttataacaccttcagcaaacattaaaaagtcttgagaataatgcaagaaattatcatttgcccaaatacatagcataatgaattatgtgagaaattagaatcactggggaagggcttcatagaagagatattgtttaagatgggccttgaaagatgagttggatcttgatagagaagaataacagggcgttttcagaggtacagtgtagaccatggtgttaaccagcgagtgaccactgaacgttaagggaggtagtgaagagactagtctatttagagagactagagtaatggaagataaagttggaaagtaaaggcagagccaaattaaag

SEQ ID NO: 393183 - DNA, 388 bp, Homo sapiens
aggaccagagtagtgcagtgactttgccaaggtcacacagcaggaggctgggcccagcacaccctagaccttcctctgcttcccttgccccacttggaggcacaggccgatggggcatctgggagcccacaccctccctgcccaccaggtgtctcctgggccagtggcttcgtgtcctgggcacgtgtcctgtgcacagcccggtgggggcagctggaggggtctccaaggcggcggcttcctgtctcagagcaggatcccccggcatgtgctccagcaggcaggctttgtagtgggattactaatggggcagatcaaaaggatgttcctatttcactcaaggaaataaaatgtgcacgcagccgcctttctcacgctgaactcaagt

SEQ ID NO: 393184 - DNA, 243 bp, Homo sapiens
gtcctgagagggcagggcaggtaggggagaagcggttgggttctgggcctgctgggcagtggagccagctgggttggccatcagggttctgtcgtgaacagaggaggacaggctggacacctggaaaagatggcgcgaggccctgcggaagcccctcccactggagagctctggtagtccagtgaggtcggacccatcctcgaccgacggtggatccgtctagatgtcgacgctgcagtgcat

SEQ ID NO: 393185 - DNA, 379 bp, Homo sapiens
tcaaccacctgcctcagcctccaaaagtgctgggattacaggcatgagctgctgtgcccagtcaaacatcttttctttataaattacccagcctcaggtattcctttatagcgaagcaaaaaatggactaacccacctcccttccaaggatcttgctatctatcccttcttgccctcagctactcactcccacagtcatataccagatctcatcattagacaattgtaatccctacacaatttagttccatgtatcctctctctaaccactattcctcatctttccaggtcattctctctagacccgaattccaacaacccttcaaccacactggtaccactaatctacagattacatcttctttctactataccttga

SEQ ID NO: 393186 - DNA, 561 bp, Homo sapiens
gacagagggggtggggggagctgtatacagacagacagacatggagaggtgggatcgtgttgagagagatcaggaaggtctcgatgggcaagagatgcagagaagacaagaggttccaagagcacgtgcacggagttgggtgcgatacccacgagaaagaacatcggagttactggacagggaactgaggatcttggaagctctgaccaggcaaagagggagagactgtgacctagagacagaagcacgtgagcaaatatgagaacgtgcacgagaacaagcgagaagaaccagtcacacaaaacacccatgaagaaagcaacacgactaaggacagacacaggaagtcccaggtccagcagctcagggaggaaggcagggaaggaggagaagcaccgagctgagaaatgggtaagaaggggctgccccattttgggccgcagaggagaaagggggcaaaggaggtggccagaaagggcctgacaagttcaaccggccagcagctaccaccctgaccagatccgcattccagcccggcccctcacacactcagctcccact

SEQ ID NO: 393187 - DNA, 331 bp, Homo sapiens
acatgagaagtacagactgaatctatgcaaggccagaagagcttctgagtaggggataagggtaagtttgaaagagcaggttgcatttgagctggactttgaaggatgactagaatttaaatagagacttgggtgatgagggtaacccaagggagttttagatgtaaaacttctgaggtaaagaagcacttggattatctcagaaaggatgtgcagttctggttggctcaaatatggataagctgaattgcagtaatgtgaggtcatgctcagaagatatgggttggagcctactagagttagagagtttttggggtctttttgtttgttt

SEQ ID NO: 393188 - DNA, 270 bp, Homo sapiens
ctcttgacactctccacagtgctccttcccttgaagcacgctggttggggaggcagaaggaaaagaagagcacgattttgaagatctctctgtgtcggcacacccagcaaccataaaaaagtacaaaactgaacagcaggctcttccatttattaggaaatccacttccagaggaagatactccatggcccctttcagtagctcattgtcaacaatgagcaaagagtcttaactgagctttgagttccaagaataaatttaatttgcctg

SEQ ID NO: 393189 - DNA, 413 bp, Homo sapiens
atcgtgtggacaaggaggcctagaatttggaagaacatatttccataagttatataggccaggcatgacactaataatagaaagactgattgaaattctgtttgcataatagtgagacaaacaggtaatgaagtaaacagacagggagcattctttcccctttcccacactctctcccaatgtaacctgtgaaatagtgagctagagaaattgagacgcagggcatctcaattctaaggtaaagtttagaaatgaaaacatgatgaatatatcatattctacacactgaaaggtggggttccctgtcctcttattttacctgagaatgactgtagccatgcagatagttccaaaagctggagattataggattttttttaggataaacccaataatcccaaacaaaagatact

SEQ ID NO: 393190 - DNA, 421 bp, Homo sapiens
ggatcctgcctcttaaaggcctctagggctgtacaagataggacagcttcatctacgtcctgtctgggggagggtcatacagccaggtgtcaatggcctttatcttaatggccataatggttttctgaaccattttccagggagccttgcttccaagaaattcccctacagtagcatacactgtgattatgcttccagtcacccaaaactaatagtggcatcagtttgtctcggtcaggtcctgttagttattctctgtgatgtaggtgaaaatatgctatagtagggggatgggttgtcaacttccccaaactacatctttctgctggagtcacttgggtctgcaaggccccctcatccatcaggcacaccaaccaggtagcttgggactctcctggcctctgcccacatctattcttta

SEQ ID NO: 393191 - DNA, 540 bp, Homo sapiens
tagttgcatagatacaacttacgaattatatcaaggcttttacacttataatattcattttagggtactattacattaattaaatattaatgctctaagcatattttcatagccttctctgttttaaactccactggagaatattactggaaattaaaaaatagtatggtttattatccatgtcattagtgttgcatttggatgatgaattattttggaaattaaaaaaaagatatataagtagaataatcccctctgggtctcatgtgtttctctaaatagcaattttatatttccttattatttttcctgagattattacatatcttccacagtgtctgtaaaatgctaagccacagtcttaaatattggagatactttctgatgagcttctaatgagatttttaaaaatactgtatgtggtatgaaaatgctcacgcaaatgtagtttgaaaaagactagtatttaatatgtgtaagacatatttataccttacattttaaaaagttaagacaatggagcacattgggatggatagt

SEQ ID NO: 393192 - DNA, 370 bp, Homo sapiens
acatggcaaaaccccatctctacaaacaatatgaaaaattagctaggtgtggtggtgtgtgtctgtggtcccagctacttaggaggctgaggcatgagaattgcttgaacccggaaatggaggttgcagtgggcctagattgcaacactgctctccagcctgggcaacagagcaagattgtctcaaaaagaaaaacagtattgataaatgttgaagtttactgatggtacatgtgggttctctgtattatttactcttgtttatatttgaagttttccatgatctgttaaatattaaaatgagaacttgaccagcagaaaaaagtctttaatacataacttacttttttcagcccaataccagaccagtc

SEQ ID NO: 393193 - DNA, 183 bp, Homo sapiens
atccttccgcctcagactcccgagtagcttggattatgggtgtgtgacaccatgcctagctacttaaaattaacttataaaaaacattttttttgagatggagtattgctctgttgcccacgctggagtacagtggcatgatcttggctcatcacaacctccgcctcccaggttcaagcgatt

SEQ ID NO: 393194 - DNA, 250 bp, Homo sapiens
acacatttggatttgttcaagcaggttgtacagataaaaataaggtcagtaacattctgttgggctacactggtgactctggacaagtcatttaactttgctggttgtaatgaagttagtgtaagtgattgctaagtgtcttacagcttagaaattttatgacagtccattgttttctctttgtgtcatttggtgataccagttactttgaaaatgaaaaacacgtcccctcaggcatgaagggtaccga

SEQ ID NO: 393195 - DNA, 251 bp, Homo sapiens
ctaaaagaggaaaagagaagtagagaggaaagtgggaggcaaagacaacaagagtatctccaggacacagagggagcttgacatttctacacctttcctgggggactgactcactctccatgtgaaaggaaaacaagatacaaagacataactttgcccagagaggcaaaagagagagactggaaatggaatgcaggaattctagctgcccagctcagttctattctggaatccacttcacttctctatga

SEQ ID NO: 393196 - DNA, 406 bp, Homo sapiens
ggctcatgcaagtaatataattcatttaaaaggcgtttatccaacgaaagccctcctgagacttgagccagttttcaactctctctgcacttccataggtgttcagcctcctgatacattaactatatcatagattggatctcttcagtaatcctgagttcttcaaaacaaatatgcaatttatagcatagtctttgtgcctcagtatactccgtattttaattgtacgttctatcccttttgtgtttgagaatacctatcatgtcctgaaaaatataaaatgtgacctggtttttattagctactgtaatatttcaatagttgaattgactatgaagccacaattgagaactttcatgaagtttgtcaagatactggctaagaatacacgtattgagtcgtaaat

SEQ ID NO: 393197 - DNA, 259 bp, Homo sapiens
tcatggtgtctgctgtgatacgtttgggcccagcatggagagaagcccctgcacatgagtgacaagggctctgaccatcgtgggggatctgagccttctctctcttgcccttgttttgctgcagatggtcaagtacatgaactttgtacatccagtgtggtattttgaacagttggggaaatcatttttgaataattttcttctgtgtaaccatggctttggaattacacagatgtgtcaatgtgtcgtgtggccacac

SEQ ID NO: 393198 - DNA, 197 bp, Homo sapiens
atttttagtagagatgggttttcaccatgttggccaggctggtcattatttcctttctaatggtaattaaaacattggtacacttcctctgaatgaaaccatatgaacacatacagccatcattcttgtgcactctgactcaatgatatgcgtcgctggaacttcgcttccgcatctcctcacagtcccttctgagc

SEQ ID NO: 393199 - DNA, 446 bp, Homo sapiens
ggaggtgagagctaaaaaggtgagagatgattgctgcgaacatcatccaaatgcccccagaagaaaatcatcctttacggagtgcacaccctgcaaaaagaaaaatgttaagaaaggagaacgaaggagcattgacaatatattgcttgattttacataaggctccagatacatttcatattaaacggtgtttatcactgtagcagtagatgactttctgttgtggagatgatttctttttggtgcatttagcatgcacggtgccaaagcaccctgtgccacaggccacagtgggaaaacaaacatatttgtctataatatgcgtgggtgggaagcccacacagattataggggccacggggcttctcctgcctggtggaagtcttgaatggggcaatcggaactgtgggatgaattctgggcatcttagatcattctccaaaggg

SEQ ID NO: 393200 - DNA, 534 bp, Homo sapiens
ggaaaaacctcttctaagtagatttgttaaattacacaatagccactatcatcactgtactttatttcatttcctgtcactctagatttccagtactcataaagagcccaagcctctcctagaatttgaaaaatcaagttactgtaaaataaggcctcccaaggttgccacatttaaaatcggagatttcagtattaaatatttgtaggcctttgaagcagatgaaacacggtatttttgtttcagtagtattctcaggttgcctcaaatactgaaattaaatctattccctacaccatccatcttcaaagtttgaactaatcatcagcaacttgaagatgttcagaaaaatgttaaaatgattataggtgttttagtgcatgaaggtcagtgtgatattctggaagcataaaataatgtattgaatgtttactctcttagaatatgtatgtctagagctaaagagatatgttacattcccgacattgtttcttgtgaatgtttaatttgatgaatttaaattctgagaataat

SEQ ID NO: 393201 - DNA, 570 bp, Homo sapiens
attgtacattagttcgttttcacattgctataaagaactactgagactgggtaatttataaagaaaagaggtttaatggacgcacagttccccatagctggggaggcctcaggaaacttaacaatcatgacagaaggcaaaggggaaataaggcacatcttagatggtagcaggagagagagcaaggagggaagtactatacttttaaaccaccagattttgtgagaactcactcacaatcatgagaacagcatggggaaatccatccccatgatccaatcacctcctaccagatccctcccctgacacctgaggattacaattgaacatcagatttgcatgggtacacagtgccacacactgtgtcacattgtttctgtatttcttttttctacattccctttcatactgtattcaattttttaatggaaaatgttaatttctactcaaataattgttaccatttcctctcctaaattcttggatgctttgtagtttccatcactgaatattgtcagctcttttcttatgcactgtatttttttttatcatggcaaagaaattgaaatt

SEQ ID NO: 393202 - DNA, 210 bp, Homo sapiens
aatctcagctttctgcaccttctggcttattttcaatcctatcatccattaataaaatcaaaggagtcatgtttactttgcacccatgtttttcttgatctctctttggcaagatttgatagtaatcattatactaattgctaatagtaaactgcttccccgggagttaaaaaaaagttcaggaatttctactccagtttatatagttga

SEQ ID NO: 393203 - DNA, 716 bp, Homo sapiens
ctttccctttcagtctggattgtttatgtatcagggtatgtggtgactttaaactatgggttttaattcttttagctggagtgctctacctctccctctgcctgcagcatccccagtagcatgttcccgctcccctgaatgctttggcattgtctctcctctgataacgtatgtacaaatggagactgcgtaccacccttttccccagcgaagcacacaaacagtaagcagacagacactatctaggaggctgcaactcaggaccataatattgtggcagaaagtagaaaataaaacagccagtgctgggtgcaggataatagcataataagataagtgcgagagagtcaggaggcggtaatggccctggagatggagaaattctgggaaagtagggcagtataaaagcggagacaccatctgtgggatccaggcagttgtgagtgactccgaatgacacaatatggagatctgttctacaacacaacaaatagtagtaaagtaatcatctgggcctacaattgtcagacattctttgtttgaaatgccaccttcccagccatgaataccagtgtagccatggttataaatggcaaggctataaatggcctcttcctccaaccaattcaatttgcagaaagtgagaataagaaacaatttcctccctagatggactctccactggactacagtgtgcactgcacatgccctcaagc

SEQ ID NO: 393204 - DNA, 212 bp, Homo sapiens
ttgtatctgtggcttccttgagaccaactcatttattctttccttttaaaggaatcttgaaatagaaaaaaaaaaatcttattacagtgctactcaggatggcctaaaggactgtgttataccccggctagctattaatgtactttaacttggatcttgctaacatgatttcaggtgaggtgtggacaggatctaattagttataaatctgt

SEQ ID NO: 393205 - DNA, 603 bp, Homo sapiens
agccataggagttttagccaattcagaggccttgctccctacaatttggaacattcctttggatttgaccaagtcaggaagagatgggagaaaagtgaaacaacaacaataaaaccccaagcataaacaaacaaagagttaagcaaaacaacaaatgcacaattcatatgattactgagtgttctaatggtaaggagaaattaaaagcagaaattaaaagcagctgtattccatggtatatatggaattttccaatctaccttggattttcaacgtaccttggatgcacctggatttactccacgtctttgttattgtgaatagtgctgcagtgaacatacatgtaccccaggctccagaagcagacaagcagatgaggagatgaacagaagagcagaattgcagaatgatgtggcagaaagaagagaaggagcatctgaatgccaagaggagtttggctggcagtggttggagagatcagcctctggatggcaaagctcccggggaagatcatcttcccattccatcccctttccagcttcccatccatcccattgagtgccacctccaccactcaataaaacccccacattcaccatcctc

SEQ ID NO: 393206 - DNA, 412 bp, Homo sapiens
ctttgccacccactgcagttctgaccctcaacccttgcccttgtttccaagagacaactcggcctcccaaagtgctgggattacaggcatgagccactgtgtccagcctggaaaagtttttgaaacttacttcgcaaaaaaaatttggtttgaaaatagccacatgggtaaaactacataatgagaaagctctctgtcctctagagagggaatggagaatagaagtgcttggctagcattctctggattgttgtcttttcaagaaaccaccttctgctaccttaaaaacaaaaggaggtttaacagaatgcaaatggaagtgagaatgggagacacacagatgagaagacagcagaacttggtgagtaagtgaccacccaaaccaagggaggaatcagtgatgactgagtga

SEQ ID NO: 393207 - DNA, 369 bp, Homo sapiens
gttcaggttgaatttataccacttataggtagaggtgttgaggaagatggaggggagctagatagcctaagcatataccttttcaagatatctgcttattcaaagagaaaattataaggctgcgcgcagtagctcattcctgtaatcccagcacttgggagaccaaggagggtggatcacagagtcaggagttcaagaccagtccgggcaacacagggagcccctggctctacaaaatattaaaaaattggctgagtgtggtggtgaacgcctgtgctcccagctgcttggggaggctgaggtaggaggaatgagctgtgatggtgcccctgcactatagcctgggcaacagagtgaaaccccatctca

SEQ ID NO: 393208 - DNA, 261 bp, Homo sapiens
catttcctggccactgtgctagctcacatcaagttagccttctttcttcattttttagccaaggactatgtgacatgaagttaatatttagaattcaccacggcaaccatttttaaacaccaagattatctaaactgtatggacaaactgctgaaaaagtttggaagtattccctaccctccagtctcccaaatattagtcaactcgtacccaagtttcactctcaaaatgtgtcgaagcagaaccaagcaagacttttta

SEQ ID NO: 393209 - DNA, 1349 bp, Homo sapiens
tgatactgctcatcgtgcagcataacacagaggtgctcacgtgagaaggagctcaattgaaaattggcccctgcaagctggaacatctgctgtggctcttaattgataggattttccacttgcagaaagggagagtaaaacctttgaaacctcacattctttacatggtggcgtatcgctgccagtcatgccctctttgtcaccgtggtttcagttgccctagagcataactgctttttcctcaagtgtcctcttcaagggaactcacaacaagtatgctgtgtattcctgctgtgatgtgctccttcggttctcatcagatcatcccaaatgtaaactgcacagaacttagtgaaaatctaaccacatgatggaggaacaaaccaagatatgcagaaaagtattttaagtgaccattatttccattaacaggtacacggtgataacaatgatgacagtgatgaagactccctggaatatgctccaaagtctcccacctgccccccaattcctcatttgggcagcggcacaagcacccgtgtgtttggattgaatgaccagcagcaggggtgtggcggagagaggggaaggcgctgttgtggggttagaatctcaggtgtcctgatcacacagagttctcattagggagcaaaaggaagttgtggatcgtgcactgattagccagggactcaaaactgcctcatccacgactgccctcttactgagttacttacaaaataactgagtcagcacataaagtccaagaaagatggtttcgtattttaaggcaaattccttacttggttgttaggggaaaggcctctgagtaggcctgtctacaatgaggaagaccaagagcaaacagggtatacggccaggactgtccaccttgctctctgctttcagaatgtggtttacaggcaggaagacgaggcatcagagcaggtcttgtccaacctgctcagggtgtccctctgagcttgggccttggctaaaataatagaaaagccaggaaaggaactcagccatattatcccttgaagattctggaaagcacagagttcttaggaagcactaacctggttcactgaggatagaaactgtcttccaaagagaagagaaatagaaattgccttaggtcataaaccaagagccagccctgctgtggatccccagtccacattcttggagccactggaccccaggatgcagtttagcaacaggtcctgcctcatgagttggacggtcccacagcctccctgagctcatgtgtcagggtgctggggaccttggatccatctgagccaggaagttctccttcagggccagtgcaggccgtgagactaatg

SEQ ID NO: 393210 - DNA, 334 bp, Homo sapiens
tagtgggggagctggaacaggacagggtcaggcatgaggccagggcagaggactcaggaactggatgctcaggctgcctggctggggtggttcctgagcatctgtaggcaccctagggtctgggagagcagcctgaaggtgggcgtactgtaggtccctgggcttcgtccccctgggctcctggctgcccaaggacagggcgggggtggggaccaagaagcctgggctctcccggaggtctggtggtgggatgggccgatggatgtgggagaggtagctggagcagatgacacaggcatagattctttactggctggagggaaaaccacagatt

SEQ ID NO: 393211 - DNA, 731 bp, Homo sapiens
catacagtagccactagctccagggaacaacagagcacttgaaataaaattagtacaaatggaaatatgctgcaaatgtaaaatacaccagatacgcgaggatgagtaccctcctccaaatacatatctcattattaatttttacattggttacacattgaaatggtaatattttggatatattaatctaaataaaatgtacctataatcccagctactcaggaggctgaggtggggggattgcttgaggtcaagatttcaggagctcagcctgggcaacatagactccatctctaaaaaacaaataaaaaattaatttcacctgtttatttttattttttagtgtggctataggaaatttaaaattacatacccagtttacattatatttttactggacagtgcctctctggacagtgtgtatgctttgttttacatatctattttgttttaacacaaaaattgttgctacctaagtattacacggaaggctttgagtatatatgaattatgccattatttaaaaatcccaatcgctgtcttggaacaaaatgttgctgaagttcccccaaacaattttacaatgctaggaacatattttcttgtcattgctgaactttcaaatgagagcaaatgaagtttttaagataatacattttagattgaatagttacactattgttttattgtaaacaggaaagggaaattggtacttgctatgtaacagaaaa

SEQ ID NO: 393212 - DNA, 357 bp, Homo sapiens
accatgaccagtggtgttggtgaatcctgaccatgaccaactagagggaaaagctcaaagtgtaactgtttgaatcaatccatccaagtacttgaactgttagaatctaaatggtaaggccaggacagatcaactgataatcaataagctgaaggtgtttatgaagcccctgccattacatggaaagaattgtagaggatataaaaaatgatgagatatggtccttaaccagaaggtgcccacgatttagctgagaaggtgagaggagctcctacaaagctcactgaccacaggggtgatgtgtgatcatgtcaatccaaacagcagacacgaaagctcagaggaaataaaggcacc

SEQ ID NO: 393213 - DNA, 550 bp, Homo sapiens
  misc_feature (3)..(3): n is a, c, g, or t
  misc_feature (174)..(174): n is a, c, g, or t
atngcagggataatactgaaagattatggatttaatcctacatgtatgtacctgctctgagccaggtttatgcccatatttctgggcatctaatcttacttaactctcccaataactctatgaaatatatattagtttttggaaataagttgaagtttactgaggcacttcccntgttcccctgtggcttggtatggtgcctagaacatgatagacactgcttgatggcagtgtttggcgttctgattctaacaccactcttctggttattacatcatgccagcttcctagaagatatcaggatacatatgctttatgttgtatttagggttaagtaaatgtgagtcagtttaattctgcatattataactggcaagtactgaaccatggtaccaaagtcaacggccatgtaaaaaccattttcttattcttctagaccattgttttagagctacagtaattcttagcaaacttgcttttaatcaacttatttcctgtgcttttagcctttgaaaaaatagttatcttagccaatttgtagggtgtaagg

SEQ ID NO: 393214 - DNA, 368 bp, Homo sapiens
gggctgagcttggggaaaatggcagcatgttgtagctattgggggacccggcagggagactgctgggtcagctagccacctctgtggtcctccttgcatggtcctcctcaatgctcctttctgatgtacagcttgagataagaagtccctggaaccagatgcagacccagcaggcagaatgctctgcagaagagagctaagcttcagccccagagggaattaagtaaggggattggggagggagagtgtatgcttcctgacctccacttgaaagcattgttcttttcctaagggaaaacagcccccagcagagctcactgggacatgcaacccctcccttttccttccccatgcgtgtattgccagtt

SEQ ID NO: 393215 - DNA, 347 bp, Homo sapiens
cagttccagctcagggacaggcccttcctgaagaagatgctggaggagcagagggaagaaggggaaaggagagcttctctttaggtgtgagtctccctcagatggcatggcactttctgagagtaactgccgcactcttgagtctggcgtatagcaaggaagaagcagctgggtggagccagctggagtaaaagatttagcaaaacctctggtggtgagggtttggcatttttaaaccaccatttattgagcaggctttgtgctaagttctttagagcaaaatcccttttatgctcatgatggtggtagaaagtgagagctatcatttcctttttataaatgagact

SEQ ID NO: 393216 - DNA, 256 bp, Homo sapiens
cacatctacccatattgctgtctcaggaagcccctccgcttggccagaatggagcagccgaagggagttgattggacagtcatcatcctgacctgccagtacaaggacagtgtccaggtctttcagagaggtaggggactccccttcccaccttgcccctaatggagaacctccctccccttcctggctatgtccctccaacaccaggtgccaggccaacctgggttcaaacccagattgcacttctccctagcca

SEQ ID NO: 393217 - DNA, 564 bp, Homo sapiens
ggcacctactactagcctccccaaaccatttttagaaacttgggaacagttaggacttacattttaaattaaaagaaacagtgtgacgtgctttctttggaagtttaatatagtttctatacatcagcaatgaaggaaaaaactagaaagtgtaacttaaatgctaccatttacaatagtatcataagaccaagtaagtgcctgggaatacatttaatatgtaatatgttcaaggcctctaaaaagaaaagtagaaaacttcattaaaaacaagcaattggctgggcacgggtggctcacgcctgtaatcccagcactctgggaggctacggtgggcggatcacctgaggtcaggagttggagaccaggctggccaacatggtgaaaccccatctccaccaaaaataaaaaattagctgggagtgatggcatgcgcctgtaattccagctatacttgggaggctgaggcaggagaatcgcttgaacctgggaggtggaggttgcagtgagcagggataatgccattgcactctagtgtgggagacaagagtgaaactccgtctc

SEQ ID NO: 393218 - DNA, 200 bp, Homo sapiens
cacttacatttctacataccattgttcatttttatttcctcttaaatgagcatctcttatattctggatgcaagtggcgccaacttcaaaaaaaaatgtaacatctgccttgcattccagctcagtgtatacagtgggagtctacttttcctgctctgtttcacgagatcttagttttgaatccctgctttgggatagta

SEQ ID NO: 393219 - DNA, 305 bp, Homo sapiens
atcacttgaacccaggaagcagaggttgtgttgagccgagactgcgccattgcactccagcctgggcaataagagcaaaactctgtttcaaaaaaataaataaaaataaaaaccactatgggttaactttcagcaagtgcaaactaaaaagtaaagcacttcttattagtctgaaaaaaatacagttgaatacaatttcaaaagtatagttttgaatataaatgtactttgttttttaaactaagctttccatttccccagcctacaaaagagagcaatttaaaatctacatccacctgaggcct

SEQ ID NO: 393220 - DNA, 501 bp, Homo sapiens
tgccatctattgaggtgacattacattgtgtttttatctcgtcttaattcatgacattaaattattctactaacagtaataatgctgtaataaacatcattatagattttgcttttttatatcttgtttgctttttcatatttccttagaatttacttgaaaaaattgaattactgggtaaagggcttttgcaaagtattgttaaattcctcgagttgcatttttggaaaggggacgtgaatattttatcaactaatttggtctccctgctgccattagtgactgaatatcttaatctgaatctcagagtgtagtgggtttttagtagtgctgaagacaagttttctaaagtgtattatggtgataaattatattttaaaaactgtcaatggcttgaagcacaatagcctaataactaacgaaaatacatacaagatagaaagtgggtagtatttcttgtacttgcatttcagatctaaatattttaacatatttaaattt

SEQ ID NO: 393221 - DNA, 624 bp, Homo sapiens
attcagagggggggttttccttgtcatttagtttttgcagcacacacactccatatttaatccactatctgcctacaacctagtacttagctattattcacattctcatgtgggcatatacccaacttcttactccatcaaacactggaataaacgttaatatattaggaaattagaaaaacgaaatgaacaggagggaaagcaagtacattttcacacaaagtacaggatacagctgtgatctgtcaagcttacaagactgtctccttagctaacagcaaagctacaggactatcttctcagctgaacaggaagtcgcagtctaaaaaacataaatgttcccaagcctcaactctattcccttcacttcacatttctagcatgcattaaccctttgaccaagcctgtgtaatacacccattcaagtagccttgacgaggtgtcagcaagtctatggatgacaagtactttgagagtccacagaataacctttcatcatgatgtccctaaataaaaagccatgtgggactaatgtgtttggttgtactcttcagaataaacaggttgtagcaagaaagacaaaaccaactttggcctttgagaaattcatacttgtatgaatga

SEQ ID NO: 393222 - DNA, 302 bp, Homo sapiens
tccttgtaatcctagcactttaggaggctgaggcaggtggattgcttgagtcgagtgcaagaccagcctgggcaacacagtgagactctttctataaaaaattttaaaagtcagctggatgtagtggctcaccctctagtcccagctactcaggaggctgatgtgggagcgtcgcttgagctgggaagatggaggctgcagtgagccatgattgcaccactgccctccagactaggtgacagagtgagaccctgtctcaaaaaacaagcaaacaaaaatcaatctgttagcaatgagaacta

SEQ ID NO: 393223 - DNA, 252 bp, Homo sapiens
ttaaacgctgcttactcctaacattgtgccccagagggcagggcaacagcacagctgctttcagggaattcggaacttggagaaggccgggcatggtggctcacactagtaatctcagcactttgggatgccaaggcaggcggatcacttgaggtcaggagttcgagaccagtctggccagcatggtgaaaccccgtctctactaaaaatacaaaaattagctgggtgcatgcctgtaatcccagctacttg

SEQ ID NO: 393224 - DNA, 260 bp, Homo sapiens
gatgggattggtttagttaattaacaatatctgaaaacccctcatagaatgaatggcaagtcccctatggagataaataaggtggttgtggcccgtaagtcaaatgatgctttcctaggggaagttccatagttctctggctcccttccgtgtgtctgtgcgagcagctgtgtctcagcactgtcagtatcacatctgccttggagctggaaccatctgtggtctacccttgtgttttatcaaggtaccctgtttgcttc

SEQ ID NO: 393225 - DNA, 201 bp, Homo sapiens
ttttgctttgtactgtgtatggaacagtttggtatgaaaattaactgtagcaaaagcatagttaactttaatagcatatctggcatctcttttctcacacatcacgtctagtacagtagcaaatccttttggctctgccccttagaacaggggttagcaaattatggcccccacctctttatagttcatgagctaaaaatg

SEQ ID NO: 393226 - DNA, 181 bp, Homo sapiens
gaaggcaagggagctcctctctgagggcttcaatgtcctctgatggaagtcagtgaggtcgtctgagaatggagagaaggaaaagtcacaggtttgagtaatgggtgggaggtttgacccagtcattgtggaacatgaaagagcagattggccaaagacatacagcatgtgcaaaggccct

SEQ ID NO: 393227 - DNA, 814 bp, Homo sapiens
ccatgccacaaggctgctgtgaggatcaaataagagactagaagtgaaagcaccactgacttactcttcaataatgctatatttattgggcacctactgatcgtctggtgctagacagtgagagtataagagaagacacagtctcttccctgatggcgtttaaatctgctgctgacgcttaaaacaatttcaacatagtaggacaagtgctgggacagggaggtaccaggtgctgtggagcaggagagaggaagctaacccagttgggtaactagaggaagacacagctaagcctcaatacctgagggatgagtgggacagggctgaggcctggaagagagtgtcccagaccaaggaagggcacaggctgaggcctggaggagggacacagggccggtgggggccactggtgatcactcaggctggcaggggcacagagcacatgggaggagggatgacattagctcacaagcagtctcatcgtcatcgatgataataaatgtctccattcctaggcatacgtttatcttgttttctccattaaaataggaatgcatgtttcgtctctttgtaaaacctgtgagtgaacgagcactgatggtactgaaggtatagtaagtgtgaaggatacagatccaggaatcatcctggttcctgcaggggagatttacagagaactcatagagcagatgaggaagggttatggaggctccctagaaggactactgcagcacagagattcctgacatgcaagcatccatccaccattctgctccagaaagtgacctctgagcccacatctggaagaactgtg

SEQ ID NO: 393228 - DNA, 808 bp, Homo sapiens
gttaactgaacttgcagggatgcaattgatatataagaaatataattaaaattgcaaccagcaaatgtaaatactaaattgaaagattcttggttttttaattttaattttaattttttgtagagatggggtcttgctgtgttgcccaggctggtcttgaatccctggcctcaagttaccctctcgcctcagcctcccaaagatctgggattacaggcatgagccaccatgcctggccttatttagtattattttatgttctgtatctgtacatagatttaatctgttttcaaattagtgaaataattatcaataagatggagccaaaacatgaaaataattttaaaatgtctttatgtgacataacacagatttgtgtaaggatttgaggttaagtggaccaaagaattgtgtagtaaaacactgacaaacccagaaattaaatgcgagttttctctgtaacatgatgtgacgatgattatattattattattattcctgatagggttgttttccttttaagaagaaatgttgggtccatttaagacttaaactaaattacaatagcattaataactatggttccaaattaagagtagtctttatgctgtgaaaaaagaactattgttgataagttcgttttagaacaaaaagatatgattgttctcagtaacatcatctttgaataaatagggcagcctctgatgatgtagcctcgttttgcagtgtgcgtgggaggtgagcacagaagagacaaaagggccaggggatggtgagaaggaatagcagaagggagggacacctgggt

SEQ ID NO: 393229 - DNA, 628 bp, Homo sapiens
cctgctgaagaactggatatgtccacgatcttatagggtctccccagagattgtttattcattgcatagaaaaaaatcagtaactatacaatggataaccagacattttttgatcttgcaatcaaaattaacatctccagtgagggacagagagagagtgtgtgcccccaagatgtgattcccagggaggacacatcatttatgtagtattctatccagggatgcatagcctgtgtctaatcctgaggaaacatcagagttgaactcactgaaaatctttaaaattactggtctgtattgctcaaaatggccaatgccatgaaaactgaaaggctggcctggcgtggtggctcatgtctgtaatcccagcactttgggagcctgaggtgggaggatcgcttaaggccaggagtttcagaccaaccttggaaacataccaagacctcatctccacattaaaaaaaaaaaaacaactttttttttttttttgaaacagagtctagctttgtcacccaggctggagtacagtggtagaatctcagctcacttcaccctccaccacctcccaggctcaagcgattctgctgccacagcttcccaagtagctgagattgcaggcacccaccac

SEQ ID NO: 393230 - DNA, 440 bp, Homo sapiens
cagagttattcaacatatgtaagagtccctgactgtagaaacacctcatggaagcaaattagaaactctgaaatggctcatttgaaattctccaatcttctcttaaccaatgctggcagatttttatctgaagcccttcagagctgagaccaacgatacttccacttgcctttagttaatatcgatcaactaattcccatcacaactaatggacagctggtgaaataggctcagagtgtgatctgtcatggccagtgtggcataaaattaggaagtaggcaaatgtgcctccactcccatttccttcccattccagaatcccaacttcctggaatcttcctgccacctcttgcttcccagagccatgcctgcaggttctgccaccaaaagttagttggtacccactgtgttcttgaagagtcctattaactgatagagac

SEQ ID NO: 393231 - DNA, 867 bp, Homo sapiens
caactataacaattctaaatatattttactgtaaattattgagtacacaaaacaataacaggtaactattcagctcacctcagatttaatacttaaacattaaagaatatcaacctacttgcaagaaacttaacaaaacctaaggaacataatacaaataaaactttacctatgcagattataagctggatattataatatccaggaaaatatccaggatgttagaatggcttgaaacagaattgaaaatttttgagctataagacacataggagaaattttaagttcattttttttgggtgagacatttattagtctcaacaagactgaatgattttcttttaaggtcacacatttaaatagttaacaggagaaataccaaccagaatcatagtcaaatacccacctactccctttccaagacaactaaggtctcaaattgcgcccatttttctcaaattatttctagaatatttagcaaaagaggcttttaatttggcatatctttgtctacaattttgtagtttgtgtaaagaaaggtagattaagggaatttcattttaaaggtgagaatcagaatgacatttgtgaagctatgatgcctgtgccatctggcatacacgagggtgttgtactaaatgggatcagaatgagctccttttggaaggaaacctttaatagactgggaaacattaagggaatcttcccttttttatttattttattttattttatttttttttattttagatggagccactgcactccagcctgggagacagagcaagactctgtctccaaaacaaacaaacaaacaaaaaaaccctgtagcttgggatcagccttctcttctattgtttttcttta

SEQ ID NO: 393232 - DNA, 326 bp, Homo sapiens
caatccattcggtggtgagtatcagtcacaagagtctgcatcacacactatcagcaatcaggatggctatggggcaaggacgggtttagaatgttaccaagtcacaggcctggcatgaaaaagtggaacttagtttgtggcttacccaagagattaaacatagtctagttgtatccacgcaattaagatgggaaggttaaggatcctgtattccagatcaatctgcactcacaaaacgaggaccgtagtaaacgcaaaggaatgactcaatagtagcgaaattcagacatccttgacaagccagtaggggagatatttcaggctag

SEQ ID NO: 393233 - DNA, 273 bp, Homo sapiens
tcatggcttatatctgtgtctccagcacccagctcggtgcctggtgcacggcaggccctggttaacacttgctgggatggttggtactcggagaggacttgtccccctagaatatcatcacaagcaacttcctgcccctttcctagtccagcctccctctcctggctcagcctttctgccactttttccaggaagtgtttgtagttacaaagtgttcacctgcatcatttcacttaaacctcaacaactactcctccccccctttttgtttgg

SEQ ID NO: 393234 - DNA, 379 bp, Homo sapiens
cttagtttcccatatgtaaaatgaaaggtttagaaaaatggtccctaaagttctttctagctctatatttttactatataaataaggagtcaaagagccaagcagttttttattctaagcaaggcattaaatatgatattcaacaaatattaatcaaatgcctcccacacattggcccattactaggcatgaagtatataaccttgaacaaaacaagcacatttcttgccctggtggagcttatggtctggagtttaaattaatacaagaaaatatagcagttattctacaaaatcagggacagcttccttaaggaagtatctgtgagcagatctggaggttgggtcatttaaagagagggggcaggatatagctggca

SEQ ID NO: 393235 - DNA, 609 bp, Homo sapiens
gcaagaatttgcaggagtagagctaggagctgaaaggtagagttacgatgaaaatgcactcagcagactgaaagcagaggtttgaaatcaacaagatgtaatttaataggactacatttaaaagtaatttttttaaaaaagtgcctcaagtacatgatgagaaagactgttctgatgggcacaattcctggggaaaagacctaagtgctttggctgcatataggatgagtgcaacactgaaatggctgagacagagacaacggtgaggaacagtcctgccgttctctctgtgaatccaaccataactggaacccatatctcacctcagaaagaacattcagaaacggcaaagcgtttagagaagggagaccagaaagttgcgacacatgaagcaaagttgagcaaatgggcagcaagcctgtgcttccagcacccgaagggctactgtatgaaaggacttcacagtcacacagtaactgacggacagaaattactagaaggcaatgctcaacacaagtaagtacccaaaaataaagttgcctgtctcataaatagttctcacactgtcacttaagaaacattcaggcagccgccaaaagaccagtagga

SEQ ID NO: 393236 - DNA, 616 bp, Homo sapiens
aatattaccgacctctttttattgttgttatctatcattagtaagtgtgtgaaagtgtttttccatatcaaagtgaagtccacgaaggtcttgcctgccttaccttagttggattccactaatcacccgatcaccccggccacagctccaggcctgaaaccaaagtaccagcaggaattaaacaacctcttcaaagagcttcctaaaatcttaacctttaattggaaaatgcagatgatcaaatcaagcactgacgtgaccgggtaaaacttgaaatactggaatcctagacaaaattgttttgatgaatttcctgcagacgtgaaaacaagcgattccagtaggtcaacaagtcagaagcacgttcttggtttaatgaagctctgttaaactattttctctttttcctagaaccccgatcttttgttattgttttcagatgatgtgtgtgtttgtttgtggctggcttcacatcaccctggagggttcataaagataggccacgaagccccgtgcttgtagacacacaccccgacggacactggcctcgcgtgatgacgcgtgtgagaaacccgccccagtttgacctctgcagtacataagggtctgtgggacg

SEQ ID NO: 393237 - DNA, 276 bp, Homo sapiens
aggaaaacacattagaaattccggtaaggaaaatgtcaacaagattttcattctcaacggagctgacaatgttcgcccccaccttccctgcctggtgtcagatgaacagtaaaggacagtttgctccagagcgaggttttctctttacaatgcgttttcctgtatatgatctcatctgggattcatgacctctgtgaatggtaaacaaggtaaatcctttttcttacccttatttttatttcattttgtttgttattgtcatatataccatgcatt

SEQ ID NO: 393238 - DNA, 346 bp, Homo sapiens
aacacaaacagaactttggacaaatactacttattaagaactccctgtgtgttgggtacattatatacccttctaatacaggctcctctaaagtgtatatcattacgcctaccttctggatgaagaaatgagcatagagatgaccagaggcagttggtgagatgtgggacctgaactggactccaggtctggaaaacttggcctgtccactagactgtggtcctcccattctctccaggactatatcctctggtttgcattgcttcaaaacagcaggcttgccattagaagcaaggaacaccgatggaattagggattttctgtgaagtaagctggcatttacttc

SEQ ID NO: 393239 - DNA, 242 bp, Homo sapiens
agctcatcagctatccctcatgttaatgtattttatgtgtggccgaagacaattcttcttccagtgtggcccagggaagccaaaagattggacacccctggtccaggccacgtagccctcctgcactcacctttcaccagacacctgcaagatagctgcaagactgcagctcactgcagtcttggggttatcagtactgcacacagcactgtacagcatacagcataaacgctgtcctataa

SEQ ID NO: 393240 - DNA, 249 bp, Homo sapiens
aaaagacggggtcttgctctgatcgcccaggctggaaggcagtggcgcaatcattgctcgcttcagcctcagactcctgggttcactgcagcctcggcctcccaaagcggtgggattacaggtgtgagtcaccgcgcctggcctattttgttttggggtgtttttttgcggaggagtgctgaaggggtgttggcttgtttttaatccctgttttgcagataaagaaacgggctcacgggccgggcgcag

SEQ ID NO: 393241 - DNA, 686 bp, Homo sapiens
ccttcctccttctcagggactttgctccttctgttctcactgtgtaatcaatctttacccctttattctcaccagaaaattaagtactcagtatttcccatttttcattccttcttcataaacagtgctcaaaagagttgccgacatatacaggctccacttactcatcatcaaatttctgcctgatccattgtgatatgacttctgctccgacaaataaaaataaattgcttttgtgaagattatcgattacctccatttgccaaatccaaaggacatgtcttactgaatctcttaccttcgctgaacacaagtatccactccctatttcttgaaatactttcatttttcctcctatttctctgacggctccccctgctctatgtcctggggttcttcaaagcctggtcctagattcctttttatgttcctttatattctctccctaatgatgtcacctattcactcagccttaaataccctctacatactgacaattctttctttcaaaggcaaaatgatgttgccatactgctttatgaaagtgctttatgaatatgctgtaagaataattagaatcacagaaggaactttagagaatatcaagcctattctacttattcacagataaacatctcagaggtaagggacttgtataatgtcacagaacaagttagtgacaaacc

SEQ ID NO: 393242 - DNA, 364 bp, Homo sapiens
aacacaaaggaatggatgcctgagaatacaatggtagccttccttacatgagaggtaagaatcatcaacagcaagccaatagccaaaaaataaggggggaggcggggagttcatttctcgagtttcagtcgccttcagaagaagacatttaatgccaaggggaacctctgtttagccttattcaggaggacttctaatccttacctccccaggaaaagcctgcctacagctccaagtccaacatctggtcaaatctatctcagctgtatttgttgaattaaatgaatggggagataaatactttatcataggaaaaactaaaatatttgtgtcaaatgccagagaggaatgtgcataagacaac

SEQ ID NO: 393243 - DNA, 643 bp, Homo sapiens
atggatttaactcacaggtttgtgattctttgtgggttcccctgtgggtctgtggcacagagttgggctgaggtatgaatccgagaagtctactttgcaagacacatgttatggaaaagggtcatttatccttattgttctgcgcattcatgcatttgtaacaatgcttgttaattaaaacattgtgttgtgtctgtgaaaaacagccatcaggtgagagcaacatttagtgaaatctgaaagtagggttaacttgtagtgtgaggctatgcacaggaaaacgcatatggctctccatagaaatgtgattcaagcgaaagctgggagcctctataaacattcttgtatttgtggatctgggaattcaagaaggtttcagatgtatgcctcaggaatgtcaagagtctgctgtatatccaaatttacaaaacagataaattattgaatgactattcaggttgcaaaacgattcttcattttattaaatatttactgcacatttaccctagagaagttctttagtaaatatagtacttgatttacagaaattcagtgcgtatgactgtttctggatatatgtattgtgttaagtgggatcctttctccatagcatgaagaaattttaagataatcttttctccat

SEQ ID NO: 393244 - DNA, 336 bp, Homo sapiens
ccctcctttcccacctcccttcccatacctgtacctctcccacttgacaaaagaagagcattccttttggccatattgagtcccactatgggtcttgccccagagtgtaaaaatcttgaggctcggtgtcgtggcccacgtctttaatcccgtcactttgggagaccaaggcaggcagatcacttgaggtcaggagttcgagaccaggtgtggtggctcacgcttgtaatcccagcactttgggaggccaagacgggcggatcatgagatcaggagttcgagaccagcctggccaacatggtgaaaccccttctctactaaaaatacaaaaattag

SEQ ID NO: 393245 - DNA, 364 bp, Homo sapiens
tattttttggaattttctggctaatttgattagctagattaataacagctctatctgcaagtctctctttaggaaaaaagtgtatatgtactacataattttcagggagtacagagatctctctgacccccttaagccctggttaaaaactccaaattaaagttatatcttttatgatcgtgtgttttatatcataaaatgccttacttttaacaaaattattagtagctttactttgaggattttttacaattttgctaaacataaacgtttgcatgttagtgtttttaagatatgcagattataagacacagtcaaattaagaaacatatctattgctccatgtttttaatagctttgggta

SEQ ID NO: 393246 - DNA, 505 bp, Homo sapiens
cttctgctcatgtccagctgtctgcctactctagcagttgcacacacagtgctcaaaagtgtacatacacatcacacacacaacgcactgcacactaacacccacacagacactgtatagagccacccaatatagcccacagagatgacactcatacaacagaatatgaaccacacagagactacacacacagcatatggagtccacacaaagagcacgacctgggcagacctacacattgatcaattcagccagcagaattaattcattgtattcagttgtttatattgaacacctaacattgtagtagacactggggattcagcagtaagcaaaacagatgcaaatccctgtctgccctcaagggactcatattctaatgggtgagccaggctagaaatcagataaatacataaaatatagtgcatggcagatggcgataagggctaaggaaaaatagaaagtagagaatgggaatagggaagtccacatgagcaggagggtt

SEQ ID NO: 393247 - DNA, 268 bp, Homo sapiens
acgctctctctgtgtggggatcacacgtccaggagggctgcccctccggctttcacacatccgtacgggcccggacgctctctctggggggactggagatctcagagttcaccaccttgagcagcatgtccaagagaactttctgggataagggaatgttctagagctctgctctcaatatggtagccactctcacaatattgctgaatgttcttgagctctgcttacaatacggtagcattaatggtatgcatgtggtggtacagca

SEQ ID NO: 393248 - DNA, 676 bp, Homo sapiens
cacctgactgcaagagtagggttgtgtctgatgcgacctccattcccttggtcctgcgtagtaggacttgataaaatgtttgactgtgtgtggacgggagttggcacttcattgcttactttctaggttatcgaaagcaggctctgttgggttagtgttgccaggggtggcttcagagggagacaacagctcagctttccaacctttgttccctcagcatcccataaacctaagtggttttttttttaacgcactgtgacctggaaacttggattgtttaaccaaaatggcccgctggcctccctccaaggaacacacccagcaggtattgggtgtggattgtgaaaggtcagattctatcgctgtcaagcccagccttctgcccaagctcccgtggagacgtggcagaaccattcagggggccgccctctccatagaatatcaggcagtcatccaaagatgtttatagagtttatgataacgtgggaaagtgcctctgctccagagttaaatctaaaaagaatacagcatgattatagctctgtgaaactcgcacgtacacatacagccaaggcctgaggggaagcacatcaccagggcagcaggaattgtctttggattggattaggagggactgtgttccttttctccttctctgtcatttctacattttcta

SEQ ID NO: 393249 - DNA, 471 bp, Homo sapiens
ggaatttgggattgtcactgtgttgtggctcaggtagcttcaaacagtagaaattattttaatttaaaacatagaagtggctgtgggaaccagttagaaaaagatttttcttcccccaaaaccaaggctggggggtgtggaagcagatgcagaggtgaagatggaaaacatcagctaagcattgccctggtggtagaaaatagggaaatggttaagaaaagagcacccctaaaaggatgggatcccaaagatgggggtggggtagaaagaaaaaccttgcttcacaaggaaaacctgtctcttggctgtgtacattgtacttgggtaccctattaaaaaacaactagtgtgcatgaggtgcacatattttatttatttaattaaggaccttgggcagatactacttttggtctggtaaagaaatgcttaaatattagtcatttccaaggaagaataatttcaagagtacat

SEQ ID NO: 393250 - DNA, 250 bp, Homo sapiens
tctctccggtccgtgcctccaagatgacaaagaaaagaaggaacaatggtcgtgccaaaaagggccgcggccacgtgcagcctattcgctgcactaactgtgcccgatgcatgcccaaggacaaggccattaagaaattcgtcattcgaaacatagtggaggccgcagcagtcagggacatttctgaagcgagcatctttgatgcctatttgcttcccaagctgtatgtgaagctacattactgtgtgag

SEQ ID NO: 393251 - DNA, 275 bp, Homo sapiens
gggcagaaatggctggagagacagaaacactggacacatggctggtcagcctggttgtgtggtgtctgttacagaagagagtccagctttcctgagcaagtatatgtttagcttcatttggtagaaccacacagacctgtactaagtgtgtcaatacaacaatgccaatgcaaaacaaatatccaaaggcctctgagatgggtgaagccaagggaatctaaatctgacccaagatgtcccatctgttcccctcctgggccattccaatcccccct

SEQ ID NO: 393252 - DNA, 615 bp, Homo sapiens
gagatgactcaggctcaggtctgccctccaggggctcacagacagaaaatgaatcattaccaagatgggggacctggctcaagagggagtgtcggggcatccctggttaggacacccatgggagtccaagtgcgaaccaggaaggacccagggggctctagccagcagggccgggtgctccctgccacctcctatccccatgctggtgtgggggctgctaggctttgaacctgtgggaatggttgcagccacaaatgccagccaggactgggcagaggctggcaccccagcctggggcttccccctgtcctaggagctctctccaccttgccctcccctgctgccctgaatccagggttgggtcacagccagatgagggtcactgaggtccctccaaatcctcaggctgctctcagccctttgctgtgtgcaggaagtctgggagatgggactccagcctcctggctgttggccccttgggcttcgagggctgcctagaggaagagtctggtgctagggacaggggcaggaggaggctgggtccagcaggcagagcactgggggctgtggagaaggccctggtcgggagggggaagacctgggctctagatcagt

SEQ ID NO: 393253 - DNA, 270 bp, Homo sapiens
ggctgacttagaggactccccacggcaggtgtactcattgatattggtgttcacgtcctggagggcagagacagccctctgaaggacaggataggcactggcatcagggactgtgttctccaggattttctgcagcagcagtgggtacctggtgatcctctgcagaggaattaccagcaagaaactgaggcctgaagatccagcttgcggcaccaccgcctcaacgatgccctgagtacaacctgggggtggagtacaacctgccggtgg

SEQ ID NO: 393254 - DNA, 521 bp, Homo sapiens
agaagatgctggcttggtggggcttctgagggctctggccttcatttggctgtgagagctacacacatgttcatatacttcacttactcctctagcaaagaaaaagttctttttccaatttcctcagaaactccaggccaacgtaaaggtttcctatctaagttagtatcagaggcataagaaatggtaaatatagcaaccatgcaaataatgtgtagctagagggaaggaaaacgaagagaaggaagaaaataaaattaaaaagtaaacgacaaaataatcttggaagcttttgtgaaaagggaatcaggatacacagattaaatcccagtctgaagttttgaaatgctctttattcattggaagctatcaggaaaagctgcttttaagaaatccatcttacagcctcaaaattaggggcccagttcaattccactcagccaaacaagtaccgtatgccacaggtaagagcaccgtgctaaaatatcaacgtggttaagattctttttaaaatgtggttg

SEQ ID NO: 393255 - DNA, 177 bp, Homo sapiens
aaatggaagcagaggtcagagaacaagcaaaacaaagacaaatgaggattgggaatgaagtatatgtgggtaccaaaatgcaagtatttgtcaagaaaaagaagctctgtaaagccagaatagaatcaagactgcatagtcagcagcctattttttttttccaaataagcacctggg

SEQ ID NO: 393256 - DNA, 372 bp, Homo sapiens
tttgttgtcaaaccaaatccatatggagccggaatgggtcacagtaactggtgcccattttctccatcctgcagggttgggactccaggcagggaacccctacacacctctgttttgggaggtggggggatgaacactggtcccagggccctcaggcagctgaatgggtggccagggatcagtctccactatgagagaccacagcaggggagcagctggtctctaaggccgagcaaagccacagtgcaaagctagggtctcaaagccaacagaggccagctctgggctaggggcaggacagcaccacaggcccgggttggggaggggctgtgcacatgcagaagtgcaccccatgttcttgtctatgcaagg

SEQ ID NO: 393257 - DNA, 328 bp, Homo sapiens
ggagaatggcaggttagctgtgctcaaagtctagttccaaccaggcttcacttaaatattactgtgttatttgataatcaagcttatacataatggcatgtaaaactaccttttaagcttttttttttttttgagacggagtcttgctctgtcacccgggctggagtgcagtggcgcgacctcagctcacttcaacctccgccttacgggttcaagcaattcttctgcctcagcctcctgagtagctgggactacagacacgtgccaccacgcccggctaatttttttgtatttttaatagagacggggtttcaccatattggccagg

SEQ ID NO: 393258 - DNA, 351 bp, Homo sapiens
caccaaaactcactcactatcaccaggacagcatcaagccaggagtaacctaccctcatgacccaaacacctcccaccaggccccacctccaacatggaggattgcaattcaacatgagatctgggtaaggacaaatatccaaacaatatcgcctactgaattggaatctgcctgatcctcaggtgactcataagcacattgaaatttgagaaaagctggctcccatctataacggcacgacttcaaggagaatataatatatttagtagccattgtcatagaacccggtctaaatacttgctcttcatttgcttcattaaaagaaatagagacctcttactatgaggatt

SEQ ID NO: 393259 - DNA, 352 bp, Homo sapiens
catgcatcacacctagtccatcagtcaatcctgttggctccatcttgaaaacagatccagaatctgcccactttcctgcctccatcatttcccctgtgatccaagccccagggctcccgccgtgtcctaagcatcaaccttctcctctcatgggctgtggtctgtgtgcaatcaacataggagccagagcagtcctttgcaaaagtcaggtcacatcacaccagtcctccctctggtgaaaaccttccagtggtcccctgatatggtttggatccatgtcccacccaaatctcacgttgaaacgtaatccccagtgttggacgaggagcctggtgggaggggactggatcat

SEQ ID NO: 393260 - DNA, 221 bp, Homo sapiens
  misc_feature (39)..(39): n is a, c, g, or t
ggctacaatgacatgccaggccttatatggtctctcctnatagcccgctctacccattccttacctctccaatctcacctcttactatccaacaccttattcacttctctctgccctgctccatcctgtgatcctgcccctactttcgttcacctgttctccctttgtcctgtcactcacccctttccacttcccctggcctattcttgaagctggtttgt

SEQ ID NO: 393261 - DNA, 294 bp, Homo sapiens
cacggctggggctgcatgttccatggaactggcaggagctggggacaggcaggagcctctcccattctgagtcggggtggcagctccctgcatgccgctgcagctgcccaagccacggctgtggacccaggcatccctgtgctctcggagcctgggagcaggtgggaaccccaccctcccaggtgcagctgcagccgcccaaaccacagctgcagaccggggcctcccgctccacggagcaggctggagtcctgccccacatcccacatagctgcaccggccctaactgccact

SEQ ID NO: 393262 - DNA, 258 bp, Homo sapiens
gactggacagagtcagcactggggaaatctagggtctgtggttgccatggtctaaggctgtgatttttgtctccagaagagtcaagtctcaaataatagtagcatttatataacatcttccattcgtgaagcatcctttgtccaaaatgttctcagcacacacccaggtagcaggggcatacggaggaaacgcgggtgtacggagcaaactgtgaggcatacggaggaaacgctgtgaggcatacgcccaggtatgca

SEQ ID NO: 393263 - DNA, 623 bp, Homo sapiens
gacccactttgtgtaatacttaattgcctgtgtttttacaacacaagtcagaagttctggcgatagtggactatcacccaaaaaagattttctgagacatctcatcagagctgctcgagtaccgcgcatgaagacggtgttagctctgcagggcatgtgctaactaccagacgatgaaagaacatttcctctagtttctggataatgagcaggcacacaggtaaagatgcctttctcagggttgacgccttttgtttcctaatgattctgatgattttgttgaactagacttttaaatattaattgttacctgcatatgtttgctgttgtggtttgcagagggctcagaggaacaagcattttaattggtatcctgggactgtaataactttttattaaaagtctggaaagatagtaatcaaaaatagactctcatctctatcttctctgtgcccctggcaaatatcctcttcatcaattttgtttttattatttgccgtcaagatggttatctctaaatatcagatgcttcaatccacagtgataaccatgtgtgaattaatgcttgataagcttcaggttatcaggtggagaagtgtggttaaggcatacagaaagaaaaa

SEQ ID NO: 393264 - DNA, 532 bp, Homo sapiens
ggctgaggcaggagaatcatttgaacccggcaggcggagtctgcagtgagctgagatcatgccactgcactccaccctgggcaacagggtgagactcagtcttaaaaaaaaaaaaacaaaacacacacacagagacacacacacacacacacacacatatatagtggtgagacgggcacaggataaacattccagttccaaaaaagggaaacagaaaaaaagaaaaggagtaacaggtccccagcaagtcctgaacctatgggtcacagcacattatggtttacggcttgagaataatctgcagaataatcctttttgtcttgatgctgtgctccccaggcccactgtgttgggaggtgaccccgccttccaaacccacaggtggcagcttcactgggcaggagttgagtccccaaggccctgggtggccctgcccctggcttttggtggtcccgccccatggcagcccctggtgagggcctgcccttgaggtggttctctgcagtggccccacctctgtggcagctctgtc

SEQ ID NO: 393265 - DNA, 426 bp, Homo sapiens
actcctctggcaatgagcttcctgtggttccttaaacatcccaggcaggctgcttcttcagggatccttcggtgtagaaagcactcctagttaaattttcatgccagtcactacagtccagatctccttggagaggcctcctccaatcacctatctcaaagaacacccctctcactagccatccccttactgggtttcattttccttcccagctcttctctctgcacaatattgctatgtatttatgtgcttgtctgtctccttccagagatttgggatgattgctataacctccagatcattaaatagtgcctgggaagtggagcgctcagtaagtgtgctgggtaataactgtaaaatcagatataatgaaaaaaagttatttggttttaaagagataaataagaaggttgggcacggtggctc

SEQ ID NO: 393266 - DNA, 188 bp, Homo sapiens
tctcccccaggtagggctgaacatcctgtctgatgaaactgaggtttgtgaacaagctccagaggtaggaagctatcctcattgtaaatgagatgaaaggcaggagtcagtggggcctggagggacctagaaaagctgcatcttcgcaaatgggaagactgagagcttaggggttagcgtggccttcc

SEQ ID NO: 393267 - DNA, 322 bp, Homo sapiens
attttaaaggtatctcagaggtaatttttttatcatgtttataattattggcagtcagttattgttattaaacatctctaaaaacaaaaagaatccaagagtctgaagagactactgaaatgagtttcaaaaaaaagatgcttccagctttttcctcaaaatgagaaactgttttacagatttttatataattaaacaggtaataaataatgccagattttagctcacaaagcactggatttcccaaaggaaatacatttggtgcaggtaaatgaaaagcctcgttaataaatatatatttgataatctgcaggtttgaaaa

SEQ ID NO: 393268 - DNA, 331 bp, Homo sapiens
gtgtacctgaaatatttttaaaaaaataaattatcctgcttagtgtgttaaagtagacgatgttctaatataacactgaagtgcttcatgtatcccaacagtttaccttcaagtaatatttctttatatattctggataccagtcccttattcattttccttctgtaatgtctttttgctttcttgagagtgtcatttgaggcaggaaagtttttaattttgatacagtccaattttttcttttgtcatttgtgtttttgatttgtatctaagaaaccattgcctaacccaaggtcatgaagctctactcctatgttttcttctaaaaggt

SEQ ID NO: 393269 - DNA, 539 bp, Homo sapiens
tctttactatagtttataggactcttttgctgaagataattctggactatatagctgagatataaaatgtggaataaaaatatcttatttcttaccacttcatttataataaatgattaaaacagttttggcagaaaaattctacaccaggatatctaaatcacataataagccttaatggaatctttgtttcttactgacatcaatggtgctacttatgtgaaaggaaattgggatctctgtatagattccaggaaatctgaacacacacactcatttgtctttctactctgcctttgctaatccttgatattctactccccaaaggaagtctcaccataggcctgtgtagactttagttcatgcctgcgtgtgtatgtgttgtcatttttagggacatatttgcaatctaatgtgatttgagtctatgtcagtttaattgtccccatttctttttacctttgttctgtttgccctcagataactttaggagtcatcattcacctttctctttacactcttcatcttccttttttttt

SEQ ID NO: 393270 - DNA, 398 bp, Homo sapiens
gttacatttaaaactttaggggttttggataaccagcagttcaggtaagtccatgtaagtcagaagtgtgttgtggttgccaaaaatgcaatgcctgtattatatttcaacgaaagtttccttttaaaaatgtaatgcaacatagtcatacaccaatattcctagcagcatgattcacaatagccaaaaggttactcagacagtccatggacagatgaatgggtaagcgaaatatgatctagccatacaatggaatattattcggccttaaaaaggaagaaaattctggccgggcacagtggctcatacctgtaatcctagcactttgggaggccgaggcaggcggatcatgaggtcaggagttcaagaccagcctggccaacacagtgaaaccccat

SEQ ID NO: 393271 - DNA, 264 bp, Homo sapiens
ggataggggacatactattctgtaaaaggaattaaaggcgaaattgtgaatataaaaagttgatgtaaggagagattgcatgagtgtgtatgaatgtatgtcctattaaggcttcctctttatccttcaaacagttaagatttgtaatttggggaattaacatttataagagtaattttttcttcaggttgtaaggcattaatatagttgcatgttactaattaaatgtattaacacatttcagggagtatgtgtgcataactg

SEQ ID NO: 393272 - DNA, 438 bp, Homo sapiens
catggatactaatcttaagggtaaacaaaggttgtcaagctatcaagactgttttaataatgatgattccaaagtaaaaaagtaacaatagtattttacatttatgtagtgtattagtctattctcacactacttataaagaactacctgaaactggccaggcacggtggctcacgcctgtaatcccagcactttgggaggccgagatgtgcggatcactaggtcaggagatcgagaccatcctggctaacatggtgaaaccccgtctctactaaaaaatacaaaaaatgagccgggtgtggtggcgggcgcctgtagtcccagctactcgggaggctgaggcaggagaatggcgggaacccgggaggaggagcttgcagtgagccgagatcgcgccactgcactccagcctgggcgacagagtgagactgtgtctca

SEQ ID NO: 393273 - DNA, 343 bp, Homo sapiens
gtctatacaattctgtaatcattaaaattgagaaacactgaaggaaaaaaagaatgttcaagatgaatgttccaagttttaacctagacaaattttataagttcaaaataggagctacaataaaagagtgaaagaccttaacacatcactttcatacttggaaatattaggcaaactttaatgagaaacaaggtggctccttgttaacaggcaatctacaaagacgtaaagcaacttgtccagtcgccaagtgggagctcatcagaggagtcaagaataattatagaactgctgctgtctcaatccagttctgtacttaccactctgagacgtgatataacag

SEQ ID NO: 393274 - DNA, 374 bp, Homo sapiens
ctttggtatgcaagtgtactggaatattcccctgcatctagctcaggtgggcagggccaaggcctctgcgacatcactttgctctaccccaagacaggagtcgaagtctcagcctcaagctcagggatatggtccaaagaggtggcaatttagcttgaagtccctgagcaagagtaaaagccaggaggaacccaggcctgaataagcgcactgccccagggttccccaaggggagaggagctatagttctccaggtgcaaagatcaccctcagagctcacacctgaggtaaagggcatgcaccaggaggagcagggtttttgcccataggggtggcccaggccagatactgccccagacactttgcatccagag

SEQ ID NO: 393275 - DNA, 290 bp, Homo sapiens
ttgtgccactgcactccagcctgggttacagggcaagacctcctctcaaagaaagtatgcttcaagttctagaatattctagaatacaaatggtacaccaacagaattaaattactgtattaattaaattgtgacaccggtaacgaaagcagtgctcatcataatcccaaaacacacaatcctaaatgttgaaatccaaaatatcaaaatcccggaagtctaaaatcctgaaaatcaatcttgaaatgtcaaaatcctgacagtcgaattctggggaaaggtttagcaca

SEQ ID NO: 393276 - DNA, 194 bp, Homo sapiens
tcaaacgatagggctattattcctaatcctatcaagtcttaatccctttacccagatcccattgttcttcacattgtgctgttctcaaaatattcagctttaaacttttccaaacataaacctgttctgtgatcagatcagtgactttgtcctttgattcttctcccttcatatcaaacctacgtgtgcatgac

SEQ ID NO: 393277 - DNA, 1324 bp, Homo sapiens
agcccagagagccagcccagccctgccgaccgcagcactctcggaagggctcggccacccggagcctcgtcacgagtcttacccagggttcggagcgggcctgcaagaaggggcaggccaggctggggctgcaaggcagggtcttcccttggagaagggacctgactctattattaagagaacgaaagaggcacttgccctacagtgtgtagagcatggcctctctcctggaatggcatcttatacatataacccattggagccaagagttttacctttacatgcaactacattttcagagattgatttgacttcctcttcagatgttttttctattcaagaggtaaaacatagggatatttggactctcagaacagcggtctggattttcctctttgacctttgcttacatggggttcctcagaaagcagagtctcagataaaatatatatgctatatcttttgaagaacgcagttccagggaagcaggagaaaagaaaaggagaatgagtcagacaagcaaggaaagcgaccggaattgtgccccaaagagctggcggctgcgtggtaggacatgcatactgtgtttaagctcccatttcacctttcattttctgaaagacctgtgaactgccgcatctcacaggggaagaacccacagaacattaacatctccatttccaggctgcagaggtaccaagccagtggatcctcccgcccccatgtctctcacaaagctgcttgtagcccagtggggaccagcaggcgtccaaggaccctggggagccgtggtggcagctaggctgtgtctcctgcaggcctctctgaaactgcctggctggctcatgccctctcattctgtccagtcattgacggtggctacactgcattgatctgggaacacaatgtcatttcttccctgacggcgaagagacaaatccagcaagccacagagcccctgtcacggagtggaaagcgatggtctctgaagagaatcaacaaggggagttaaaaaaagcagaaccaggctgggcacggtagctcacacctgtaatcccagcactttgagaggtcgaggtgggcggatctcctgtgctccaaagtttgggaccagactgggcaacacagggagaccccatctctactaaaaataataaaaaatacattcgtgggacatagtgcatgcctgtggtcccagctactcaggagcctgagatgggaggatcgcttgagcccaggaggtcggggcttcagtgagccatgatcatgccactgcactccagcctgggccacagagccagatcctgtcattaacaaataaata

SEQ ID NO: 393278 - DNA, 577 bp, Homo sapiens
accacacccagctaagttttgtattttttagtaaacctgaagtttcatcatgttgctcaggttcgtctcagaacgcctgggctcaagtgatccatctaccttggcctcccaaagtgctgggattacaggcgtgagccaccatgcccagccatgtaatattggttttaaatcacttttagctttatagtaagtggtgttaataactaaatgagcaaacctttaaatcttgaaatatatgtgcaaatatgagtatgtgtatatatataattagaaaatacatttgattttacaggaaaaaagaaaatatgtgatttttaaaattcattgctacatctcagtgacatccagaaagggatgtaggttctgctattatatcacttcactaatgtgtttttaaccagttactgtagttcccacagtaagcaagttaggtaatgtatacgcatatttgagtgtcagaattaggcccatttcttctctatgtcagtacaagggctatgatgactaactcttgagtatcacaattatgattcaccagcacagtttaaattggagaccctaattatatccttctcac

SEQ ID NO: 393279 - DNA, 347 bp, Homo sapiens
gtctttcactgcatctcagatactctaaaccactcaacagatgtctggagcaggcatagcaatctgggctttttcattcactgaaactatgaaagcagcatattcagtatcttataaaaaaaggcatggctaatttgcttgtaatttaagtttcacagactggttcattaatcaaactcataagagtatcttcccctcttctcttttggctttcctttacagagcaaagcctcctgtgtatgtatgagaaggactgtagcagcgttcgtagataataatccagctattgctattcaacagtagcataaatgaatgttatgtcacagggtctgttttgtgtgaaagga

SEQ ID NO: 393280 - DNA, 683 bp, Homo sapiens
gcactccagcctgggtgacagagcaaggccctgtctcagaaatatatatatataacattttaagaattatttcaacatgtaatcattataaaaattgagatattttatgttcttttaaggatattaagtctttgaaatggcttagtggctactatattgaacagtgcaactctagatctggaacagaaaattgaaaaggtatggaatcaggtgacaaggtcctggattatcatgtagagagtgaaggaagaataaaagcagaactgatgatactgatgatgcctgacaactgtaataaagagatggcaaacagacttcatatccagatccaggctcaatggcagagaatgccatgtctgattagcaatgtctgccatggtccttgaaggcatttaaaaatattcttggagactgaattaacagagacagccgacaaagagggaaattaggaggggaaagtttaagtactgagagaacacctattacaggtgaggaaactatggttgccagattttgttcaaggttatacggctgcctaccaagcattccaaagcctacactcttgtattatatagggtattatgctgctatgtttgtggtgggtaaattccaccacaggttaagtcacagaaagtggtaaaacaaaacaaaacaaaaactctaaatgtttaacaaaaactcac

SEQ ID NO: 393281 - DNA, 783 bp, Homo sapiens
tcatcctagaaaatttagaaaattttcatcatcctagaaaatttagaaaattttcatcatcctagaaaatttagaaaattttcatcatcctaaaaaaatactttgtgcccatttgcaggcaagtcctggtttcctatccccagccccaatcactaaaaaactttctgtctataaatttaccttttctgggcatgtaagtggaattacacattatgcgatcctttgcatctagtttcttttacttagcataatgtttttgaggttcatccatgttgtagtatgtctcattacttcattcctttttattgctaagtaataatccacattttatttaacagtaccaattaacagacatttggatttcttctagtatttaaatatagtgtttaattgtactaattgtaattgtattacagtaaatacagtacagtatttagcattatgaataatgctgctatgaagatgggtacaagtttttgtatgaacgtgtgttttcagttttcttgggtgtatatctacgagtggaattactgtcatatggtaactctgggtgtaacttttcaaggtgttgcacaactgctttccaaggtgaatttcccattttacatttccaccagagtgtatgagggttccaatttgtccacatcctcaccaacactccttatgatctgtcttattcattgtagtcattcagctggattttaagtggtatcttattacagctttcatttgcattttcctgatgactgacgatatgaagcatcttttcatgtgcttgttgac

SEQ ID NO: 393282 - DNA, 437 bp, Homo sapiens
cctgttgccttagctatttccccagactccacttactgtggtaatagttaggaatgacttcctgcttgaaataactgcatagcagcaacacagaaaggccttgctcatcagcagcaggacattaagagcaggaaaaacaatacctggcaaccaaatctctgctcaactttgagtgaaggcaaagaaggtatccttcggtcctacctcacactagcacttttcctacagatttgctggcccacacccagtcttgaaaaacacttgcaggtaaccttagcaaggcttcagctttataagtgagtgagtcagatggttattacaatatctgtgcctaaaatatggacaaagatggtgagtcaagatattgtggctgtttctggctataagaggcacaggggaaatataggttagataggtaaatactggactttttcaga

SEQ ID NO: 393283 - DNA, 196 bp, Homo sapiens
gaaaggtagagaaaacagaaggtacaacattttgtggctcacaggatatatgagtgagattatatacttctattccaaaccacaaccttcactagaacatctaaaggcttcattctagaaccttcatactgcttatcccaaaggctagcccactccccggttttcatgtaagaaatcttgtgggacaggcgttgca

SEQ ID NO: 393284 - DNA, 230 bp, Homo sapiens
cctgggcaatagtagcactgtgggtgcttggtgctgtccatatcccatgtggaattctgtgtccagttctgggagcccctttaaaagggatgctgctagcctgcaccatgtccacagaaggtgatggaggtacagaaatcatgcagcatgaggaaacttagctgtaagaaaggagacctggggaccatgtgggtgctgtgcccaccctcttgacagcatccctgttgtgg

SEQ ID NO: 393285 - DNA, 320 bp, Homo sapiens
aatgaaactgtatgtgatactaatcatggctcacccttactgaggtctcctatgtgccaagcactgtgctaagtggttctctgccgtgtcaaaatctcatgtaaacctcacagcaaccctacgaggtaagtctcgctttcctccaattttatagaggaggaaagcgaggctctgagaggtgaggtcaactgagctgacctggctagagttgtcaagtgggccgcccccctctgcccctccctgcacatgttcttgcgtacctctcacatctgcttacacttcgcgctccctcttgtgccattcccagcgtgtctgtcttg

SEQ ID NO: 393286 - DNA, 147 bp, Homo sapiens
ccgtagcttggggagttccacattaggacaagaggagcgcctctgtttaccgtcgtggctcacgcacggacttctgtgcaagcatttgccccacactcattcatcgatgatgtgctgggcactgtgtcgggatgcgggagtgaatcg

SEQ ID NO: 393287 - DNA, 419 bp, Homo sapiens
gaaggatttcaagattggaagtagatgatgtgatgcgttgtgatgattcaaaaagctcaatctgaggccgggcgtggtggctcacgcctgtaatcccagaactttgtgaggccgaggcaggtggatcatgaggtcaggagatcaagaccatcctggccaacatggtgaaaccctgtctctactaaaaatacaaaaattagccaggcgtggtggcgcatgcctataatcccagctactcagggggctgaggcaggagaattgctcgaacctgggaggcggaggttgtagtgagccgagatcgcgccactgcactccagcttgggcgacatagcaaaaattgacggtgacttggactaagctgatggtggtggatgagggagaagagtaggtgaacttgagagatatttatttagaaggtc

SEQ ID NO: 393288 - DNA, 732 bp, Homo sapiens
aaaagaatctatttcatgagattgtagaagggagtaaaggagtggaggaaaggaagtctatgagccactgggctagaggccctttcctttctgtggaaaagctcagttcttgccatctgaagacagaggtggctgactgcaataataatataaggagtcagaaaggtaccctgtctcccatttcatattgcctaagaaccagcctttccatattgcctgacagtcaaattgttaaagttgcttattttgtttaaggaagcaattttcaaagtatgttcacaccctaaaggtgttaatagaattcccaggggcccaaggattggttaagtttaagacagatttggtgaaacagtgttaaattctcttactcaattctcgcagccttttaattgtgcttgttatttttctcagaaggggatttagcatttaactcttcaaggatttttatgttttcttgggccatactttaggaatagttggcttaatgcagcacttcgaagaggacgacattttgggtgggatttcagaaagccccaccaaactgatttaaatcaataaggaactagttaggctcacgcaacaagaatgtttggcatagattgtccaggctggtacagtacctaactgatgtccaggaaccaggcttattctgtgttcctgccctggcatccatagctcatattactcacctcatggctccagggtggctgcagtgccaccagacagaatgag

SEQ ID NO: 393289 - DNA, 1057 bp, Homo sapiens
taggtaaataacttttgcctatctagtcatgggtgtgcttttaccgctatattaggttatttaattctcatagctggtaatgttaaaaatgagattaacttgatctcagagggataaaggaaagattacaagtcccccacctcctgccagtagagaaaggattggaacctagcattttcattaattgtatgattttggaaccatactctactcgggtacctgggcttctatttttctcaaggacattgaagttcagtagtttcttttgagtagacaagttttaatttcattctgtggcttttgttaaatgccagacttctgaaatagttcattttatttgtttgcctgtatttttattgttttagagggagagtttgttcactgagttcctcattcagccattccataagtcaatctccaagtgtttgtttttatatcacgtgtttttttcccccaatgacttaaattctgtcttgctgggttgtgctagagaaagagggaaaaatgctaaatggaaagagcagatggtagaaatataaggcaaaaggagatggccaattccaatatccataagagtaaaaataaacagtgactgggacactagccagaatcaagaaactttaggtcccttatccattctgaccataaagaatacctaaacctatcacttgtttctctgattctctagtccctcattgcctacttcctataccattcctctttattccatcaggagtttggagctaattaagaattcctaatttctctgtagaggaaaggaaatgggccgggtgcggtggctcacgcctgtaatcccagcactttgggaggccgaggcaggcagatcacctgaggtcaggagtttgagaccagcctgaccaacatggagaaacctcgtctctactaaaaatacaaaattagccaggtgtggtggcgcatgcctgtaatcccagctactcaggaggctgagacaggagaattgcttgaacccaggaggcagagtttgcagtgagccgagatggcgccattgcactccagcctgggcaacaagagtgaa

SEQ ID NO: 393290 - DNA, 409 bp, Homo sapiens
acttggggctaaggggataaggagagaaatgaggtaacagaagagacaggatttggggttggaattggatacttgttcataagagaatttcccggagggaggagtgtggatttggggtaggcagtggcctagagattatcgaggacccaggtgctggaaagaggacttcccattgcagagacttgtgaagaaaggagtgggcctgtgtgtgtgtctagagcaggagggatcgtggcaggaatgcctagcaagaaagggtagtgggttagtagtgacctggtggtctgggcagagagtcatctctgagaggaaagcgaattaggtgctttggagcgtagactctagactaagacagacttcgtttcaaatctggcttaaagatattggcagtcacttcacctctgtgggc

SEQ ID NO: 393291 - DNA, 375 bp, Homo sapiens
acttggggctaaggggataaggagagaaatgaggtaacagaagagacaggatttggggttggaattggatacttgttcataagagaatttaattctgagtgtgttagaatttgaatctaatttgtcagtcattccttttgatatcagagcttaatcagatgtgccatgttaaggtgatgtctttttatcacattaaaccttgacttatggatttcttgagtttaaactctacggtggatgtgcttttctgtgtctctgctaggaagagggacgctttgcatttggactccagttagtctagctgagctctttggccttggaatggggtcatcggaacagaagataagtatcataagaaaacagtgctccctcctt

SEQ ID NO: 393292 - DNA, 850 bp, Homo sapiens
aacagttctgtgttattgtcaggcctctttatggcagatcgtgcaggtcgcaagtggatcctgactgacaaagccacaggtgggttcatctttggggaaagaaggaagcagctggaggatagagtcactgtgaggctgtcattccaggcgctgcttcctgcttggatggtgggattcctctactgtgcagtccccctcactcggtcacctgatagttttagtaaccattgattccattgattatctgatttttctagtgttaaatgtttccttttcatttattagctggaattcttttttaagagacagggtcttactacattacccaggctggagtgcagtggctattcccagactacaggttcgaactgctggcctcaagtgatcctcccacctctagttgggattcttttataaagaacttgtccccattaacaatttggctatgctaagtacagttcagataggaaaagcaggagaaaaacttgatgaagatgaactttattgggatagagttctttccatcttactctaaagccccattactgtctatttccacttactgatctgcttttttcaggtgtctcactgcctagagcaaatttaattctgccctttatgtgctcttaaaaagttttagtttttttgtggtttttttcctaaatggtgctctacagattatgctgagtgaggggatgaaaagtcacgagtacatctttggaagcttccttgcctcagcgtatccctgctcagatagaagaggcagggactggatgacaggcacatgggggttcattgtactcctccctctcctggtgcctatttgacattttccatcataaaaagtttg

SEQ ID NO: 393293 - DNA, 273 bp, Homo sapiens
attttgccttgtagatcacgttttctgcagctggcttaaagtatttaaaacatttcaatatctctggaatccatagtgtttctaccttgatttatctcagggttggaaatagaaccatgatttaaaataaaggataatttagtgtctaaatctggtggctgaatccagcccctgacacccacaaatggggtttgagtggccagttgacctggctgcggactggggtcagcataggggccacggcctggattccctgccatgtgctgcatctgc

SEQ ID NO: 393294 - DNA, 411 bp, Homo sapiens
ctcccaagtagctaggattacaggcgtgcaccaccattgccagctaattttgtatttttagtagacatagggtttcaccatgttggtcaggcaagcctcaaactcctgacctcaagtgatccacccacctggcctcccaaagtgctgagattacaggcatgagccaccatgcccagctcaggttcctattttttatcttcttttgtagaacaaggctctattaaactcccaattggtatttatatgtcccaccttccagcccaaccatatcatctaataatatccgtctaaaataacaatcaactttggaggtgttttttttttaatctataaattgatgtggctctactaatgctagtatgtagccggagttgtgaatcatataaatccttcagaagtttatcatgcctg

SEQ ID NO: 393295 - DNA, 496 bp, Homo sapiens
ccgcctcttttacgaagcggctgtcatggttgatgggtgagtgtcaggccccacccagggacagggaggcccagtgccggctgtggagttacccagaccttacggtaaaaacgcatcaccctgaatgggggccaggccaggcatcggcccaagccggccctgcccagcggctggattctgactcgctgtgccttagtcacaggccagagactcttctgcttccagctgaggctgtcccctgccttccctggcggcccgggttcctggaaaagctgtgtgccagaggacgggagtttccctccaacttaagccattagaaagctcatttattgagcacttactaagtgtcagagactgtgctaggcactttacatgaatcttctcatttaatccttttaataaacttccggggcacatgctcttctaatctcccttttactgatgatgcaggcttgacagtgggaatgctaaccgcagaaagcagctcacctcactt

SEQ ID NO: 393296 - DNA, 414 bp, Homo sapiens
tttcccagagcaattgacaacagacagtcatgtaaacatacccagtttaatgatcatgtaagaagatgatgactatttcagtctgtccctttgagctggctctgcatagactggcaagacacaagcgttttgtacttgctatttctagataaagatctcactgctgtaaaagtcttgcttgaatccaagttaccatatgaaccagttggaataaaaatcctaaacaaagttccttaactagctgcttccttctgagcaggctttttgacagttagagatctgatgttttgcattaaaaaatttcagaaaatgaacagattttcagacatgctgtagtacagaatgccctcttctccagtttgttttccattgtctcccactttttttttttttttttttagctcacttggaaaa

SEQ ID NO: 393297 - DNA, 386 bp, Homo sapiens
gcattgcctcagaggaagggtgaccgaaggagagctcgagaaacggaaagagaatgagaacagagagagataaagaaaagcatacaaaatatttattgctgcatttccgtgccttctccacaatattgaggcctgaattaggtaggtagttgaaatctctctaaaagtgagtcagatattgtgtccggaattggtgggttcttgatcgcactgacttcaagaatgaagccgtggaccctcgcggtgagtgttacagctcttaaggtggcgcgtctggagtctgccccttctgatgttcagatgtgttcggagtttctttcttctggtgggttcgtggtctctctggctcaggagtgaagctgcagatcttcgcggtgagtgttaca

SEQ ID NO: 393298 - DNA, 406 bp, Homo sapiens
aagcagttcttctgcctcagcctcccaagtaactgggattacaggcacacaccaccacgcctggctaatttttgtatttttagtagagagagggtttcaccatgttggccaggctggtctcaaactcctgacctcaagtgatccaccggtcttggcctcccagagtgctggggttacaggtgtgagccaccgcgcccggcctccacttgagttcttttttttctgggttgtaataagcatccacttctagcagtgtggtctgcattagcttgaataactgaatgttactacttgttttaagaaaattttagatcactgttaacctgtaactttattttaacttgaattttcccttaacctgaagatgttataaaatgattttaaataatgagtctgtggaatcttt

SEQ ID NO: 393299 - DNA, 227 bp, Homo sapiens
cgcgagccctttgccgcccgcactgctcagcttgcagtcggcattcttcaggttccccctgaaggtttggcctcccccgtgggactctagtgggcagccactcccttggggtgtctgggacctggtggatgtgtcccagtcacatcttatggtcaagaaattgtattaggcaaaagcagtacaaaagagcctctttcgtttttcctaatttccataaagcagaaagc

SEQ ID NO: 393300 - DNA, 358 bp, Homo sapiens
acatatgtatatatagtatttatacttgtatattacagagatagagggaaaagacacctcattctcacgccttcaaccataagctctagttctcctctttttttgctttttagatgagacacagagggacacttgggggctgaaaggaaggacctccctgctagagctgcacggccaagcccttccttggtgctttctctgctatctccagctctcttgctttctcttccctggggccacatcttctgatcatgaccagtctagtggcattaccatgctgcttcatatgttgtggctcagtgagttgtctgtggagaaacttgactaatgaataatgacagagtagaaagaatgtgaa

SEQ ID NO: 393301 - DNA, 422 bp, Homo sapiens
tctcagcgctactgcatttgaagtgctttgccaagaggatcatttcccacaaactgaacaaggaccccagacgccttccattcttctagcagtgaatcttctccaaatggacttctcaatcaacccaaagtttcatcctcttcaaaaaacagagttcatgggatttatccactcactgtcagtgcagttttcccttgtcttaaaatttcagcccatatttaaatgatatttaagctaggaggaatatggaagtttccataaaataaaacagaggtctccaactcatttaatctgaatttctgtcagaaataatggttttcattatgactctttatacaaacttttatgtgtttataagtgtatataggtatataaaaatatatgtaacaaaaataaaacagtacagagtcttattctatgtg

SEQ ID NO: 393302 - DNA, 441 bp, Homo sapiens
  misc_feature (434)..(434): n is a, c, g, or t
  misc_feature (441)..(441): n is a, c, g, or t
tctcagcgctactgcatttgaagtgctttgccaagaggatcatttcccacaaactgaacaaggaccccagacgccttccattcttctagcagtgaatcttctccaaatggacttctcaatcaacccaaagtttcatcctcttcaaaaaacagagttcatgggatttatccactcactgtcagtgcagttttcccttgtcttaaaatttcagcccatatttaaatgatatttaagctaggaggaatatggaagtttccataaaataaaacagaggtctccaactcatttaatctgaatttctgtcagaaataatggttttcattatgactctttatacaaacttttatgtgtttataagtgtatataggtatataaaaatatatgtaacaaaaataaaacagtggcctcgttggcctcagcggtggagctctgcngccggan

SEQ ID NO: 393303 - DNA, 402 bp, Homo sapiens
tctcagcgctactgcatttgaagtgctttgccaagaggatcatttcccacaaactgaacaaggaccccagacgccttccattcttctagcagtgaatcttctccaaatggacttctcaatcaacccaaagtttcatcctcttcaaaaaacagagttcatgggatttatccactcactgtcagtgcagttttcccttgtcttaaaatttcagcccatatttaaatgatatttaagctaggaggaatatggaagtttccataaaataaaacagaggtctccaactcatttaatctgaatttctgtcagaaataatggttttcattatgactctttatacaaacttttatgtgtttataagtgtatataggtatataaaaatatatgtaacaaaaataaaacagt

SEQ ID NO: 393304 - DNA, 457 bp, Homo sapiens
  misc_feature (59)..(59): n is a, c, g, or t
  misc_feature (63)..(63): n is a, c, g, or t
cactacattacaaccgcacacaaaacaaaaaaaacgttgacggctaccgcttctgaagngtgntgcgcagaaacacatttcccacagactgaacaaggaccccagacgccttccattcttctagcagtgaatcttctccaaatggacttctcaatcaacccaaagtttcatcctcttcaaaaaacagagttcatgggatttatccactcactgtcagtgcagttttcccttgtcttaaaatttcagcccatatttaaatgatatttaagctaggaggaatatggaagtttccataaaataaaacagaggtctccaactcatttaatctgaatttctgtcagaaataatggttttcattatgactctttatacaaacttttatgtgtttataagtgtatataggtatataaaaatatatgtaacaaaaataaaacagtacagagtcttattctatgtg

SEQ ID NO: 393305 - DNA, 173 bp, Homo sapiens
aggcattgctgggctctggaaacacagcataaacaagaggggcaaggtccttgccttgcattggtgacgaaggtgggaagcagagataccagtcatgatccttttgcagtaatttaggcaacacatcacagtggcttagatgagggtggtcagatgggttggtttgctgatgg

SEQ ID NO: 393306 - DNA, 167 bp, Homo sapiens
ctcatgcttctcatgtaaactattaacatctgtactgatcaccttctatatttaccaatattaaagtgctatggataatgcaaaagcaagattacatagaacttgatcttcttcccatacaacactgtcctctactatgagaggagaggaattattacagcagatta

SEQ ID NO: 393307 - DNA, 267 bp, Homo sapiens
aaaaaaagaaacaaagcttattattcttactagaaggccaactagaagaaaacaaacaccttactgttaaagttaaaatgttatttgtcttctagaattaatttcttccccacttctcaggagaagtggctttgaacctatttctttagagacagggactcattctgtcacccaggctgcaaagtgcaataaagcgactgtagttcacatcagccctgacctcctgggctcaagcgatcctcctgcctcagcctcttaagtagctgg

SEQ ID NO: 393308 - DNA, 414 bp, Homo sapiens
ccaaatggaacccagccttccctactcacttttcccttggcaaccttcactagcagcaaatattaacaagtcagaaacctcagaggcacccttgactctctccttgcctaatctcccaactctcactctgagaactgttcatcttcaatgtgtcgagcctggtcctctcctttctcccctatttcctcagcccccacctgggccttctgcatctctgcagaagcactgaacgcacgggccactgcagacctgcttcctccaagccagtcttcagcactgtcacagttccaccacaacttaacaccatacccatttctaaaaatctctcaagtctccacatggctttacaaaagtctaaacctttcaatacaacataccctcattttccaaccttatttccttatcattccccaa

SEQ ID NO: 393309 - DNA, 322 bp, Homo sapiens
cccgggttcatgccattcttctgcctcaggctcctgagtagctgggactacaggtgcccgccaccatgcccagttaaatgttttttgtatttttagtagacacggggtttcatcatgttagccaagatggtcttgatctcctgacctcgtgatccgcctgcctcggcctcccagtgtgctgggattataggcgtgagccaccgcgcctggccgaacattttcatattattgaaatgatttgaaatcctgactcctaggtactgcataacttaccttatatcatcatactttatgtgactatatatagtatgtatatgtatat

SEQ ID NO: 393310 - DNA, 495 bp, Homo sapiens
tcggtaccgaatacggcaggcacaaggcatgcagagcacagatcgagcctgacgctaggcttgggagagaaccttgccttaaggtgggtcatcggctgggaagcaagggttcctagcttagggaggcaaggctaggctcttggagggaggagagtcagcccccaccctggtcagactggcccagcactgggatggggacttatagtccctgcttccttccactctgggatactgggtggagaaggacctaccccaggacaaggccctgtggctctttatggttcctactgccctctctgggaggcagctcctgggacaatctgtgaccagggccaaggatggagcaggtgctcaggtcagaccaactactgggccctcttccccactccttgagtgtctgtctctgcgcctcctccctctgcctcatcctgttcttctccctctctctggctcaccatctctgcttctgtcgccctctgtctttccctctctccc

SEQ ID NO: 393311 - DNA, 252 bp, Homo sapiens
gcacaacggaagaagaataattgtcttgggccacacataaaatacactaacactaatgatagccaataagctaaaaaatatctcataatgttttaagaaagtttacgaatttgtgttaggccacattcaaagctgtcctgggtcacatgcggcctgcaggccatgggttggacaagcttggtttagaaaaacatacatttacatacaaatattagttagcttgtatggtagaattctggatattttgtcttt

SEQ ID NO: 393312 - DNA, 302 bp, Homo sapiens
gtcagagaggaaaccactgataatatgagtattctgttccagtcttttttctatgcttaatttttcctttttagaaagttaggattagcctattttgtaacctgatatttacacttcatattataaaacaagtattttcccacattattaaaaattgcaaatgatgctgatgttgttgaaagtgatttttggaaccccttcttagaattgctttcagagccaatttatgaggtgcatttatttttgttattttttggacataacttgcttttgaccctgttcagtgttactcaacttcatca

SEQ ID NO: 393313 - DNA, 209 bp, Homo sapiens
ggtgaaacttatttagacatttctcatctgccatgagaaaagtatctaattccacaactttgaatatcttccctgtggtgtccctagctccctagactgagctctggagatacaagtatctgagagcagagaatgggctcttaagaggctcactcctgatttagagaagtagacaagtaaacagatcattgtaatctagtaggaggaag

SEQ ID NO: 393314 - DNA, 309 bp, Homo sapiens
cctaagaaagcagctccttcagacagtataaaaagaacttgcctttatttctgggggcccaacagtgctcacacccacagttcaacagtgacaggaatgcaaaagtcctttcctttgcataaacaagaaattcatgatggggttattttttccatacagagaccagctcattatttttaaaatgcatctgcctcggaaatttacacaaaataggactacaaggtgccaaagtgatgtgggtacttgcaagagaacttcacagaactatgaaacttactgaaatgagtacaagaaataaaatgctaaacg

SEQ ID NO: 393315 - DNA, 478 bp, Homo sapiens
ttagcttagaacatggagttaatctcattttatttacaacatcacaaatgactcaaaggatgcatttgtatttcctttcctacatatggagaagaggagtttttttaatagctctgccttgagctgagtatgtaaatgctctggtttctgtattcaaatactccatgttttgaagttagcaaagcccttagagagtacagctgacccttgaacaacacagtggggaggggcaccggccctgcatgcagttgaaaatctcctataacctttgattttcccacaacttaacttctaatagcctactgttgactggaagtcttaccaataacataaacagccaattaacacatattttgcatgttatgtgtattatgtgctgtattataataaagtaagctagagaaaaaaatgtaattaaaatcatgagaaaagatatttactaattcattaaatggaagtggaccatcagaaaggtctt

SEQ ID NO: 393316 - DNA, 504 bp, Homo sapiens
tagagatgatgattttgtgagtggcatcaatctgcattaatatgctttttagcagtagtgcttagaatctcaggtgtggtagtagagaaggaaggattaatgtggagcttggatgctctgggtagaggatggaaggactgaggtgtgcgtcagagttcaacatagacttaagatatcaaatggaacaacctcttctgtgaagtcccatcagtgccagtgtgaacttggattgcaggtaggggtgggaactaagagctggcaggctgaattgtgttcagcactccaaaccagaagttgatgggaggttgttttcatgcttctgaaaagtcattgctgagagtgagtgagattaatagagatgatctagtgttggtacacagaatagtttgtgaaagctggagggtagctgggaagttcctgcagagctccaggtgggtggtgagagagactggagtatggccctgctttccgcattaccagagtcgcctgctcaggatggccagt

SEQ ID NO: 393317 - DNA, 640 bp, Homo sapiens
ggtgttaaggtctcccactattattgtgtgggagtctaagtctctttgtacatctctaagaacttgttttatgaatctggttgctcctgtattgggtgcatatatatttaggatagttagctcttcttattgaattgagcactttaccattatgtaatgctcttctttgtctgttttcatctttgttggtttaaaatctgttttgtcagaaactaggattgcaacccctgcttttttctgctttccattttcttggtaaattttcctccattcctttattttgagcctaagtgtgtctttgcacatgagatgggtctcttgaatacagcatactgatggctcttgactctttatccagcttgccattctatgtctttaattgggacatttagccaatttacatttaaggttaatgttattatgtgtgaatttgatcctgtcatcatgatgctagcaaccaatatctctcatgaacatagtcacaaaatattagcaaactgaatccagaaatatttaaaaaggacatacttgggcatattctaggaaggcaaggttagttcaacatttaaagtcaatcactgaaactcttgatctcaatgtactaaaatagtacaattatataattatctcaatacatgca

SEQ ID NO: 393318 - DNA, 480 bp, Homo sapiens
aaagaatttgctgttaataaaaggtcactatgtatatcataggtaagcatgctgtttttggatgcagctatgctagtgttcactgctagttgaataatctgccagtggacacacgcttcactgacattgaatgttaaggattctcagtaatctaaacgtcaaacccgccaatattagtaacttgaagaatggatcaagacagcttatttgttgttatttcacatttataaaacgtcttaacattactatcttatacttaaatacagtttgtaaattgataacaaaatgagttaaaaattactgggaaagtccttttaagtaccaaaatgaaataaatattcttccatgcttaaatttttatgaggaatttttatttccagcaactgtaaggctgggcagcaatgtttgaagaagtttcaataaatgtaaattgaataatttttttttttggttttatagattgtcaggtgatcaaccaag

SEQ ID NO: 393319 - DNA, 442 bp, Homo sapiens
tcagtttaatctttctcccttctgctattctccagggtttgtattccttacatttgcttacttctttttccaccgagaagctcctagttccatttgtaactaaatttctcacccgagtctcttgactgccactgtatttcccaccttgtgtaattctcaccaaagattcacctaacttgatatgtatttatgatttttttctctttctaggcatcagacatatgttattcactactgcactaaaattgataatgtaaaaattttactttatgtattatttcagggcatttttataaattgcaatgactggtagtaacataacaatgaatataattactatacttttcaaggatttacaaaatgtatactcatagtctaggagttacatacttacaggaatttaaactgacaaaggcaccaccctcattttgaacaatagcta

SEQ ID NO: 393320 - DNA, 206 bp, Homo sapiens
cctgagggtgtctgccctggaacatgggctggggccgctgagtaagatgggattttaaaaatactttcttttcttgccaaaaggtagatcacgacttacaaaaaaaaaaaaaaggcagtgattccgactgaaagtatagcacgacttgatgggtacagctgtgggtcagggcagtgtacctctctgacacagtgggggtactgggt

SEQ ID NO: 393321 - DNA, 465 bp, Homo sapiens
actgggactacgtgtgcgccactatgcctagctaattttttgtattttttgtagagagggggttttgccatgttgcccaggatggttttcaactcctgggctcaagcaatctgcccgcttcagcctcccaaagtgctagcattacaggcgtgagccactgcacccagccctgagcttttgtgtggtaaaaatatgaagtatagtgcaacatgatggttccagaaagactaacaatgtcctggtgcataattaggcagcagactgccatgattccagaggaattaataaccatctgtaaaactgcaattatttttcttttggatgggctataacaccaaaagagaggaaatagaggaaagcagaagtattggcacagaaagttcataattaagtatttatccaccaacccataatagctcgggtgctagctattccaatcagcttatgtaacatgtgaaaccttgg

SEQ ID NO: 393322 - DNA, 1262 bp, Homo sapiens
caggctgtctccaagtcttcagaggaagtattctgtggccaccccagaaggactgcctcatccagtgaagacaacagaaatgcctccctgagagctctgcttggtctgtgtactgctcaatttccccacccaacctggagtgggactacatcaaacttaaaagcttctgcacagcaaataagacaatcaacagagtgaaaagacaacctatacaatgggaaaagatattttgccaactatgtatctgacaagaagataatttccaaaatatataagaaactcttacaacttaacagcaaaagaaagaaagaaaagaaagaaggaaagagaaaatgaagaaagaagaaaagaaagagagaaagaaatttaaaaatgaatgagccaagggcttgaacaggcatttcttcaaaggacacatacaaataaccaataagtgcatgaagaggtgtttcacactactaatcattagggaaacacaaaccaaaaccacaatgaggtatcatcttatacttgttttaagatggctattaataaaaacatgcgaaataagtatcggtgaggatgtggagaaattggaactcttgtacattatgggaacataaaatggtgcgatagctacggaacacagaaaaaaaggttcctcaaaagattaactgctatatgatctagcaattccacttctggtcatatatccaaaagaattgaattcagaatttcaaagagagctccatacacattgcattattatttacaatagctaagatatagaaaaaatttaagtgtccattgcacttgatttgatgaagaaaatgtgctatatgcatgcaatggaatattattcacccttaaaaaattaagtcctaccatttgtgacaacatggatttacccagaggatattatgctaaataaaataaactagtcaaagaaggataaacatggcatgattccacttacatgaatggctgcctggagcttagggaaaacggcagttcttcagagggtgtcaagttttgataatgctcgatgaaaaagttctagagatctgttgcacaacaaaatgcctacagttaatgcagtattgtatattgtgcacttcaaaacttactaagagcgtggatctcactttaaatgttcttactaccagtaccacagccaagatcatcaaaaaacaaaaggaaaaataaaaatccgatgcgccccgagctgcttttcgtcgtcctagcgcacatcgtcgtcatctctctgctctctctacccatat

SEQ ID NO: 393323 - DNA, 1235 bp, Homo sapiens
caggctgtctccaagtcttcagaggaagtattctgtggccaccccagaaggactgcctcatccagtgaagacaacagaaatgcctccctgagagctctgcttggtctgtgtactgctcaatttccccacccaacctggagtgggactacatcaaacttaaaagcttctgcacagcaaataagacaatcaacagagtgaaaagacaacctatacaatgggaaaagatattttgccaactatgtatctgacaagaagataatttccaaaatatataagaaactcttacaacttaacagcaaaagaaagaaagaaaagaaagaaggaaagagaaaatgaagaaagaagaaaagaaagagagaaagaaatttaaaaatgaatgagccaagggcttgaacaggcatttcttcaaaggacacatacaaataaccaataagtgcatgaagaggtgtttcacactactaatcattagggaaacacaaaccaaaaccacaatgaggtatcatcttatacttgttttaagatggctattaataaaaacatgcgaaataagtatcggtgaggatgtggagaaattggaactcttgtacattatgggaacataaaatggtgcgatagctacggaacacagaaaaaaaggttcctcaaaagattaactgctatatgatctagcaattccacttctggtcatatatccaaaagaattgaattcagaatttcaaagagagctccatacacattgcattattatttacaatagctaagatatagaaaaaatttaagtgtccattgcacttgatttgatgaagaaaatgtgctatatgcatgcaatggaatattattcacccttaaaaaattaagtcctaccatttgtgacaacatggatttacccagaggatattatgctaaataaaataaactagtcaaagaaggataaacatggcatgattccacttacatgaatggctgcctggagcttagggaaaacggcagttcttcagagggtgtcaagttttgataatgctcgatgaaaaagttctagagatctgttgcacaacaaaatgcctacagttaatgcagtattgtatattgtgcacttcaaaacttactaagagcgtggatctcactttaaatgttcttactaccagtaccacagccaagatcatcaaaaaacaaaaggaaaaataaaaacgatgcgaccaggttaatacttccccccccataatttattaatatca

SEQ ID NO: 393324 - DNA, 535 bp, Homo sapiens
tctttaagttgccagcattgaaacatttaattccatcacgtaaaattatttagggcaggtaattttagtcttttcacacatgttggatttagattcccctttacttaacattcattctaactgacaaaaaaagttgccaaatatatgctaaggtactgtgttttgtgctctaagatacaccaaactgaagggtaggtcctatccattggatagtcttacttcaaaagcaactttaagagcccctaaaactgtaaaatttaataagccttagttcactatttaaagttccttattctatgtctatgttgtgccattctgcataatattatttgccaaacaataactcttattggccagaatcagattcaaggtagtagttttcctaattgtttctcccctttccacaacaaatctcaagaacttaaaacattctacttatttacctgttttgacacagcatttataaacccagagaccacttactattaatacaccaacttcaacccctttctaccccagcctcagttcagttctg

SEQ ID NO: 393325 - DNA, 503 bp, Homo sapiens
tgttttgttttctttttctttttttcctttttctctgttctctacaaatcatttgggtctacatccagcttctcccagcatttactcaatatgaaacttccagttatagattaatttgaattctttgcactaattgtttaaaagaccataggaacctcagaccatccctcttcatggtctcaagagctcccagaatcatcctcttggtaagctaagtagttattagtaaggcccagggacaggactgagaagtaacatcttctattttttatttcagttttcctttaatttggaagcaaacaaacaaaaaacccttcagcttagggttttttcaattgttaaagtaatactgagcttcagttaaggctatgaaagaaaagaaaaaattttaaaaagtagtaacgtgtttttttcaagatattgtgggtaaaaacataataaaaagaaaataataattacttggaatcatgattaacattttgatgtatttccttccaatcttt

SEQ ID NO: 393326 - DNA, 244 bp, Homo sapiens
taattcctttaagggcttctgtataatttgttcttaccgagttgaaaatttatttcttataaaatttcatccttttgtttaggttttcatatatttgcatggttttttttttttttttttttgagatggagtttcgcgcttgttttccaggctggagtacaatgacgcaatctcagctcactgcaacctccgccacctgggttcaggcgattctcctgcctcagcctcctgagtagctgggatt

SEQ ID NO: 393327 - DNA, 506 bp, Homo sapiens
cacctttgccctcctagggggaggctcaaatggtcaaacccggatcctcgttgcttggcgaggcctgcattgtcactacacaggcagggggctcccagacccaatgcctcacctggaccgtgccctcctcagctgagactcctccattccattgccctggaggagccgactgtgccagggtcagctcagccgtgttcccgctccagcccagctggtacacaggatcccctcccatcagcagcactcggctccagatacaccacgggtgctgcttccttagatcatcccagacagaacccgatgccccgagctggccagcagccacaagagtagccccagagctccagctcaaagcccacaggggctgcttccatttccggcaacactcagcagaggcaaggatggggctgggagtcaggcagacctagatcctgagcccagctcctcactggcttgccctgtgcctggggatggagccccgatttcatttctaaaaatgtggtcct

SEQ ID NO: 393328 - DNA, 296 bp, Homo sapiens
ctctttgcaaagggctaaaaaatgaacatcaggaacagatcctattcacagaatcgaaatttaaattacttactaatgctttcttagcataaaaaattataccaagataccttgtcaaattctgttcatctttcaactatacagtggaaagcctactcaaatgttcaatttaccccataacgcaccttcctgcctgcttaaacaaatgtatttagggataaatgtttttaatattattctagctctcacatggtcactgacagaaacaagaacttattcatgaaaaaggttaaaga

SEQ ID NO: 393329 - DNA, 168 bp, Homo sapiens
ggtgcttaagttctgcaggttgtgaagcaggctgtaaacacaggtgacattattattacaaccccccatgctgccgagggggcgctgctcccacctgcagtcccaggccactttgattcatcacgtgccccacaaatgtcactgagtacctactgggtcctgggcgct

SEQ ID NO: 393330 - DNA, 962 bp, Homo sapiens
tgagaaagcaccaagcccctttattttttctcccaaaagggctgcgaatgaagtagattcatttctaaaatgccctgtacagcctcgaggtttttgataatttatggagtgatatgatcctattaaacgggagtctgcggctgtttgatctagctggtagctctaaacctgtggagagaaaagaaaggtctggcaggtcagacacaaagatctaatgtgtggtgtcagggtggggctttatgggtaatttttattttatgttttgcttatttgcattttctactgtccctataaagagactgtattgcttgagaaataaactaagagcagcaaaaaaaaaaaaaaaaaaaaaaaaaaaaaaaaaaaaaaaaaaaaaaaaaaaaaaaaaaaaaaaaaaaaaaaaaaaaaaaaaaaaaaaagaaaaaaaaaaaaaagcacgcggaacgcgcagcagtcggcggagaaaaagcgaaaaaacacacgaaacgagggccgcagcaacgcacaacaagcagaaggcgaagacgggagcaaacccgcaacaccgcgcgcgacgccagaagcgagtaccgctgactcagaaggggcagacgaaacgccgcgggagacacccagcagaccgacaacgcagccagtcagacaaaacaaccacggtaagcgacaaacaagccgaaacaggagcgacagcagagccaaagagtcgagcagaggaaggagacgacatgatgaaggaaagcatgagcgaggaagcgagaggaaaagaggcagacggaggacagcaagaaacggagcagcacacagcgaaagacacaagaaacagaaaggcagagccagagaggaggacagacagccaaacaacacgagagacagaagaaggcgaaagcaacagagcgacggacaagcgcacccgtcgagcgacgagcctggaaacaaacgaagagcagccgcgagcgagcgccacc

SEQ ID NO: 393331 - DNA, 424 bp, Homo sapiens
tgagaaagcaccaagcccctttattttttctcccaaaagggctgcgaatgaagtagattcatttctaaaatgccctgtacagcctcgaggtttttgataatttatggagtgatatgatcctattaaacgggagtctgcggctgtttgatctagctggtagctctaaacctgtggagagaaaagaaaggtctggcaggtcagacacaaagatctaatgtgtggtgtcagggtggggctttatgggtaatttttattttatgttttgcttatttgcattttctactgtccctataaagagactgtattgcttgagaaataaactaagagcagcatttgggagtgccagtgtctctgttgcttaatgcagaaaaaataagcactgcagaataactttactggcttcaaaaagggggaaatatccaac

SEQ ID NO: 393332 - DNA, 531 bp, Homo sapiens
caactaagggggaaaaaaagaggatcatggctgccaggtctgtgtaatgaagctatgagacaatgggataagagttttttggattcagaattaatagaaaatgtctcagcccagatgtcatttgtccaatgtcacgcctaaggtcgaagaagaaatcctcaaattcctaaaatatcacacttcacctccccatccacgccatgcaacatcaagaggccagaatttggccacgcatagtggctcaagcttgtaattacagtactttactttgggaggctgaggcagacaggttgcttcagctcagtagttcgagaccagcctaggcaacatggtaagactatgtcgctacaaaaaattaaaaaaaaaaattgctgggtagggtggtatgtgcctgtagtcccagctactcaggaggctgaagtgaaaggatcacctgagcctgggaggtcaaggctacagtaagccgtgattgtgccactgcactccagcctggatgacagagtgagacactgtctctaaaaaaaaaaaaaa

SEQ ID NO: 393333 - DNA, 1009 bp, Homo sapiens
aagaaaaagaagcagcatctgcaggatctccagctaggggatgaagaagatgtctggaagagaaatcccaaagcttttgcaattcagtctgctgtggggatggcttgatcctttcacaggactcaggatttgaagacaaaaaagcatcatattccagtggttgatcagactccactagagccgccaccaatagtgatagtggtgacggggcctccaaaagttggaaagagcactttgatataatgcctcattgggaacttcacccagcagaagttgaccgagatcagaggccctgtgatgatcgtgtcaggtaaaaagctccgactcaccattattgaatgtgggtgtgacattaacatgatgattgatctggctgaagtagcagatctggttgccaagctgttctacctttctggaatggtgcatggagaatatcaagaccaagaaatccacaatctgggccattttattacagttatgaagtttaggcctctcacatggcagacgtctcatccttatatcctggcagacaggatggaagatttgaaaaacccagaggatatctgaacaaaatgtgactggcaggtgtcactttatggttatttaagaggagcacacttgaaaaataaaagccaaattcacatgccaggtatctactgagcgtttcagtcaacaatacagctcgtgttcgacaatattccttgatggcagcacagccagccagcattatcttataatgacaataatatcgcactgagaagccttttaggaaaatcaggatggatgtgaggcatctttctgtgaagaaaagcatcccagaagattctgattttcaccacagctcaatcattccaaactttgctgctgattgaaatcacctgggaaacgtttaccaagaaccttgatgcccaaagccatacccaatactaattaaattaaaatgtctcatgttgaagatgaggcagatattaaagcttctcaggcgattttaatgtgcagcgaagtttga

SEQ ID NO: 393334 - DNA, 443 bp, Homo sapiens
ccgggattacaggcatgcgccaccacgcctggctaattttttatttttagtagagatgggatttctccatgttggtcaggctggtctcgaacccttgacctcaggtgatccgcctcctcagcctcccaaagtgctgggattacaggcgtgagccaccgcgcctgacagaagtttttttcttttagtagtttaaagatgttgccccaatgtcttctggcttgctttatttttttcttctaacaagaagtcagctgtcatttttatattttttcctctctatgcaatgtcttattctctgattacttttaagattttctctttattcctgattttaagcaatctgattataataggtagtatatatattatacagtaaaatataatatagtttcatgtttctttcgtctgcggttctttgattttcttggatctgtggacatatg

SEQ ID NO: 393335 - DNA, 318 bp, Homo sapiens
cctgaaagaactgttccctcagcgtctttgaagatggaggagttggcaacagctggagaggaatgccattggtgggacagcccaccaggagatggggagccaggtttagaaggagaaattgttggaccccaaggcaaaatttggctacctcagattttaccaggagccagcaaaaatttctaatccaagagataatgatttcaccagctctgagatttcagatggaaactaccccaggttcctggactgagaaagttcctgaaatgtggggctttcaatgcccaaaccaggaaatcccagcaaaatgaggtgactaga

SEQ ID NO: 393336 - DNA, 526 bp, Homo sapiens
gtggttctgtaggaaaaagtattaagacgtctgcaactaactttcaaatgatcctgccaaaaaataaaaataaatgtgtgtgcatgtgtgtatgtgtctatcggatgtgtttgcagagaaaaaagtttgaggggaaatgtaagaactggtgactttaggggagatgtttgcagctattccttgttctgttctttcagcattttagtactttgaaaaattatcaacataaaaaattataggaaacaggctgggcgtggtggctcacgcctgtaatcccagcactttgggaggccgaggcaggcaatcatgaggtcaggagatcgagaccatcctggctaacatggtgaaaccccgtctctactaaaaatacaaaaaattagccgggcgtggtggtgggcgtctgtagtcccagctactcgggaggctgaggcaggggaaaggtgtgaacccgggaggcagagcttgcagtgagccgagattgcgccactgcactccagcctgggtggcagagcgagactccctctca

SEQ ID NO: 393337 - DNA, 393 bp, Homo sapiens
gtggttctgtaggaaaaagtattaagacgtctgcaactaactttcaaatgatcctgccaaaaaataaaaataaatgtgtgtgcatgtgtgtatgtgtctatcggatgtgtttgcagagaaaaaagtttgaggggaaatgtaagaactggtgactttaggggagatgtttgcagctattccttgttctgttctttcagcattttagtactttgaaaaattatcaacataaaaaattataggaaacaggctgggcgtggtggctcacgcctgtaatcccagcactttgggaggctgaggcaggggaaaggtgtgaacccgggaggcagagcttgcagtgagccgagattgcgccactgcactccagcctgggtggcagagcgagactccctctca

SEQ ID NO: 393338 - DNA, 552 bp, Homo sapiens
tattgatgccccaaagattattgggaacacctctttagacagaagaatttgggtttattggtacttgttgcaaccaaggagaccccaccccatggagaactgtggagagtctcagtaagtgggtgttaggagggacatatgggatttgggtttgcgttgggtgattttaggaatcgttcaagggattgaagtattctggttggatgctgtccggaactaggggcaattctacagtggaacatcttgttaatttatctaagaggtgaaggaaaggtatggggctaaagctgtatttggtcaagaagccgccagcagtcatgtagatgggaaaggcggtgtttggtcattgtcatggttcgttgtggtttgtatggtgatcttgtttttatctgtgcacagagtagtcttgtttttgttttgccccatcacagccatagaagtaccttgtctaacgttggtgttctgtgaagctgtgttcatccgaacaccatggcccagcagctagtgctgggtcaggttcctgctgatggctagtaggggctcctttcttct

SEQ ID NO: 393339 - DNA, 329 bp, Homo sapiens
cagcaacggacaagttagttaacttaaaggggggcatcctcaaggcagtaaactggagccaagtgggttaaatccttcttgctgctattaaggggaggagacaggtttctgcagactctacattttggagagaaacagaaaagaatgtccccaagtctcctttgccctgcgatgctggggcagattggcaaggtcccaagagaagcacaatggtaaccgacgctgcccttggctgaacttcttctgttaaatccttcggatggatgctggaatcgaccttggtctctagttcgactcccgtgcaacgtgttgaggaggagccacctcct

SEQ ID NO: 393340 - DNA, 473 bp, Homo sapiens
ctgccatctccattcctctctcttttcttgcaatctgggtagaagttctttaatatgaacatttcaaccagcttcattctaccgtgtccactatcagcacattcaaactgatccagccaaggctgtcatcttaggccagggattttttaggaatctattatgctgtgatgcggctggcacccctttgactcactgtatcaccccagggttcttttcatttcagaagcccaagagggcagaaaaagaagtaggtgagcaattaaaccctctgagtcaggagcgtctccccttgcgttaagcaatgttgtagaacatcgtgtttagcaagctcctagcagatgagccacgtggctgctgagcacacacgcctgcttgctgctgtgagctcaggcaccatcatcatgtcttttccatctctggagcgaattgtaagggccacttaataacctgtaaatcacagagagttaaaggtg

SEQ ID NO: 393341 - DNA, 324 bp, Homo sapiens
ggcaaaggcagagaggctggacagccttaggcagggccagttggcacagcaagttgggccggaaacaaggttactgtttgtgtcaggtggaaagagcttgatggtgaagggctcttggaatcccaaaccaaggagtttgaaagggaatttggtagacactaggaatcactgtaagtctctaactgggaagaataggctgaaagtagctgtacagagaggatgtctatggaaacagttctttgtaggatggaaccaagaaggaagaaacctgaaacaagaagaaagaaatggcaggtgtggtgactcacacctgtcatcccagca

SEQ ID NO: 393342 - DNA, 421 bp, Homo sapiens
tcttgaactcctggcctcaagtgatctgcctgcttcagcctcccaaaatgctgggatcacaagtgtgagccactgtacctagtcagaagtctctaatgttattgttgaattctctatttcttccttcagttctgtcaggtttttctccttttatttcagggctgtgttttgggatgtatatatgtttatatttgttatacctgtttgatggatagacacttttatcattataaaattccttctttgtttctagtaacaatttttgtctgaagtctgttttgtctgatattagtatgatgactccagctctcttggttaccatttgcatggtatatcttttttcatccttttactttcaacttgtttgtgtctttgaatgtaaagtgtgtctctcatgaagacagcatatagttggatcatt

SEQ ID NO: 393343 - DNA, 217 bp, Homo sapiens
tttatgggctatttcctcatggtggtagtggaagtgtttcaggcttactcaactggcatgattgcagccttgggcaaggagtagtgggactgacctaaaagactgtcctagttcaccacttgcaggtggcaccccagcatgggccgattaatgccgctttggttgggaatgggcttaggtgccttttctacaggagcatcatgggcttctcccaaat

SEQ ID NO: 393344 - DNA, 171 bp, Homo sapiens
catgtgaccccactgctcacacatgaccctatgtcacctctggcccacatcccatgaccttgcagtccacaaatacacacgtgtccgagtagtgaacactgcaactgcttactatgaatgcatacgagccagctaaacaacagggcccactgcaggaagcaacagcacagg

SEQ ID NO: 393345 - DNA, 380 bp, Homo sapiens
ctttgctattgtgaattaggcatcgataagcatgggaatgcagttatctctttgctatcgatttcatttccttcaacacagtgctaccatcatcctcgtgaccatgagtgtacatgatccagaggcaaagaggtggtctagtgaggaaatagtctatgattgtaaaatttttgtcaagagtgtaaacatacgaaacaagttggaagagttgggctgaatcacagtagctctaagtgaaacccactgaccttaccaatttccactttccaagcacggccattgctctcaccattgggaatctgaagagtcttggggtatatcaagtccatgaaggaatcctgagagtggctacaggactgaaaaagctgaatcctaaggct

SEQ ID NO: 393346 - DNA, 203 bp, Homo sapiens
tgtttttttcagtgactgtatatctggctccctatagaaaaagtctgctaactcctaacctgggtaaacaaatatgtatggaatacagagacctgacaagggggacataagccaccaagatagaaaaataacagcctctcaaagttcgcagaccctctagaataaaggcagtaaggcaaggtatcctttagacaaagctctat

SEQ ID NO: 393347 - DNA, 103 bp, Homo sapiens
accacaactgcatgaaactctgtgtctgggaacatcccaagagatggactcaaaagccacaactaagacagtgccttgaaagagactattgtaatttcaagtt

SEQ ID NO: 393348 - DNA, 359 bp, Homo sapiens
gggaaggctgctggagtaatctgagaaatccccaactcttaaaaaaacagaagaaaatgtagtcccttatccatttgaaccctcacaaaatccctctgcctaaatctcagtatggtgaaagttgcaactttcatagaaatttacaacctgggaaacagtgagggttaattctttgatgctttcattaaaaaaaaaaaaaaaaaaaaaaaagtagccgggcgtggtggcaggtgcctgtagtcctagctactccagaggctgacgcaggagaatggcatgaacccaggaggcggaggttgcagtgagccgagattgcgccactgcactccagtctgggggacagagtgagattctgtctc

SEQ ID NO: 393349 - DNA, 283 bp, Homo sapiens
tgcaactacagtaagccaaattctgaaaacaagaggtggttctgcaagttatttcacagctaaacatcacgcctagctataatctttatattaaaggtaaacacaaatcagttgctcattccaagtttgggttttcatcccctttgaaacaacaaagagtgtacccacttcagaggccagtaaggaattggcctgccagcccagccccagcaaaggagctgctgcagataaacagtggttagctctgaagtcatccagacagaggacacttttacatgacccc

SEQ ID NO: 393350 - DNA, 388 bp, Homo sapiens
ctggagagaagccctataaagtgtaaagaatgtggaaaagccttcagtcatcccagttcatttagaagccatgaaaaaatacaccctggcagaaaacttcttgaatgtaagtaaagtgggagttttcaacttgcccacctccttacaaaaacatgcaataagaatgtgctagatataaagcttacaaatgtgagaaatacaggaagtttttcagttttaacaaatactgtcaaagtcatgtgaaaattctcactagaaagaaatccaataaaggcaagttgaggcatacctgtttgttattcaggaatttgctataaggttatactgggggagggggtgccatgtttaaattcaatggtatcttaaggtaaaactgtaatttaagccc

SEQ ID NO: 393351 - DNA, 328 bp, Homo sapiens
tcttccctctgcacgtctcatttaaaatgatgatgggccaggtaaggtggctcacacctgtaatcccagcattttgggaggctgaggtgggaggatctcgagggtaaggagttggagaccagcctgggcaacatggcgagaccccatctctactccccacaaccccccaaaaaaaagattagctggtgtggtggcatgtgcctgtggttccagctgctcagggggcagaggcaggaggatcccttgggcacaggtgttcgaggttgcagtgagctgtaatcataccattgtacttccgcccgggtgacagaacgagaccccgtctctt

SEQ ID NO: 393352 - DNA, 193 bp, Homo sapiens
tgataggtggatacagcaatgagccaagatcatgccactacactgcagctgggactacaggcacacaccatcatgcctgactccttttggtattttttgtgtagagatgtgtcctcattatgttgcccaggctggtctccaactcctgaactcaagcaatccacccaccttggccttgcaaagggctgagatt

SEQ ID NO: 393353 - DNA, 332 bp, Homo sapiens
taactgattgtcaccagcagaccaacagacagactcacagcatccttctccctggtgtgagcactgcttaattcacatttatgaaaatactttaagacaagggcactgtaactcacatagaatctgaagtggccttgaacagggagctggtccagctgcctcttagtgtgtctgacctccaggtgggcggactgagatgcgtgcaggtgttcatggtataggcatccttgtaaacctgctctggttaaggataaataggcaaagttgtgctaatgctgttcctacagcagcctttgccctggactgactccagaacagctggctgactgaca

SEQ ID NO: 393354 - DNA, 411 bp, Homo sapiens
acagacaagcgccgggcagccgggcagccaaggagagcagagaaatgggcggttgccagtacaggacacgaggtccagggagttctcacagaaggatcacgggagaagtcacagcgtgtccgcaggaaaggaggagagaagggacaggccagtccgagtctgcagcagggcctgacaacagacagcacgtgagggacagcgacaccggggcctgatgcagatggcagggagatgcgaagcgggactcaaccacctgctggtgtgaagaagggagggacagacaccacaagggaggccccaggagtggctggcaccttcagggcccccagcgtgcaggggcatctcacaactaaacacaaccagcgccccagacgccatcccgactggggaaaaagttgtagtgggcactat

SEQ ID NO: 393355 - DNA, 596 bp, Homo sapiens
gaaaacattttctatttgtggagactttaaagaagacggctgtcctctcatcaacaaaatcatgaactgttaatgttttcaaacattcctttgggtattgcatttttatgaagcaagaacaagaagaaccagaaataatgataagctagaacctattagagatgtgtttgaaacctggaatcggtttttacaaactggatatattccaagttcatgaatgacagttgataagcaattagttgcattcagaagatcattttgagtagaatatcttcaaaaccaagaaaatatagattaaaaaattgagttagctatcattaaattgttattaatattgctaataaagttgttttcaacttttttcttctgtatattagttttataatatacctttcttctgtaaattattttttaaaatgacttaaaaatattaaaaattaaagggttccttggatgtagttggtaaatgatgactatttttcctgactgaaggctaagtataggcaaatcctgtgaatcaacaattccttttgtggctgtatatgccaatggaattaactcacaggcccatacagagacacatatatgatgttcat

SEQ ID NO: 393356 - DNA, 662 bp, Homo sapiens
gataagaagccattaacaatgcatcactttaattaaacactctaaaagaagtggagaaaaaaatcatgttagtattgaaatcctttgcctttccaattccactggataaaaggggtccttcaggtctcagccctcccaacagaaccagttttctcctctcagaatcagctgagcaatgactcttcgctgaaacaagctggtggctgttccctactaggaagcagccagttagtttggtaagggctggaaggggcttgctttccctggcaccatgcctgaaggccacctagacctgtaagaaggcagcccatgaaaatcccagcctgctgagagctctgccatccaaggagggtgatgggttttacccacctcagcctaatgactccaaacaaactggctgaaggtgaaagggttggcagggctgtctggggaggaaaaccacccatccagaagggtgggcatgtcagtcttacgagtgctgccacgcatgggaaaggtgtgggagctatactctagcctggtccacttctgtccccacattctacctggaggcttctcgacctcacaccagggcattaatctgcttgggcacacagtgaatcagaacacaatggttttaatacctgcttggccccaactctgagaacagggacctgccactt

SEQ ID NO: 393357 - DNA, 306 bp, Homo sapiens
ggtaatcaaaggctgggggcacaggaggaggaaagagtcctagagtgaaacagcccaaaacaatgtggcaaccccgctgatggcagagaaagcacagcagctgacagacgagcctggcttggagctataatggacttgctcttttaaagcaaagactttcaggccaacagagacagacccttctgatggcagcagctgcagatgctaattaaagggcaaatctcacatgtgttcagtttggaagtagcggctgcttctctgttggtgtttgcatccataccccagtaccaggaaggcaatttccat

SEQ ID NO: 393358 - DNA, 282 bp, Homo sapiens
agggctaagcctagggaatggaaaggaaaaaaattatgactgcttgaggtgggtaataaaaggagacagaagggagagtaagtgctctaggtgcccagcagaaagtataaaacccttttaaaagcccagcagacagtttgttctggacaccatatttcataatctattcctgtcacaaagtatgtgtatctgtttgatttgggggaaagggaaggctattttccatcccatagatctcctggtttctaattttaagagccaagagtcccattctcaaagata

SEQ ID NO: 393359 - DNA, 447 bp, Homo sapiens
cggaattccttgactttctaggtgggaaagggtaaatgaagtagcgaatgctgtgaccaaaagcgtatgtaattttctgaagagtgattttaaatcagattgtatttcttgagtacaagagtagtttgaaatcagattgtatttcttgtaatcttgaatattagcccaaggactgtgaaatttgcttcgctaaataagggagagttgtggctggttttattaagctgccatgggagagtactatgaaggcaacttagtggattgaagagggctggagacagaagttagggagagtccgcagtggacagacaggtaagggcccaagccaggcttggggtcagcgggagggggaaagcgcaaggggaggagatgttgggaaggaaaaatgaccagatttggtgattaattagaaatcagtgctaggaagaagcatgcaaatatgactaa

SEQ ID NO: 393360 - DNA, 571 bp, Homo sapiens
cgtcgcggccccgcccccggacgcccagccgcggtcccagcgaccttcgctttcgtggggaagccggactgcgccgtgtcttcctgaagaaggctgggggatcagtgtccttcagtgatgtggctgtgggcttcacccaggaggagtggcagcatctggactctgctcagaggaccccgtacagagacatgatgctggagaactacagcctcctcctctcagtgggatattgcattaccaaaccagaggtggtttgcaagttggagcatggacaggtgctgtggatattagaggaagagtccccaagtcagagccacctagactgctgcatagatgatgacctgatggagaagagacaggaaaatcaagaccagcatttgcagaaagttgattttgtcaacaataaaacactgactatggacagaaatggtgtattaggaaaaacattttctcttgacacaaaccccattctatcaagaaaaatacgtggcaactgtgactcatctggaatgaatttgaataatatttcagaattaattattagtaatagaagctcctttgtaaggaaccc

SEQ ID NO: 393361 - DNA, 692 bp, Homo sapiens
gagaatcaaagtcattccatcctaaccccatgatctggtaaagagaaactcatacttccatctgttctaatttatgtgaggtacctagatgatcatattacttccctctacgagacactggtgacagagagtcagccttttccttctgcactggcttgggcacacatggagaagtatattagttcattcaagaggacctcaaggaggttgctggctattcaggaaatatatttccttttcctaaggctggatttggttttaggaggatggctgtatgcaatgagaatggcagtttatttgttctgggaacaatgtatttttgggtttttgtgtgtatgtatgtcctaaatccaatttttccccagtgggatcttctttatttttctagttcatatatagcttttataagcaagtgataattaatggaacagacattttagttgttgttgaatcctttccatttctcttcccatcataagggccagcttcagatgctgttaggtcctaataacttcctggtgataaccatgtggcccacccatcccattaatttctgcttttattctgaagttattgaagaaacaagagtaattcttgtatatatttttgatgcttacctaataagatactaggctttgaagaaatgcaaataatgtctaaatgttcaatctatacagcttcaatattagcaa

SEQ ID NO: 393362 - DNA, 456 bp, Homo sapiens
gagatagcataatgaacaaaatggatgtgctctctgcccttgtgatttggacagatgcttcagttatctttttctgtgtttatattgattatgtttgtatgtatgtgcgtgtgtgtgtgtgtgtgtgtatcgactgttttcttcctcctcccataccattccccaaaaaaggagggggtagggatcaagctacacctatttgtaacccagttttttcaattaatggctgggcatgtccttccaagtcattacatatagatctggcttatccttttcaacagctgtacccacattcttcagtgcagagagaccacgctttattccagcattcccccactgctggtcctttaggttgttcctctgagatgtcttttttttttttttgagacggagtcttgctctatcgcccaggctggagtgcagtggcgcaatctcagctcactgcaagctccgcct

SEQ ID NO: 393363 - DNA, 249 bp, Homo sapiens
tctatacagggagtgctgcagttgcacagtgaaggacactgaagcagcgtggggaagctcctgaattttctggagctgagcgcaggagctgagacctgctaagcaaggaaaggcagtggactaaggctcacctccttccccagttcctcctcctcccaactggtgctccaggacaccacatcacaatgcatttgtggatattttcctcgggattgctctgaaatcatttttcactgtaagccatcttgg

SEQ ID NO: 393364 - DNA, 386 bp, Homo sapiens
agtgggtatctcagtatctactcaacttttcatcctaagtgatcctcttaagtcagatcgtgtcaccacgctcattgtccttactactctgtagagaccctgtccttctaaacagaacattcctagcaggctcccacttcagagcctactggtacttccctctgcctggaatgttttcccagtagtatggctgtcactcactttatttcttgtaatgtcatcaaagaagctattttttaccaacctatttaaaataacatcccttctcattaccctttctgtttcctttccttgctttatttttcttcacaaatgaatcatcttctgccatataataagttcacatctatacctgtagcatctaacaatgtacctggcaaaatagt

SEQ ID NO: 393365 - DNA, 376 bp, Homo sapiens
gtttcttgtggctggagggtggtgggtgggtgtgtaaaggcccaaattccatcattaggtgggataactcctgaaatcttacatactgcttttaattagatgttcttttcacatattatacaagaacatgtacacaacaatcacccagctgtattgcttgagactagagaaacaaatttaccaaaaatctaagtatctttaaaatgagctcaatataacttagtgacctcacaaaatttcagaagtagtaatgccaaaactcgctaactttcatctttagtcacatgcaaagagaaaaaaaccagacggacttctttttcatagttaatagcagaaattattatagcactctgctgtgccaacatttgagtttcaa

SEQ ID NO: 393366 - DNA, 1564 bp, Homo sapiens
atggaccccgcaggggcagcagacccctcagtgcctcccaatcctttgactcacctgagcctgcaggacagatcagagatgcagctgcagagcgaagccgacaggcggagcctcccgggcacttggaccaggtcatccccagagcacaccaccattctgaggggaggcgtgcgcaggtgcctgcagcaacagtgtgaacagactgtgcggatcctgcatgccaaggtggcccagaaatcatacggaaatgagaagcggttcttctgccccccgccctgtgtctacctctcggggcctggctggagggtgaagccagggcaggatcaagctcaccaggcgggggaaacggggcccacggtctgcggttacatgggactggacagcgcgtccggcagcgccactgagacgcagaagctgaatttcgagcagcagccggactccagggaattcggctgcgccaagaccctgtacatctcagatgcagacaagaggaagcactttcggctggtgctgcggctggtgctgcgcgggggccgggagctgggtaccttccacagccgccttatcaaggtcatctcgaagccctcgcagaagaagcagtcgctgaaaaacaccgatctgtgcatatcctccggctcaaaggtctccctcttcaaccgcctgcgctctcagacggtctccacacgctacctctctgtggaggatggggcctttgtggccagtgcacgacagtgggctgccttcacgctccacctggctgatgggcactctgcccaaggagacttcccaccgcgagagggctacgttcgctatggctccctggtgcagctcgtctgcacggtcaccggcatcacactacctcccatgatcatccgtaaagtagcaaaacagtgtgcgctccttgatgtggatgagcccatctcccagctgcacaagtgtgcattccagtttccaggcagtcccccaggagggggtggcacctacttatgccttgccacagagaaggtggtgcaatttcaggcctctccctgccccaaggaggcgaacagggctctgcttaacgacagctcttgctggaccatcatcggcaccgagtcggtggaattttccttcagcaccagcctggcgtgtaccctggagccggtcactccggtgcctctcatcagcaccctagagctgagcggcgggggcgacgtggccacgctggagctccacggagagaacttccacgcggggctcaaggtgtggtttggggacgtggaggcagaaaccatgtacaggtacggggtggagcccgcggtccctggtgtgcgtggtgccggacgtggcggccttctgcagcgactggcgctggctgcgcgctcccatcacaatccccatgagcctggtgcgcgccgacgggctcttctaccctagtgccttctccttcacctacaccccggaatacagcgtgcggccgggtcaccccggcgtccccgagcccgccaccgacgccgacgcgctcctggagagcatccatcaggagttcacgcgcaccaacttccacctcttcatccagacttag

SEQ ID NO: 393367 - DNA, 376 bp, Homo sapiens
gtggagcttctggtcacctccgacggggcggacgtccgatatctgggagaggttggttcatccgacgggggagggctgggatgagatggccctgtacctgtgagccccctaggaattcggctgcgccaagaccctgtacatctcagatgcagacaagaggaagcactttcggctggtgctgcggctggtgctgcgcgggggccgggagctgggtaccttccacagccgccttatcaaggtcatctcgaagccctcgcagaagaagcagtcgctgaaaaacaccgatcgtgagcagggcggggcctgacccccggcccgggcggggaggtgcaaccaagcccagaacggctaaactggggcgcggaggtgggggtag

SEQ ID NO: 393368 - DNA, 1231 bp, Homo sapiens
atggaccccgcaggggcagcagacccctcagtgcctcccaatcctttgactcacctgagcctgcaggacagatcagagatgcagctgcagagcgaagccgacaggcggagcctcccgggcacttggaccaggtcatccccagagcacaccaccattctgaggggaggcgtgcgcaggtgcctgcagcaacagtgtgaacagactgtgcggatcctgcatgccaaggtggcccagaaatcatacggaaatgagaagcggttcttctgccccccgccctgtgtctacctctcggggcctggctggagggtgaagccagggcaggatcaaggtgagggcggaatcaagggctgccggccgcctgctctgtagggaggaccacgagattgggcccgagacggggcggttcgcaggcgcagtctccccgcgccctctggcggcgagcgctaagcttgcctggcacctgcgtcctcccgagtccttgcagagccagttcgcgtccctttccagctcaccaggcgggggaaacggggcccacggtctgcggttacatgggactggacagcgcgtccggcagcgccactgagacgcagaagctgaatttcgagcagcagccggactccagggaattcggctgcgccaagaccctgtacatctcagatgcagacaagaggaagcactttcggctggtgctgcggctggtgctgcgcgggggccgggagctgggtaccttccacagccgccttatcaaggtcatctcgaagccctcgcagaagaagcagtcgctgaaaaacaccgatcgtgagcagggcggggcctgacccccggcccgggcggggaggtgcaaccaagcccagaacggctaaactggggcgcggaggtgggggtaggctgggcttaggggtcagagtggaaaaggtggagtcggagccgagaggggaaggagtctggatgagtgggtgcggcccaggcctggggatgagaagagttgaaggatgaaaagcagagaggaaagggacagataccaaattccaggttgggagttggggtcccagagcagacaaaagttgaactaggcaggagttgaactagggacagactaaaagtgacataggtggggcacggtggctcatgcctgtaatcccaacaatttgggaggccaaggtgggcggatcagttgatcccagaagttcaagactagctagggcaacatggcgaaatcttgtctgtacca

SEQ ID NO: 393369 - DNA, 612 bp, Homo sapiens
ataccacctcatgattcatcttggagtggcccaagcctccctccaccttgtttaaattgccccattcccggagaccttgccctgtgcccagcgctgggctgagcaatgctgaccaggaagcagtgatcactgccccactagggctcaccttccactagaggaaagagacctgtccctagacagtgatgacccagagtgggcatggctggggtagggaatcccagggggctacaggaacccagagtgggcacctgactcagcctgggaggtcagggagtgcttccaggaggaggcgatgtctgagctgatacttaaaagatgatgaggccagacgtggtggctcatgcctgtaatcccagcactttgggagactgaggcaggcgggatgcttgagctcagaagtttgagaacagcctgagcaacgtgatgaaactccatctccacaaaaaattttggaaaaattagccaggcatggtggcacatgcctgtaagtcctagctactcaggaggctgaggtgggaggatggcttgagcctgggaggtcaaggcttcagtgagccgagattgcaccactgcactccagcctgggcaacatggcaagaccctgtctca

SEQ ID NO: 393370 - DNA, 996 bp, Homo sapiens
gtattgtcgtctcctcacagaagcagtaacagacttatccaaatgagtcttatgggatagatgtggccaagggatagcggactagagaattgagggtgcgttgaaggtcatacagttttgcattttatagtccagactacataggatagaaggtaaaatcaggtagcagggaatagagggcccagagaataggctcagtggaagtaaggaatgaaaaatgttgaggccagaaggttgggataaggaaccaagttgtatgaatgtaatgtttttgggaagaagcagttctagatgatgaccagatcagggattctgtcagagggtagagaactgaggtttactggaccactcaactgtagatatccatcattactctttgttttgtggctgaggtgttaggatggtttagttgtcttgtattacagtaggatttaaggttgaggggatgatattgtgggtggagagctggcttataaatcttactcactgggaataatttggactcctgtcaatgccactgataagaatagggtgatagagagtctggcaggctgtatggacagtgtgaatttcaaaagagcctcttgatttggaattgaaaatatccaagaaaattttccttgtcttcttgttcccagataagagggagagatgtgaggattagcacccttatttgagagggctttgagggatgtagtgccattcatggaaagttggagttcagttaaatgtggagagatcattttataaaatggctgaaggtatagaggagttaatcatcatataggggttctagagatagagggaaaatttttagatactgaattgtaaagttttaaattaatgtatttgtttttatacaatatattctactttcttactatatagcattttgctttttaaactttattgaaaaataattttagacacagaaaaatggcaaaaataatacaaagaattcctgtgtatattttacccagtttccccaaataatat

SEQ ID NO: 393371 - DNA, 112 bp, Homo sapiens
agttaacttatggtccagggaagatacttttggaaatgttgatgtaaatgaacaattcaacactaggtgctctgattcttttgactacattttattctctctcttgctccat

SEQ ID NO: 393372 - DNA, 320 bp, Homo sapiens
ctccaactgggcgtctgggctgtctgggaagaagctcatgttcccactgaggtcgtggccacagttgctcctggtgtttgagggcctctgtgaggggctgcactaagcattttacaagcatttagtacagccccagatcatctcaggcctggagggaagaagtaatttgcctgaggtcacagagctggtaggtgggggacccacatgattgggaagcaagcttgtcctgctctgagcttcagaagcatgtcatgggcccatccatttacgacttcacactttctgtccttggaaagtcaccgagagcgtgcaccataatg

SEQ ID NO: 393373 - DNA, 642 bp, Homo sapiens
  misc_feature (13)..(13): n is a, c, g, or t
gacgctctctctngtggggcagggcaccagcctatggagcagccctgatctgcaaggagcggatctctggcgctgctgtgcacagctgcttccatgaaagctgctgcctaacaccaccagctcacccttgaatctttgctggttgccagatgatgcaggacaggcaagccccaagactggggcttagcctgggagagttcttggatttgccgacgctctctctgtggggaaatgatcccagattatccaggtaggcccgcggtagtcacaagggcccttgtaaaagggaggcaggagggtgcgagtcagaaaggagatgtgaccatggaagcaggggccagaatgacgtgggactgcgggtcagggaacatgggaagcctctagaaaccagaaaaggcaacagaaggattctctgctagagcctccggagggagcccagccctgccaccccatgttaggctcctgaagccaagatgcccaagctccctccagcttgccaacatggcaggataccatcaccaggccactggccaggactcatttagcactgggcctgaggagacttgtacacagctggccttcagacagcatatggtcaaaaaggagaggcagtgaagctccagcgagcctggcacaggccta

SEQ ID NO: 393374 - DNA, 446 bp, Homo sapiens
tgcctgagtcaggtgaacggcactgtgcctttggctattgctccttctatgatctctagccttgccagctacttcttgggtttaccctggaaggtgacatctaccaggcagccctgacatttggcgtggagaagttgctggtggcatagaagagttagaaagttccattgtctagggtagccagcattttatgttaacaagtatggccgggttgaattgggaagggtcaagcaaatcctcttccctcaacttgtatctagaccacagttttgtggaactgaacctgtgaggagggactagcagggctgtggtgggcctccagggacatgggttacctatgtgagaggtcatccctgcactgtgctctagagggcgacattcgtgctggactccaggtgaatgcagttcctgtaggcatgcgtggtggccctggtctggtgcctggg

SEQ ID NO: 393375 - DNA, 371 bp, Homo sapiens
cctcccaaagtgttggggttacaggtgtgaaccactgcgcctggccttttatttttatttttacagagacaaagtctcactatgttgcccaggctggtcttgaacttctgagctcaagtgattttcccatctcggccctaggattacaggcgtgagcctccagccctggctattctaaatgatttctgacagattttgccatgaggtggtccagagtacaacaatggtctgcagtagaatagtctgcttgttcttttttcttttttactttttgtgctctacatgttcagagaaactgaactaaagaaatgatccctaaaggaagtatagtcttgtctgctgttttttgtgttgctttgtttgttttgttt

SEQ ID NO: 393376 - DNA, 731 bp, Homo sapiens
catcatcacccagcatttattgatgtctactgtaaagtagagttggatggcaccatttctgctctcaaacagtttaaaagatccctgtgcagaaaaagacgtatttagaacattttggttggtaaggtaaagatgcatataatacaattagaaaaccaattctagtgacttttaaaaaagttaaatcttattatatgaattttataatgacaaattatatgaatagtataacaactaaagtaagatttgagaaagaattatatacctcctagttttatatgtattttcttttaatcatatttttgcatgaatataattttattactatgtatgtattaaatgtgtaattgaatataattaccagatttccctccaaattgtttatggaaatttgaaaatttcattctatctttctaacaacaattttcttgataaaataacaatttgaggaatattgtatagaattctaaatatggcatttgcttgtccataaattatgcttacatatgtctatattattatgattcaatatgaccaagactaatgatccatataaatatgctaattatagctccttccattgaaaaccagatgcaacacctgtagtgacacagtcgtggcaaagaaaatataaaatctattctcattatattattaacaactgaatatagattatgtaatgcacaaagaaaaataagctgttatatttcacataatattaatctattgcc

SEQ ID NO: 393377 - DNA, 283 bp, Homo sapiens
atgcagaccttgagctccaatttgggctccagatggaggagggaggaccagcccggggcaggagcatgaggcgcagagggcccccagtctgcctgtccctgggaagacgtctgtttattattcgcaaagtcttaagctctggtttgttaagctttgccatgctgggtgctgtggaatccactgggaataaggcccaggggaggtttattctactctggcaagtggctatcacaaagctgtctttgggttatagaggggaggagtgctgtttcctcccagcagc

SEQ ID NO: 393378 - DNA, 144 bp, Homo sapiens
aaaagagaagaaaaagtttatcagccttaatagtaaatgcttcggataattttctaggcatttttagggcttttttggtgtttttaacacctcagtatttatggcataatgaaatgtcattgatacaaaaataatgacctggtt

SEQ ID NO: 393379 - DNA, 190 bp, Homo sapiens
ctagactgtttaagggactgccttcctcttatctctgatctgaactcaggaaaggagcaaggaagctcttgagtgccatggcagcagcatgggggcaggaggtgagccagccagaggagaagggcagctgaatgacccaagcctctgcaccagtcagccagagagatgaagggcttgaagaagccgtgag

SEQ ID NO: 393380 - DNA, 2149 bp, Homo sapiens
cgagagagagagagatgagacccctgtggggcctacagtccagttatgaaggcagggttcctgtgtaagccagcaggcccagttctggaaaggccaggatgtgggttcagaagctcaaggacaatggactcattctgactggagggatccaggaaggcttcgtggaggaagtggcatttgacattggcatcaaggatgaacaggaatagagagaggggactggtgtctgcgtgaaggatcgccaaagcgctgttctggggtgagggcgatcagcccctcctgcccctcctgaactatgaggctcgggagcctttggcagaaggtggctctgcacgccccaggtgcaagcttggagcttccttttctgcactccacagcaggaagaagggcagtgtgaactgctcaccactgtcttcctgggtttgcagctctgcgcctggcacagagacaggctcagtgacggttgaaggaatcggagaaataatgaaaagtgtgttcatcctgcaggcagcagagcctcgggttaaccgttaacgtcaggaaatgacagatccaacgctcctgcttggggcagcgtggaggccagcggaggaactgcaggagcctaaaggagatggcgcgcgggcctggctcaggagagcagccgtctgaaagatggcggcgaagggtgcgggaggagatgccccgggcaggggcttggcggggtctggcaccaaacttcccaaagcagctgcctctgtgaactgtgcctggcagggagggagccacaccgggagtgaccctagacgctggctccccaggggtgactggaggcagtgtctcccgcccatgtgggcctccggcttggggtccccagagctctgccctgctgctggctgcactgagagaggtggccttctgaatgggccctgtccccggggagcctctggtaaagagattcacctgcaccctcaaaacacgccatgcccattggaggctctgggtgcaggctgcccctcaaacagagaaaaaccacacgctgtttaagacccaaaccaaggagacagcccctcatgcccccttctatctccccttctgtccagggccccctgcctgctctggtccaccccgtcctgaccccctctgcctgttcatctgagggccgtgagccaaggcctgggcctggccaagggtcagggatcctgggacctgcttgagaccatgccccatacactccttcggccagaaggtcagccgtagagacaaacccccaccctgagcccgcagtgtcagcaacgccctgtcctcagtgccaggcagtgtcaggctgagacccgggccacctgatccaacgtccactccaagcaagccagagccaggtgctgccagcctgcccatgtgcacacgttagcagacaggtttcctggtgtggcacacacgtgttatgaccgcggctgctgcccccagcccagagtgcacttccgggtaatccagcaccctgaggcttcactgctctcctgagagttttctaagattaaatctccttcacaatgacagcctcctgtcacctgggccctggtgacaaagcctttggagaggcaaggacccagccggggcattcacagtgggcatgctatccaccctccgcccctgtcctggcccccacagtggagccgccaccttgggtaacaggggctgcctgaggtcctggagaaggaagaaccaggtggcccaccttcggtgcacagggaacagcagggacctgacggcagcccccgcacccctccctgggctgaagttcaggctgtctcatcccttgccaggagctcagggctgagctaggttggcaggggatgggttgagggtctgttgtccagcagattgcccgggccccacccaggccactcagaaaacacctgtgagagccccgcaggcatgcagggcactgtcgtgagcacaccagtggggacagacgtccaggcaggagggagcagccagacccccatcccgccagggtcaccagctgggcatggtggcgcatgcctgtaatcctagctattcgggagggttaaacaggagaatcacttgaacccgggaggcggaggttatggagagccaaaatcgcaccactgcaccccagcctgggcaacaagagtaaaactccgtctca

SEQ ID NO: 393381 - DNA, 2340 bp, Homo sapiens
cgagagagagagagatgagacccctgtggggcctacagtccagttatgaaggcagggttcctgtgtaagccagcaggcccagttctggaaaggccaggatgtgggttcagaagctcaaggacaatggactcattctgactggagggatccaggaaggcttcgtggaggaagtggcatttgacattggcatcaaggatgaacaggaatagagagaggggactggtgtctgcgtgaaggatcgccaaagcgctgttctggggtgagggcgatcagcccctcctgcccctcctgaactatgaggctcgggagcctttggcagaaggtggctctgcacgccccaggtgcaagcttggagcttccttttctgcactccacagcaggaagaagggcagtgtgaactgctcaccactgtcttcctgggtttgcagctctgcgcctggcacagagacaggctcagtgacggttgaaggaatcggagaaataatgaaaagtgtgttcatcctgcaggcagcagagcctcgggttaaccgttaacgtcaggaaatgacagatccaacgctcctgcttggggcagcgtggaggccagcggaggaactgcaggagcctaaaggagatggcgcgcgggcctggctcaggagagcagccgtctgaaagatggcggcgaagggtgcgggaggagatgccccgggcaggggcttggcggggtctggcaccaaacttcccaaagcagctgcctctgtgaactgtgcctggcagggagggagccacaccgggagtgaccctagacgctggctccccaggggtgactggaggcagtgtctcccgcccatgtgggcctccggcttggggtccccagagctctgccctgctgctggctgcactgagagaggtggccttctgaatgggccctgtccccggggagcctctggtaaagagattcacctgcaccctcaaaacacgccatgcccattggaggctctgggtgcaggctgcccctcaaacagagaaaaaccacacgctgtttaagacccaaaccaaggagacagcccctcatgcccccttctatctccccttctgtccagggccccctgcctgctctggtccaccccgtcctgaccccctctgcctgttcatctgagggccgtgagccaaggcctgggcctggccaagggtcagggatcctgggacctgcttgagaccatgccccatacactccttcggccagaaggtcagccgtagagacaaacccccaccctgagcccgcagtgtcagcaacgccctgtcctcagtgccaggcagtgtcaggctgagacccgggccacctgatccaacgtccactccaagcaagccagagccaggtgctgccagcctgcccatgtgcacacgttagcagacaggtttcctggtgtggcacacacgtgttatgaccgcggctgctgcccccagcccagagtgcacttccgggtaatccagcaccctgaggcttcactgctctcctgagagttttctaagattaaatctccttcacaatgacagcctcctgtcacctgggccctggtgacaaagcctttggagaggcaaggacccagccggggcattcacagtgggcatgctatccaccctccgcccctgtcctggcccccacagtggagccgccaccttgggtaacaggggctgcctgaggtcctggagaaggaagaaccaggtggcccaccttcggtgcacagggaacagcagggacctgacggcagcccccgcacccctccctgggctgaagttcaggctgtctcatcccttgccaggagctcagggctgagctaggttggcaggggatgggttgagggtctgttgtccagcagattgcccgggccccacccaggccactcagaaaacacctgtgagagccccgcaggcatgcagggcactgtcgtgagcacaccagtggggacagacgtccaggcaggagggagcagccagacccccatcccgccagggtcaccaggtgagcaaggctggggaacaatggaggcggagccccgcgactgcccagctcactgcccccagtgtccaggctgtggtgcaggcgtggggacccaggtgtgttcaggggtctccttcagggaaggagaccaagctgggagtctggggaggctgaggtgtgaggtgacagcaggtgaagagtgagccacaatcagcattttcacatgaaaggaaactacaggcctgggcgcagtggctcacgcctgtaatcccggcactgtgggaggctgaggtgggaggatcacctgaggtcgggagttcgagaccagcctgaccaacatggagaaaccccatttctac

SEQ ID NO: 393382 - DNA, 523 bp, Homo sapiens
agcggggaacagagacagttaggatcgaaagtaaggacaggctcctgaccattaaattattttcctcgacatattttcgggggagcgtatagagtaatgtgtggttaaagaatgaactttaaaactttaatacctcatttacctttagtatgaattcatctaaattagctgtcaaaatacacaaaatggttgctttgatttagactaacttaaaagtccaaaaacaatgtgacaaatgggcaaagtcatctggcttctattacctatttcttcagtttttctttttttcttttcttttttttttttttttttttttgagttgtagtctcgctctgtcacccaggctggagtgaaatggcacgatctcagcagctcagtgcaacctctgactcctgggttcaagcaattctcctgcctcagcctcccaagtagctgggattataggcacctgccaccatgtctggctaatttttgtatttttagtagagacggggtttcaccatattggccaggctggtctcaa

SEQ ID NO: 393383 - DNA, 303 bp, Homo sapiens
gtggcatcttggcatagtgaactttaatgtgggaccatagttcacaaactgtgaccttaggccagttaatccttctgacccttgctttccctgttgatgaaatggaagtaacactacctactcgtagggctgtcaggaggtcaaatgtgtcaacgtctataaaatgccttagccaagtggttggcacatagatagtaagtgttccacaaatgttcatttccctgtagttttactaaccattttggtgcaatattatattctttataaagtcttgtgttttggccttttttttttttttttttt

SEQ ID NO: 393384 - DNA, 428 bp, Homo sapiens
gctgtaatgacaaataagataaaatcattctaatggtcacatacgtatataattctctaaagtgtacttcttccatatcacatttatggaattattgcagtagactcaatgctcataagaagacagctaaatacttcctctcccattgataatatgtgacctcagaatagtgacttaaccatttaggaatccatattccaccaaccgaaaaatagtatagtcattaattgatatctaaagacttctgctagaaaataaacgttgtcccataataacactgattttgtatatccagtgtttttgttgaaggattgtttttatcacctacattaattgtcctccgtccctctgtcctggcctctctatttacattattatgcttggttgttactcctaccaaatgagccaagtgggagggaagtagacca

SEQ ID NO: 393385 - DNA, 802 bp, Homo sapiens
ccagcatcctttgaagcatgagttcccacaagcagaagcagccctttacctcaccccctcagcttcaacagcagcaggtgaaacagcacagccagcctctcccttaggaaccatttgttcccataaccaaggagccatgctacccaaaacttggaacctggaacctggaaacaccaagattccagagttaggctgcaccaagatccctgagccaggctgcaccaaggtccttgagtcaatctccaccaaggtaccagagccacatccttcaacagtcacttccggcccagctcagcagaagtccaagtagaagtaatgtggtgcacagacaagcccttgagaagctgaccaccagatgctggacacactcttcctatctgcttctgtatcttaattgtctgtagacctaattgggctgatttgcctgctgctgctaggaggaggcctagtagtggggtgaggcttggattagcgtttagaagggctatttgttgtgggtctcatgagttggagtgtaggataaatcatgctaaggcgaggatgaaaccgatatcgccgatacggttgtataggattgcttgaatggctgctgtgttgcatctgctcgggcgtatatcaactgatgagcagaaggatatattcctacgcctctcaaccatgaacattggattagttgtagcggaactagaatatttggtatttggagatgagtgatattaagaccgataatgttgggtcgatttatatatacagggaatcttgatggcctggacgacatgctcaggataattttggaaaatct

SEQ ID NO: 393386 - DNA, 719 bp, Homo sapiens
ctaaacagctggaagaatagatttgtcattaactgagatgtaaatgctgctggagggcaggttttgtgggaaagtgctggagttcagtttcaggtgtccatcagccatctaagtgggaatgttgaataggtaagtgacatttttgagtctagagactcttagagtcataggatactaaggagaaagttctaggcagaaaatgtaattagggagaagaagaaaaggaagaagattgacctatgagagaagaggaaaatctagagaggatggtgtactggaaaaccaagtatggaaattcttcataggagaaaggaaacatcaagtatgtcaaatgctgcagataggtcaataagaagaggactaagaacttctctttggatttagtaatttggagatgattggtcacctcaacagaaactttttagtagaccgatgagataaaagccagttgagtgggtttgtgaatgggaagaaaataatttgtagacagtgagtttgaataatctttatgagttacactgcagtaggaagaagtaactggggaagtaactggtgaagggaatggagtcaagaagtttatttaagacaggagaaataagatttacatgctgaaggggaaaattcattagaaaaaatttgtcagtttcttatttaataaatagcatttgttatgtgccagcactattcgaaatgtcactgaaacacagactcagccactc

SEQ ID NO: 393387 - DNA, 309 bp, Homo sapiens
tgatgtggacctttacaagtggcatttccataaaatcaggaacaaggggccaaagtgaaatttttggttacttgagaccatctggtggtaaagataactcattaatggtgagttataactcattaatggtgagctcagctgccagggtccactcctgggttcagatgtcatcatccttccttgacccgcccttggaggaagacttaccattcttccattcaccacttgccactgcaacatctcttgctcttgttgtcagtgaggagtcctaaatttgcaaaatcccctttctgttgttataagccattg

SEQ ID NO: 393388 - DNA, 350 bp, Homo sapiens
aaaatatgggaggagtcggaaggggggtgagggaagagaagatggttagggagagggacaggggacctggaaggagttgatgagaagaaaggaggaattgggggaaatgggaggaaatggtgggagagatgggaaggagagatgggattggaaagtgaagatggagaaggggacagacagaaagaggtcaggtgtggtggctcacgtgtttgtttgttttgagggttttttgtttgtttgtttggttggtttctgacagagtctcattctgtcggccaggctggagtacagtggtgtgatctcggttcactgcaacctccgtctccccgggatacaggggtaccgagctc

SEQ ID NO: 393389 - DNA, 182 bp, Homo sapiens
tcagaggggttaagtaactcatctagttacaatccacaattgtaacttgcctggagttatagaagtggatccaagattcaaacccaggcaatctgattcagaatctatgcccccaaacatattaattaaatttactctgaaagaaaaccatttttcctccacaaactttatacaatggaaag

SEQ ID NO: 393390 - DNA, 293 bp, Homo sapiens
gtgagaagccaggtatggtgactgctgctggatgaagcttgtcccaccagaggctcgcttgtttcattgagcacctactgtgtgcttgtgggatgcaaacacacgtgtggtccctgccctcaggttaataggcaggggtggaacagttatgaaactgctctaaagtcattttctcaaactgggagtgacaaatgtatccacttggaaaagattgagaattttataagatttttaaatttttgtttattcacattgaggagaatctaaattcttttgaacttatgtatagattt

SEQ ID NO: 393391 - DNA, 366 bp, Homo sapiens
agaaaaagtgggctcttctgaggaggtaagtggccaggaatcaaaaagggggctaggtcacgtgacaagtgtcaagaattcaaaaagaaggaatcaaggcaacggaacagtaaaactggcaggatgcaaaaggcaaattttggtgttctgataaaagtggacatacatggctaagaaattatcaagagttataaaaagaaaaaaccacaagtttaaaaaatctttacacttgaggctcttttggggaacaagtcttggaaatcaccagtagtgctaattctgcctaacttcacggatgttagatctgatgctgatatgtaggctaaagtcagataaattcacttcttagaccaacaagcaccattc

SEQ ID NO: 393392 - DNA, 376 bp, Homo sapiens
tgacggtggtcatacccaaggcaggagtgtggcaagtgtgttctagaaacatcaaggagtccaaggtggatggagtggagtgaagaggaagaagagaagagactgtgtgggagaaatgggggctagatggtttaggaccttggaggccactgaaaggatgcttttgagtagaggagtgatagggtctacctatgtttagatagccagaatccaaccagctatcccaacttctaccactggatattaagtagaaagaccagacagaaggctacggcagtgccctcaattctaagaggtttggtcttccaacttccactccttgttccccttcaatctattctccacatagcatttagggattctattaaaacataag

SEQ ID NO: 393393 - DNA, 582 bp, Homo sapiens
attgccacatgcaggggccacttctccaggcttggcttttttgcagctcagaggcacagggtctccctgccttctctaacaacacaggcacctgctttcccttctctctctctccctggatgccccctgagccttctctgcaggcttgccccctgctagacctttccaccaaaacctctctccaccaaagcctctctccaccaaggctctctttccctcctctttttcccactctgcatgtttctctttgggccacttttcccaatggcttctgtcaccacctctcttctgctgacacccaaatctccttctagctcacaggtctctcctgagctccagcatcagcatctaactcatttctacatgggggcccacaaatatcaaaaactaaatacgtcccaagcagagctcagcaccttctcccaaatacccacctcccttgtcccagtgacgggtccacccttgtgcccaagactaagctcaaaatgcctctttgtcttttcttccctctctcagcaccctctcccctcccatcatagctaattgatgtccaagtcctaccagaatctcttcatttcctct

SEQ ID NO: 393394 - DNA, 585 bp, Homo sapiens
gagacactctaagtatattatcagtgatctccagagaaacagaaccaataatagatagatgatagacagatagatagatgatagatagatagatagatagatagatagatagatagatagatagaggtctagatacacaagcagagatttattatgatacttggcctacacgattatggaagcctagaagtcccataatatgctgtctgcaagccagagacccaggaaagccggtggtgtaattcagtctgagtctgaaagcctgagaaccaggagaagacagatgtcccaactcaagaacagagatggaaaatttgcacttcctttttgttctgttcatgctctcatcagattggatgacgcctgcctacattggtgagtgtggatcttctttactcaatttactgattcaaatgctaatctcacccagctatggtctcacagaaatagtgttttaccagctatctgggcatctcttagcccagtcaagttgcacgggaaattaaccatcacaccaagtataggttggtgcaaaagtaattgtggtttttgccattaaaagtaaggcatcacaatagtgagttc

SEQ ID NO: 393395 - DNA, 425 bp, Homo sapiens
caagttctatcatacattcaagggacaaagaaggggaaactaaaatggatggtggaagaggatgatatgggtatttgttagatttctggaccaactgcagcagcaagggttgtaatttgtctcactaatcttcctcttataagttttcccaggatttgtgactaaccagaatcctggagaagctgtacctggatacagtgaacttaatataagaagcaagcctatctgtatggtacaagaagtggactgtggagaatactactggttccatccagatcatctttactggttagcacacctgtcactgagatgtggtgtcagctgagaacaactcacagatgtccctttctccagaaaactgcaactgccccctcaccaggctgtgcctctcctcccccaatccagctttcctcatactcctcttc

SEQ ID NO: 393396 - DNA, 724 bp, Homo sapiens
tgaagtctagggtgatcattctgatgctcctgaggcttagtttatacgagcctcgatatgcgttagacttctatctctatactattatcaccagtgagccaccaatgtgaggtgggtgggaagcagggcatggccagggagctgaatgacatcatctaaaatggccaccgcagccacaagctctgctgcaaggccccaggtcctcttcagtgttgatggctgttgccagggtatgactctggttcacagccctggagctcatgccgcccaagtcccggttacttgcccaaacatgggttctaccaagacataaatgccttttccagtgcagacaggccaactccctgttcttaaatattgctacttttcaggattcccatagttctcagaagagctagatttttacagccactatcaggggaaccttatgccagtgtcaaaaccattctgcaaggtcagttgtccaccctactaggtcttacatgtcagtataggatatgttcgtgtatgaataatctaccactcaaagacaacatctggaatggtggcccatccctgtgctaggggaagcctcagagagacatctggggcattagggcaacagaaattccagaaaccaccacagaaacattccccatacacgtgtctagaccatatgttctaaccctttttttaagttacagaccttttaagaatctgctgaagtattgtgagttttttcccc

SEQ ID NO: 393397 - DNA, 128 bp, Homo sapiens
ttatgatcatgttttaatagaactggcaaggagttgcctaggtactctatgacagagctggtcatgcagctttgggagagctggatatagaccttagggaattaaccattcagacagcaacaccttct

SEQ ID NO: 393398 - DNA, 743 bp, Homo sapiens
gtggatgcattctgtatctactctaaaatgatactctgttatcatccctacactcttcattcttatttacttccttacttaagaatcatttcttctaatatcaaactacattttgaaatcagagaagagataagtggattagatttttgcttctaaagagtcctttaatcaacgtgacatgtataatagtggttccaaactcaaagatgatattttctgcactcacatctcacagggttccagtgaacccccaagtatggtaacagaagcaacagaacaatctcctatactttgattttataggacattaaccagaaagttgttacacattcatgagcaaagtgattacaatgagaattaaatttaatcttatcaaagattttgctctgatgactgtattttcttttctagtttctgtggttttattagctacatactttattaactacacgttgactctagttattgatcatgtcagatagatctatagctttggaagtataataaagtgtaaaagaaagggttgtatcactttctgcagcaggtggtacttcaaagatacaaaatataatactgtaaagagacatggcatttttatacctaatattactaattttttttacattattccaatatgtagcagttcagcagcacatggcaactatcttattttgcagattaggaaattgagggtcaaaaaagtgttctgctttgcctcaagtcatataactagtaagagactc

SEQ ID NO: 393399 - DNA, 528 bp, Homo sapiens
gcctggtagaatctcacaggtgtaggaaaatctagctgcctagggttataaaggatgccctttgtcctcaactcctttgacaccttctctctggagacctgctgaataaggaagggagtaaccacaaggaaaaaaaaaaaaaaggcaacaaaaaccaactggtgtaatttaaaccccttcaaagttaccaggctgctggagattagcatagagaaaatatgtcggggtccactttgatttgcaatttgagataaatgcgggaaacgtgtttgtgcttcctcggagaggattatgttgccttgcaagttgggttgttgtcacttttgattttagaatacttacttgtgcctccagtaatgaacaaaaaccaaaccacactgaaaccagcccgggggggtcctgctgtctcagaagctcaaggtattcctgtttctactgaattgctatttccagattcctgcctgtcacccgccagacttttaagggttctacgcttgggctgcatcgacgctggtagtttatttcaga

SEQ ID NO: 393400 - DNA, 444 bp, Homo sapiens
gcctcaagcctcctcctcagtcatcagtggagtcccacatcccccagcaacaagcctgctgcagcttcctttccaccctcagtcactggcagggagcagccatgtgaggcatggaggcacgggtggccttggtacaaatgcagctgtagattccacagcatagtggtggggccaggagttaattatgttccctgcaactgaagatgtgaggtgccattctcattgtgtcagcagggcagagagtgaggtaaacatgcagattatagagagaagactgatctttgggaatgaaaatgatgaagaggtaggaagaatggagtttgtaggctgggcgcaatggttcacatctgtaatcccagcactttggaggcctaggtaggagaatcgcttgagcccaggaattccagaccagcctgagcaacatagtgagacgtcatctctgca

SEQ ID NO: 393401 - DNA, 309 bp, Homo sapiens
ccatgttgcccaggctggtctccatctcctgagctgaagcaatctgccaacctcggcctcccaatgtactgggattacaggtgtgaaccacatcaccgtctcaatcaccgtctcaattttttgttttgttttgctttttgtttttttttttttttttgagatggagtctcgctctgtcacccagactggagtgcagtggcacaatctcggctcactgccacctttgcctcctgggttcaagtgattctcctgcctcagccttccagatagctgggattatagctttgcaccacaacacctggctaattt

SEQ ID NO: 393402 - DNA, 171 bp, Homo sapiens
gcctggactcatttttaagaaaaagaaaaacactattaaagggattctctctcttctcacactctcccacatgcccagctaacccagccaccctcattctctaccctacctgtactcccaccctccatgcccactttggctcagggagatggtccagctgaggaacagcct

SEQ ID NO: 393403 - DNA, 135 bp, Homo sapiens
aaaagtgatgttataaaatataaatgtttaagctgtatccggcatatagtcatatatgtcacgattgagcagagagtaactggtccaggaaaagtctgtctgtcagtgctggtgcacagcaagagctccctgagg

SEQ ID NO: 393404 - DNA, 378 bp, Homo sapiens
gctggtcaaccccatcttaaggaccagtcggggacggaatgcctggaaggccctatgagtgccccggcggcgcggggctgagccggtccccgagccgataactgagggtggggtggggactgcggtgctcgtctccgcggccggggagagcagggccgatccttttccccaagatcagagagctacctggtccccacgcccttccaacccaagaatacttttcttgctaagtcaccgagggaggagggcgatcccttcttggggagggccgcggggcgggggtcgcagaggcgccggcagcccccaaagccgggcccgggaggagaggagcgagggcagcgccctccccggacagtccccctcctccgggtctctcac

SEQ ID NO: 393405 - DNA, 421 bp, Homo sapiens
ttccaagggcaatggggtaagtctttgaaaagctttaaacagacaagtgatagtttgatttacatttcaaaaagatccctcaggctgcaataatcctggtgggaggtcgtggctgcccaatttaggtagcagcattgtaagtgttttgaggcagacatccatcttctgtgacattacagagctacatgtgatgggacttggtgactgactgaagggcaaaggtgactcagagaaagggaggagtaagtgacaacctcccaggttcctgtggcatttggtattcagatggcggtcacatgctcagcatggtaaatgtcatggcaggagtgccaacattgagagggcaattgggccacacagtctctaaaaactgtttgttctataaattactgtcaagctcgattccctcaagacattacag

SEQ ID NO: 393406 - DNA, 400 bp, Homo sapiens
tgataggggagaatgcaaaggtgtaagggtatttgtcccaaaacatgagcgtgatgagaaagctaaagttgtaaagcagatgtcctgactattcttagtgatttcatagtgttattttgtgttacactgtctattttaagttccgagctggaatttacaaagcaagacaaaactagggtagaactaaagagggtttcttgaaggtgagtggtaagtactttggtgatgtaaaggaagaaagaaagatgagtaggaaggcttacagacgggttttgaagtggaatagaacttgccgttttgtttatggcccgaaatcatcctttctctttaagcatattaaaaccattctacattatacttagccattttcctgctgaacgttttactcctaataccactg

SEQ ID NO: 393407 - DNA, 428 bp, Homo sapiens
aaaaggcacatcttacatgatagcaggcaaagagagaatgagagccaagtgaaaggggtttccccttataaagtcatcagatctcgtgggacttattcatggccacaagaacagtatggggaaaccgtccccatgattcaattatctcccactgggcccctcccacaacacgtgggaattatgggagctataattcaagatgagatttgggtggggacacagctgaaccatatcagagccttgggaagtgattaggtcctgaggatgaagccctcatgaaagaaattagcacccttataaaagaggccccagcaagcgcgttggccacttctactatgtaagagtacagagaaaaatcatctttgagggaaccagaaggctggccttcaccagacatcaaatctgccagtggcttcatcctagacttc

SEQ ID NO: 393408 - DNA, 212 bp, Homo sapiens
tggctcacgcctgtaatcccagcactttgggaggccgaggcgggcggatcacgaggtcaggagatcgagaccatcctggctaacatggcatgagccactgtgcctggcctatagagctctttttaaaaaacctttcaaatatcttatcagagtatagcctgcacaaacagaaagtaggcctcccatccaatttgtctggttttagaacaaac

SEQ ID NO: 393409 - DNA, 460 bp, Homo sapiens
tgcctgaagtcaaccaggtatttctatcattagactgcctggagtcaaacgggagtcactttcagtagaatgcctgggatagcccaagtgtctctgtaattagactgtctggtgtcggtcaggagtctctcctgttagaatgtctgggatcacccgggtgtctctatccttaaatttccttgggtcagtcaggattctctccaattaaaatgcctgtggtcagccattagcctctcccattagaatgcctgtagttgcccagttgtcactatcagactgcctagaatctctccaatcagaatactgggttcgcccaagtttctctatcattagactgtctgttgtcagccaggagtctctcccattagaatgcctggggtggcccaggtatctctatcattagaatgcctgtggtaggacgggaatctcttccattagaatgtcttgggacttccaggtg

SEQ ID NO: 393410 - DNA, 420 bp, Homo sapiens
tggtgtcatggctactagggagggttaggcgagaataagtcccagagaatggaatgccaggatgccttgatggggtgccacagctgcagagagggttggggcaatggggaaaattaaggggcaatggggaaattagagaactagagatggcagcagaggctgtaaaaagacgatatagatacatgttaaattttgcctaattcccaaatttccttcaggatggccatagccaagagagccaaaaattacttgtcatggcatgaaaaggtgctgcttatttcagcagggagaaaaggcctagtgtcaacggctgagcatccttcttcagcacatctgtaggctgatcttcatctgctaggatgccataaaacctcccaggaggctcttggtgctctcttcttgaccacagattgataactc

SEQ ID NO: 393411 - DNA, 233 bp, Homo sapiens
  misc_feature (15)..(15): n is a, c, g, or t
tcaggactccacttncagagtagctgtgggatgagtgatatttggctgtgccagtgggtaatttgccaatgtgtattcctgtttcatttcatgcttatttgtcaaaatcagcccaactgaattgtgggaaaagttgattactatttacctcaagcaattgggatgagtcctgcttcagggccaactccaggaagcttctgacctcacctaaataagtcctctactctggaaag

SEQ ID NO: 393412 - DNA, 372 bp, Homo sapiens
caaccctgcctagacaggatgaaaagcaagaacccaagccagagatgagcatgagccatacacactggtgcctgatgagttctaagtaggggctatgcaacgggcagtagagagagagagattaatcaccagagagtggaaggccttcttgctgaacaatctctgtgggatgagtgatatttggctgtgccagtgggtaatttgccaatgtgtattcctgtttcatttcatgcttatttgtcaaaatcagcccaactgaattgtgggaaaagttgattactatttacctcaagcaattgggatgagtcctgcttcagggccaactccaggaagcttctgacctcacctaaataagtcctctactctggaaag

SEQ ID NO: 393413 - DNA, 292 bp, Homo sapiens
cacacaagaaagcccagatacaatcatgttcctatcttcagaaacaagaatttctctctctatctcagaaacaaggatttctctctctcacacacacattctctctgtctctttctccttatatgcaagaaagaaatggagaaaaatggccaatccatctatattttattttagttacattcaacaaactaggtctcacatttttagacattctgaaaatgtcagaccataccccagcacagcgtaatagtgccatggaaacaaaagaaaaccaattcctttgtcattcttt

SEQ ID NO: 393414 - DNA, 502 bp, Homo sapiens
tgagagtcttaacatcagtggtaaaagctttaatatcatatgttctataattacacaaagaaagaaataataaatgtactgaaaacagtgactcactagccataatgaaagaccttttattgcatatatagtgctttgagaaaataaaatgtatgaaaagctagaaatagattgtagaagtctgtgattaaacagaagaatgtgattagggatttatcaagtttattgatgggaaatttacataaagtaaatttttcactctttgggtgtgtagttataaaaaattttgtacacaatcaattcagatgtacgcagttaattcaaagtgtacagtaatgggtccaccactacaatcaaatgtaaaccattccgtaatgcaaaaaagttccctcaggcctttttataattacctccctagcccataaccaaaccttagcatccactatagattttttcttttctagaatgtcatataaatggaatcatatagtatgtgtagtct

SEQ ID NO: 393415 - DNA, 538 bp, Homo sapiens
gattacagtggcttgagtgtcatgtgtgaaccaaaggagagtagtggggtggggaatgctgctaaggaagaggggagaaagggggcaactggtccttggatgtagtccataaggaaggtcctcagctggaaatcacatcctgaatataccctctttcatccaggattattttcattcaaaactggaaaccacaaattgtggtttctacaaagactatttcagaagtacctcttctgatggctgtgagtatggtaaccatttgtattcctttcctatgacagtccctcaattataccagaatccctgttgttctggtgcatttattcagagcacccatctttactcttaaaagggtactggtttggaccatatggtatggccatcctagctctgacttaacaatgtgattattccttttcccctaaatagatattgttcagattaatacattctaaaaggtaggtcatttggcatgtgatcttcattctacctttaatagctgtctgttccatggcacgccactttagtctaaactttc

SEQ ID NO: 393416 - DNA, 477 bp, Homo sapiens
tcaggtccaggggacgatgtgtgtggccaccccctgcaaacggtggtcctcggtcctctggtgcctcctgctccttgtacccgcaccctgctccatcagggaagaagacacttttgaacatacttctgcaggcccatgtttggtaaatcaagtcacaagattattgactatcagagctagtcagaggagggtccatggagaccctgtcgcccagctctctgtttacagagtaagacaccgaaccaggggtggggggtagcagaagccacaatccaggcccctatatcctgttaataggatatcatcacatcaatccacctgcccaggtcacaccatgtagtggattgcaacaggggagtttgctagagtgatacacaaaatattaaagaacccaggcacagaccagacacagtgcatgcaggtggtagtagggaatggggccccagaggttccctcctgagccagagattaaccgtt

SEQ ID NO: 393417 - DNA, 4637 bp, Homo sapiens
  misc_feature (3640)..(3640): n is a, c, g, or t
  misc_feature (3659)..(3659): n is a, c, g, or t
  misc_feature (3662)..(3662): n is a, c, g, or t
  misc_feature (3665)..(3665): n is a, c, g, or t
  misc_feature (3667)..(3667): n is a, c, g, or t
  misc_feature (3669)..(3669): n is a, c, g, or t
  misc_feature (3672)..(3673): n is a, c, g, or t
  misc_feature (3677)..(3677): n is a, c, g, or t
  misc_feature (3682)..(3682): n is a, c, g, or t
  misc_feature (3687)..(3687): n is a, c, g, or t
agttgtttgggttgagttcaggagaagcatggccaggtcgagtccgtacctgcgccaacttcagggacctctgctcccacccagggatctggtggaggaggacgacgactacctaaacgacgacgtggaggaggatgaagagtccgtgttcatcgacgccgaggagctctgcagtgggggcgtaaaggctggcagcctccccgggtgcctccgcgtttctatttgtgatgaaaacacacaagagacatgtaaagtgtttggacgttttccgataacaggtgcttggtggagagtgaaggtacaagtaaagcctgtggtgggatcaaggagctatcaatatcaagttcaaggatttccgtcttactttttgcagtctgatatgtcaccaccaaatcaaaaacatatctgtgctctctttcttaaagagtgtgaggtctccagtgatgatgttaataaatttttaacatgggtaaaggaggtatcaaactacaaaaacctaaactttgaaaatcttagggaaacactaagaactttccacaaggaaactggaaggaaagatcaaaagcagcctacacagaatggtcaggaagagttgttcctagacaatgagatgagtcttcctctggaaaacacaattccatttagaaatgtaatgacagctttgcagtttccgaagataatggaattccttccagttcttctgcctcgacactttaaatggatcatagggtcaggttctaaagagatgttgaaagagatagaagagattttaggtacacatccgtggaaacttggatttagtaaaataacctacagagagtggaaactcctgcgatgtgaggcaagttggatagcattttgtcagtgtgagtctcttctccagctgatgactgatttggagaagaatgcattaataatgtattccagactgaagcagatatgtagagaagatgggcacacatatgttgaagtgaatgacttaactttgacattgtcaaatcatatgtcatttcatgctgcttcagagtctctgaagtttttgaaggatattggtgtggtgacatatgagaagtcctgtgtcttcccttatgacctttaccatgctgaaagagccatcgccttttcaatttgtgacctgatgaagaaacctccttggcatttatgtgtcgatgtcgaaaaggtgcttgcctctattcacaccacaaaacctgagaattcaagcgatgatgcattgaatgagagcaaacctgatgaagtaagattagaaaatcctgtggatgttgtggacacacaggacaatggtgaccatatttggactaatggtgaaaatgaaattaatgcagaaataagtgaagttcagctggatcaggatcaggttgaagttccactggatcgggatcaggtggctgctttggaaatgatttgctccaatcctgtgacagtcataagtgggaaaggtggatgtgggaagaccacaatcgttagccgtctttttaagcatatagagcagttggaagaaagagaagtaaaaaaagcctgtgaagattttgaacaagaccagaatgcttcagaagaatggattacctttactgagcaaagtcaactagaggcggacaaggctatagaagttttgctcacagcacctacagggaaagcagctggcttactaagacagaaaactggtcttcatgcctacacactgtgtcaggtgacattagacagttacccagtattgaacctggtaacttgctgaaagatctttttgagactcttaagtcaagaaattgtgctattgagctaaagacaaaccatagagcagaatctcagctcattgtggacaatgctacaagaatctcaagacgccaatttccaaaatttgatgcagaactaaatatctctgataatccaacattacccatctcaattcaagataagacatttatttttgtcaggctcccagaagaggatgccagttctcagtcatctaaaactaatcatcactcttgtttatattctgcagttaaaactttactacaagaaaataacttacaaaatgcaaaaacatcacaatttattgcatttagaaggcaagactgtgatctaattaatgactgctgctgcaaacactacacaggccacctcaccaaagaccatcagagtagacttgtttttggaattggtgataaaatttgttgtaccaggaatgcatacctctcagacttactacctgaaaatatctctggaagtcagcaaaataatgatctagatgccagtagtgaagacttttctggtacgcttcctgattttgctaaaaataagcgtgactttgaaagtaacgttcgactgtgcaatggagagatatttttcataacaaatgatgtaactgatgtaacttttggaaagagaagatctttgaccattaataatatggctggcctggaagtaactgtggattttaagaaactaatgaaatattgtcgcataaaacatgcatgggcaagaactattcacacttttcaggggtccgaggagcaaacagttgtctatgtggtggggaaggcgggccgccagcactggcagcatgtctacaccgccgtgaccaggggccgctgccgagtgtatgtgattgcagaggagtctcagctccggaatgccattatgaaaaacagttttcctagaaaaactcgtttgaaacatttcttgcaaagtaagctctcctctagcggcgcacctccagcagattttctgtccccacggaagagctctggagacagtggaggacccagcacaccgtcagcatctccactccctgtagtcacagaccacgccatgacaaatgatgtcacctggagcgaggcctcttcgcctgatgagaggacactcacctttgctgaaagatggcaattatcttcacctgatggagtagatacagatgatgatttaccaaaatcgcgagcatccaaaagaacctgtggtgtgaatgatgatgaaagtccaagcaaaatttttatggtgggagaatctccacaagtgtcttccagacttcagaatttgagactgaataatttaattcccaggcaacttttcaagcccaccgataatcaagaaacttagttttatttcaaattgttccgagtaactatgtttttctattggagacaaaatgaacatcgtaacgtcaaagtaccaagataaaaaaagtttcctataactggagttttaaggtatttgtgttagcaaatgttttaaatccatttcatcaaagtattaatgatttcaacacgtcatcatgagaactggtagcactggacataagtgaagagattagatattttatatacatatatatttttatacaattatgtacattaagccaggcacggtggctcatgcctgtaatcccagcactttgggaggctgaggcaggtggatcaccagaggccaggagtttgagaccagcctgaccaacatggtgaaaccccatctctactaaaaatgcaaaaattatatgggtgtggtagcacatgcctgtaatctcagctactcaggaggctgaggcaggagaatcgcttgaacccgggaggcggaggttgcagtgagctgagattgcaccattgcactccatcctgggtggcagagngagactccgtctccaaaanaanaanananaannaaanaaaanaaaanaaaataaaataaaataaaataaaataaaataaagcacactcagttaaatatgaatgtcagataagtaccaaataacttgtgagtataaatgtatcccaaatatggaatggaatacacatagtaaacatttttttttattatctcaaattcaaatgacactcagcatcttgaatttaatctgacaactccacctcctcctaccctctttgccccttgtcaggcaagctcaatagctaggccgagagctgctgagggcggggaccttgtctgtctaggccactgctgtatgcgtgcctggccctcagcagggaacctgacatgaagcacacgctggataaataaatacctgttgctggagcgagtgatgggttcccagccctcactggggaatcgaggggactccacctcagcccagccagatggaatcgtcgggaacagagtgcaccttaatttctgcgaagaccaatgcaaattagaagaagactgagatgcaggctgtttgatccaagagatgctttttaattattgtaaaacagctgtgacttactgagcaccaactgtgtacccggcctcacactgttctcatacacaacagctccacggggaaggcattctcaccgagattcagagaggggcagacctggcctcgggtcgcacagctgggaaccggacaccgggctctctccagtcagctcgggtgctgctggccccagcacctcccccatggcgtggaccagggcctccgaggctgctttaaagaaggttctttgagaacggcgcatgtaccgtgtggacactcgtgtgcgcccctgaagtttttgagccagccaccctgtcatcaatcttggttatgcagttcatttattcagtagaccccaggttcccatccacgtttggtgcacaggagaactcccctgctcaggaattctgaattaaggaggctttgaatg

SEQ ID NO: 393418 - DNA, 348 bp, Homo sapiens
aaacctgaacttagcagcatgtttagcagtgtgtttagagttcttggaggatgaataaaaatggaacccataaaatggacacataataatagtctggccaggtagaagtgcttgagagcactttgaacacttgtctcctttccttgtctgtaaactgtctgaacctattttatagcatttagtcttcacaccatatttttcctgccaggggtccgaggagcaaacagttgtctatgtggtggggaaggcgggccgccagcactggcagcatgtctacaccgccgtgaccaggggccgctgccgagtgtatgtgattgcagaggagtctcagctccggaatgccattat

SEQ ID NO: 393419 - DNA, 4443 bp, Homo sapiens
  misc_feature (3446)..(3446): n is a, c, g, or t
  misc_feature (3465)..(3465): n is a, c, g, or t
  misc_feature (3468)..(3468): n is a, c, g, or t
  misc_feature (3471)..(3471): n is a, c, g, or t
  misc_feature (3473)..(3473): n is a, c, g, or t
  misc_feature (3475)..(3475): n is a, c, g, or t
  misc_feature (3478)..(3479): n is a, c, g, or t
  misc_feature (3483)..(3483): n is a, c, g, or t
  misc_feature (3488)..(3488): n is a, c, g, or t
  misc_feature (3493)..(3493): n is a, c, g, or t
agttgtttgggttgagttcaggagaagcatggccaggtcgagtccgtacctgcgccaacttcagggacctctgctcccacccagggatctggtggaggaggacgacgactacctaaacgacgacgtggaggaggatgaagagtccgtgttcatcgacgccgaggagctctgcagtgggggcgtaaaggctggcagcctccccgggtgcctccgcgtttctatttgtgatgaaaacacacaagagacatgtaaagtgtttggacgttttccgataacaggtgcttggtggagagtgaaggtacaagtaaagcctgtggtgggatcaaggagctatcaatatcaagttcaaggatttccgtcttactttttgcagtctgatatgtcaccaccaaatcaaaaacatatctgtgctctctttcttaaagagtgtgaggtctccagtgatgatgttaataaatttttaacatgggtaaaggaggtatcaaactacaaaaacctaaactttgaaaatcttagggaaacactaagaactttccacaaggaaactggaaggaaagatcaaaagcagcctacacagaatggtcaggaagagttgttcctagacaatgagatgagtcttcctctggaaaacacaattccatttagaaatgtaatgacagctttgcagtttccgaagataatggaattccttccagttcttctgcctcgacactttaaatggatcatagggtcaggttctaaagagatgttgaaagagatagaagagattttaggtacacatccgtggaaacttggatttagtaaaataacctacagagagtggaaactcctgcgatgtgaggcaagttggatagcattttgtcagtgtgagtctcttctccagctgatgactgatttggagaagaatgcattaataatgtattccagactgaagcagatatgtagagaagatgggcacacatatgttgaagtgaatgacttaactttgacattgtcaaatcatatgtcatttcatgctgcttcagagtctctgaagtttttgaaggatattggtgtggtgacatatgagaagtcctgtgtcttcccttatgacctttaccatgctgaaagagccatcgccttttcaatttgtgacctgatgaagaaacctccttggcatttatgtgtcgatgtcgaaaaggtgcttgcctctattcacaccacaaaacctgagaattcaagcgatgatgcattgaatgagagcaaacctgatgaagtaagattagaaaatcctgtggatgttgtggacacacaggacaatggtgaccatatttggactaatggtgaaaatgaaattaatgcagaaataagtgaagttcagctggatcaggatcaggttgaagttccactggatcgggatcaggtggctgctttggaaatgatttgctccaatcctgtgacagtcataagtgggaaaggtggatgtgggaagaccacaatcgttagccgtctttttaagcatatagagcagttggaagaaagagaagtaaaaaaagcctgtgaagattttgaacaagaccagaatgcttcagaagaatggattacctttactgagcaaagtcaactagaggcggacaaggctatagaagttttgctcacagcacctacagggaaagcagctggcttactaagacagaaaactggtcttcatgcctacacactgtgtcaggtgacattagacagttacccagtattgaacctggtaacttgctgaaagatctttttgagactcttaagtcaagaaattgtgctattgagctaaagacaaaccatagagcagaatctcagctcattgtggacaatgctacaagaatctcaagacgccaatttccaaaatttgatgcagaactaaatatctctgataatccaacattacccatctcaattcaagataagacatttatttttgtcaggctcccagaagaggatgccagttctcagtcatctaaaactaatcatcactcttgtttatattctgcagttaaaactttactacaagaaaataacttacaaaatgcaaaaacatcacaatttattgcatttagaaggcaagactgtgatctaattaatgactgctgctgcaaacactacacaggccacctcaccaaagaccatcagagtagacttgtttttggaattggtgataaaatttgttgtaccaggaatgcatacctctcagacttactacctgaaaatatctctggaagtcagcaaaataatgatctagatgccagtagtgaagacttttctggtacgcttcctgattttgctaaaaataagcgtgactttgaaagtaacgttcgactgtgcaatggagagatatttttcataacaaatgatgtaactgatgtaacttttggaaagagaagatctttgaccattaataatatggctggcctggaagtaactgtggattttaagaaactaatgaaatattgtcgcataaaacatgcatgggcaagaactattcacacttttcaggggtccgaggagcaaacagttgtctatgtggtggggaaggcgggccgccagcactggcagcatgtctacaccgccgtgaccaggggccgctgccgagtgtatgtgattgcagaggagtctcagctccggaatgccattatgaaaaacagttttcctagaaaaactcgtttgaaacatttcttgcaaagtaagctctcctctagcggcgcacctccagcagattttctgtccccacggaagagctctggagacagtggaggacccagcacaccgtcagcatctccactccctgtagtcacagaccacgccatgacaaatgatgtcacctggagcgaggcctcttcgcctgatgagaggacactcacctttgctgaaagatggcaattatcttcacctgatggagtagatacagatgatgatttaccaaaatcgcgagcatccaaaagaacctgtggtgtgaatgatgatgaaagtccaagcaaaatttttatggtgggagaatctccacaagtgtcttccagacttcagaatttgagactgaataatttaattcccaggcaacttttcaagcccacagggtctggtggttcagtagaaggactcctgcagaaggtgctggataaacactggaagatctagaaataaaaataaaagaaagactgggcacggtggctcatgcctgtaatcccagcactttgggaggctgaggcaggtggatcaccagaggccaggagtttgagaccagcctgaccaacatggtgaaaccccatctctactaaaaatgcaaaaattatatgggtgtggtagcacatgcctgtaatctcagctactcaggaggctgaggcaggagaatcgcttgaacccgggaggcggaggttgcagtgagctgagattgcaccattgcactccatcctgggtggcagagngagactccgtctccaaaanaanaanananaannaaanaaaanaaaanaaaataaaataaaataaaataaaataaaataaagcacactcagttaaatatgaatgtcagataagtaccaaataacttgtgagtataaatgtatcccaaatatggaatggaatacacatagtaaacatttttttttattatctcaaattcaaatgacactcagcatcttgaatttaatctgacaactccacctcctcctaccctctttgccccttgtcaggcaagctcaatagctaggccgagagctgctgagggcggggaccttgtctgtctaggccactgctgtatgcgtgcctggccctcagcagggaacctgacatgaagcacacgctggataaataaatacctgttgctggagcgagtgatgggttcccagccctcactggggaatcgaggggactccacctcagcccagccagatggaatcgtcgggaacagagtgcaccttaatttctgcgaagaccaatgcaaattagaagaagactgagatgcaggctgtttgatccaagagatgctttttaattattgtaaaacagctgtgacttactgagcaccaactgtgtacccggcctcacactgttctcatacacaacagctccacggggaaggcattctcaccgagattcagagaggggcagacctggcctcgggtcgcacagctgggaaccggacaccgggctctctccagtcagctcgggtgctgctggccccagcacctcccccatggcgtggaccagggcctccgaggctgctttaaagaaggttctttgagaacggcgcatgtaccgtgtggacactcgtgtgcgcccctgaagtttttgagccagccaccctgtcatcaatcttggttatgcagttcatttattcagtagaccccaggttcccatccacgtttggtgcacaggagaactcccctgctcaggaattctgaattaaggaggctttgaatg

SEQ ID NO: 393420 - DNA, 380 bp, Homo sapiens
agttgtttgggttgagttcaggagaagcatggccaggtcgagtccgtacctgcgccaacttcagggacctctgctcccacccagggatctggtggaggaggacgacgactacctaaacgacgacgtggaggaggatgaagagtccgtgttcatcgacgccgaggagctctgcagtgggggcgtaaaggctggcagcctccccgggtgcctccgcggtgaggaaggcgtctgcccgggggatggggttggagggtccaaagtagcgcttcccattctggctttgccctgagcaaggcacccagtcgtgctaacagatttagcttatcagtggtctagctgcttcatcctaccaagggtaaaattatgactataataatagc

SEQ ID NO: 393421 - DNA, 205 bp, Homo sapiens
ggtaaggttgtgcagagatttgggatttgggctcaatcagactctaagcctctctcaatttctagccttcgatgtccgcttttatagtaaatatttgttgaattgattagtacttggtaaacttgtgcttgaacttcatttacagattatgttgcacaaaacacttgtggctgtagcctcctttccagtgctatatgtgaccctt

SEQ ID NO: 393422 - DNA, 130 bp, Homo sapiens
attttaagtcgttttatgctttaaaaatatttatatttaatataaacaaaagaaacttacttttaaaactcttagataaatttttctgctgcttgcagtttttcacttggctagtgtggaaaatgaaaaa

SEQ ID NO: 393423 - DNA, 576 bp, Homo sapiens
aagagccaacatctattcagagattgaaacttaatgatcctttaatatctttgctggatgttgttagaatggtatttcaaacattttctacaatttgaattaaatattaccttactaaataacgcgaggctgggcaaaaaaaaatgttaagcataactccaaatatagcataacagtttaatgctctgtttgttgccttaacaaaaaatgaatgtctgcaacacattcacaaaccacctggagattcgaactcacagtgaaagtgcaatgacatattgtgctacttgacattagctattaccaaagacggttcaaaaggaagagaacacagacaatcttattagtataattggaaatgtgctgatatacccaccttaccaaacatcttctcttgcagtgtattatattacctgagaaaagtaacttacaatcagtgctaatatgctccttaacctgatttacaagggcaactagcaataaacagaacaaggcccgtgaactaccacacaggtgacttcaattctgtatatctggactggatgggaatacgggggcttacatgtttgtggccttctt

SEQ ID NO: 393424 - DNA, 105 bp, Homo sapiens
tctggatatattttgatgagaatatgagaaagtagccacaaatcacaccgtgcaccatgaaatttgcaacagaaatttcatagccaaatatatttaagtgttctt

SEQ ID NO: 393425 - DNA, 197 bp, Homo sapiens
tccactgcgggtgttgctgaaccccactgggactctagagccaatgtcaatcatactccttggagtcatcccacccaaggggccagagaactggggtattcatgcaccaatttccaccaggctgtggccgaggttgtgcccaggggtcttccgctttctagcttttctggcttgctgcatgcgtgggcaaagtgggc

SEQ ID NO: 393426 - DNA, 505 bp, Homo sapiens
gtcttttcggagttttgatagctttatcctttagtttctgggctggttcctctgcccgagcagctctgaggacatggggctgttggtgtgtttgattctgaggcgtgcccatgaaggctgctgctctcggaggtgttctgagagggtctctgatgggagtgagacactctctcctgggctgggcagtcgatgaagttggaggggctggacaggaggggctttctggactggaattcactgaatgtggccaagtacagtttggcaaaaacccaggcggctgagtaccttgcctcttaggagttcttggtgtcttcgtttcaagagaggtaccttctcctgcctgggtatgtcgtttttgaggagtgatttttgaatccaatggtgagtcatggccgggtgaggaggagtcttttaaggactccttaaaagctgcctgctttgtaggggtcatttttgcaggggacttctgcagcctttctggagtatacaacggagtttgtggtgt

SEQ ID NO: 393427 - DNA, 444 bp, Homo sapiens
cgagtctcattggtgcccttgacaagagcagtctctgtggaatggtagaggcagaaacatgactgaaatggattagaaagagaataggaagagaaaaattgttcggttgactttttagaccactctttaaaagattttgctataaagaagtgagacaggctgggcgcagtgactcatgcctgtaatcgtaacactttgggaggccgaggtgggtggatcacttgaaaccaggtgtttgaaaccagcctgggcaatgtagcagcaccccgtctctacaaaaaatacaaaaattaactgggcatggtggtatgcacctgtagtcccagctacttgggaggctgaggtgggacaatggcttgagcctgggaggtcaaggctgcagtgagccaagatcacgccactgcatcccagcctgaatggcagagtgagacgctgtcaaaaaaa

SEQ ID NO: 393428 - DNA, 349 bp, Homo sapiens
cttctgcggtcgctctagaggactccccggagtagaaatgggagaagaggcagatgttgagggtgagagagttgcagatccaggcctgggtgggccatggggatggtggcaccaggccccaacaccctgggctctgccctgcagaatcgccagcccaggctgaggcaggatggctgggctctggtacttaagcaaatacatggaaatttccccttggaaccaccaggaaatggggtactatttcttcatctgtggataacaagggtttaactaattaggcaccaaagtgagtattttggaaggacttatcaaacctcttagaggttattgagcataatttcacttcttt

SEQ ID NO: 393429 - DNA, 267 bp, Homo sapiens
ggcaaaggggcaaagtctgtccacagactcacaggaagggaggtgcatggcagacacaggcaggaggtggggttggggtggaaaagttcagggagggctcaaaagcagaccaaggcctgtttctgaaacccagcccactcactggttcctccacacttggcccatgctgttcctctcccatgtgacttttccatcttccccctccaacctgtcacccatccatccttcaaaacttaggtcagttagctctcacctagccctcagcag

SEQ ID NO: 393430 - DNA, 1419 bp, Homo sapiens
gacagcctccaccagagtcgcccacctttctggaagctgcagggctctccatccaggatccagaagcattgaaggggaccagccgctgaagggattctcagtcccatctgactccccatgaggctcctggctttcctgagtctgctggccttggtgctgcaggagacagggacagcttctctcccaaggaaggagaggaagaggagagaggagcagatgcccagggaaggcgattcctttgaagttctgcctctgcggaatgatgtcctgaacccagacaactatggtgaagtcattgacctgagcaactatgaggagctcacagattatggggaccaactccccgaggttaaggtgactagcctcgctcctgcaaccagcatcagtcccgccaagagcactacggctccagggacaccctcgtcaaaccccacgatgaccagacctactacagcagggctgctactgagttcccagcccaaccatggtctgcccacctgcctggtctgcgtgtgcctcggttcctctgtgtattgcgatgacattgacctagaggacattcctcctcttcctcggaggactgcctacctgtatgcacgcttcaaccgcatcagccgtatcagggccgaagacttcaaagggctgacaaagttgaagaggattgacctctccaacaacctcatttcctccatcgataatgatgccttccgcctgctacatgccctccaggacctcatcctcccagagaaccagttggaagctctgcccgtgctgcccagtggcattgagttcctggatgtccgcctaaatcggctccagagctcggggatacagcctgcagccttcagggcaatggagaagctgcagttcctttacctgtcagacaacctgctggattctatcccggggcctttgcccctgagcctgcgctctgtacacctgcagaataacctgatagagaccatgcagagagacgtcttctgtgaccccgaggagcacaaacacacccgcaggcagctggaagacatccgcctggatggcaaccccatcaacctcagcctcttccccagcgcctacttctgcctgcctcggctccccatcggccgcttcacgtagctcggagcccttccactcctcccaggtcatctcttggaccagcgggcatcacattctccagcagccgccatctcacacgcctccctcctgtgccgccggcagcatggacaaaggtctccatgcagggggaggaggcctgcttctttccccacagctctcacgtctcccttctactgcgggtgacaaagaagcccaaggaccacctccttcctgcctcattgtactgcgggtgacaaagaagcccaaggaccacctccttcctgcctcattgtaataaaattccccacactgaaaaaaaaagaa

SEQ ID NO: 393431 - DNA, 1359 bp, Homo sapiens
gacagcctccaccagagtcgcccacctttctggaagctgcagggctctccatccaggatccagaagcattgaaggggaccagccgctgaagggattctcagtcccatctgactccccatgaggctcctggctttcctgagtctgctggccttggtgctgcaggagacagggacagcttctctcccaaggaaggagaggaagaggagagaggagcagatgcccagggaaggcgattcctttgaagttctgcctctgcggaatgatgtcctgaacccagacaactatggtgaagtcattgacctgagcaactatgaggagctcacagattatggggaccaactccccgaggttaaggtgactagcctcgctcctgcaaccagcatcagtcccgccaagagcactacggctccagggacaccctcgtcaaaccccacgatgaccagacctactacagcagggctgctactgagttcccagcccaaccatggtctgcccacctgcctggtctgcgtgtgcctcggttcctctgtgtattgcgatgacattgacctagaggacattcctcctcttcctcggaggactgcctacctgtatgcacgcttcaaccgcatcagccgtatcagggccgaagacttcaaagggctgacaaagttgaagaggattgacctctccaacaacctcatttcctccatcgataatgatgccttccgcctgctacatgccctccaggacctcatcctcccagagaaccagttggaagctctgcccgtgctgcccagtggcattgagttcctggatgtccgcctaaatcggctccagagctcggggatacagcctgcagccttcagggcaatggagaagctgcagttcctttacctgtcagacaacctgctggattctatcccggggcctttgcccctgagcctgcgctctgtacacctgcagaataacctgatagagaccatgcagagagacgtcttctgtgaccccgaggagcacaaacacacccgcaggcagctggaagacatccgcctggatggcaaccccatcaacctcagcctcttccccagcgcctacttctgcctgcctcggctccccatcggccgcttcacgtagctcggagcccttccactcctcccaggtcatctcttggaccagcgggcatcacattctccagcagccgccatctcacacgcctccctcctgtgccgccggcagcatggacaaaggtctccatgcagggggaggaggcctgcttctttccccacagctctcacgtctcccttctactgcgggtgacaaagaagcccaaggaccacctccttcctgcctcattgtaataaaattccccacactgag

SEQ ID NO: 393432 - DNA, 708 bp, Homo sapiens
agacacagcaaaattacacaaatagtgcagatagtaatattgcagaagtagtattgcagaagtaatattgcagaatagtacagagagtaatattgcagaaatagtagagagaattcacttataagcttcatctcccagctcctaatgttagtaatttacataagcatagtaaaattatcaaaatcagaaaattcacactgagtaattagctaaagcacaggttttgtacaaatttcacaagtttttcccttaaccttttttttttcctgtttcaggatccaatctagggtcccacattgcatttagttgtcacatctctttactgtctcccaatctgttataggtcttcagactttcctagtctttctcaaccttgacactttttatgaggactggtcagttatcacgtcaaatgtctcccaatttagcattcaagtaggttaaggttatgcatatttggcaagaatactacagaagtaatgttctgttattctcagtgcatcatattatgggttatgatgttgatgatttttttattttgacttagttaaatgtatctttctattcactatagttagtgcttttaatgtttgaattaaagttgtttcctacctcaaggccttgatactttcctatgtattatccttcaacagctttattattttgcttttatatttagatctacaatattaaacttggtctcactaa

SEQ ID NO: 393433 - DNA, 483 bp, Homo sapiens
catatatgtaggctggaggcaggcggaagggacaaagaagtaccgtaaggccagcggttaaggtggaaggtagggaggagcaggagagagagaaggtggatgcaggcacggaaagcaatctgtaagtttgacagagatggtcagcaagagtgactctttggagcagtattgtgaatgtcaggtcaaaggatgtcggtcttctgtgtccaagttttccacccctgccatgagtgttatagctagggagaaacaacgtgtaaactcctgctatttcttacttggactattttagtgatctcttactaatggcaatgtttgccatttcttcccctgtggcaagctgtgatttcttctatttctaaccagttctttatagaactggtaggacttatgtttgatagattccttccgtatttaaaaaatttcatcgtgttccattgcctgtggaataaaacccttgcttcttgttgtggcatttgaggt

SEQ ID NO: 393434 - DNA, 191 bp, Homo sapiens
gttcaatggaggtaagtccagtccagtcccgcctgatgtcaccaaagcagtacaaggatttagggagagaatggatagggacaggcttaaagaaaagtgagtctaaaggcacgggattactcgtcccctccgccgggcacactaatgagattacccgaagcctcctgccaccgctctgccacggagccatg

SEQ ID NO: 393435 - DNA, 313 bp, Homo sapiens
agtagaggaggcatggagtcaaaagacccaagaacatctggtcatagatgcagactgatgacaactgtatatttaagatgtatatttggtcatgtttcatcataggactaaagaggaatctcaaaaccaaaatgccaaactttatgcaaaagtctgatacttgggacgaagtattttgaatactgttttctttgcttcttaagatcactgatgttgggtgctaagtatttcactatatttggggttgttttattaaaaatttaaatttagatgtatggtttcaatttcttgggattagatacatgatctgttt

SEQ ID NO: 393436 - DNA, 208 bp, Homo sapiens
aacgatggtccctcagcttccagtagctgggacataagcacacgccagcacacctgtaaccccaatatttggggaggctgagatgagaggatcacatgagctcaggagttaaagagacctgcctaggcaatatagtgagatcccgtttcaacaaataatttaaaaattatccaggtgtgctggcgtgtgcttatgtcccagctacttg

SEQ ID NO: 393437 - DNA, 337 bp, Homo sapiens
gatatgctagctgccctttccttctgccatgattgtaagcttcctgaggacctaaccagaagtagatggtggcaccttgcttcctgtacagcctgcagaaccatgggccaaaatgaatctgttttctttatacattaaccagtctcaggtattcctttatagcaatgcaaatggactgacacagaataacacatgtataatgggaatactggaaggaggagagaaaaaggaacagaagcaacatttaaagcaacaattactgagaatgtcccaaaatgaatgacagacacaaagctacagatctgcaaaactcagagaacatctaggaggataaata

SEQ ID NO: 393438 - DNA, 349 bp, Homo sapiens
tcggaaatgcctttttcgtttgattaagagttactggtttgtgagggcagtgactgagatgtcattatccgtgtttttggaagctgcagggttctgagtctagccctcaggagctcttagcatcagtgaaccttgccagcatcagcaggcccccagctcctgcccacagagcacctccctgccaggggccacagtccctagggcctccggtatcaggcggtcaggatgacagtatcctaagaaaaccctttcccctagccagtccccagcatgcagcacactgtctacctcagccatgagcctctgtccttgcgtgtgtgcagtttcttgtttagaacagacccacaag

SEQ ID NO: 393439 - DNA, 519 bp, Homo sapiens
tgagagctgggagccagggtgcagcatcttacctgagctagctgaatgggagaggaagagaggctcaatcaggactagggagagcaagtcacaggcagaggggaagttgggagtccaggggcaacagagaggagcaggtgtggggctgtgagcagggacagtgaccctggcagcctcaggccactgaagccagccctcacctcctggtgtgtaggcctggcccctgccaggctatgggaaagactcctccccatttgcatttcaggaaggctggacacaccctttgggaaacactggagacatgattgttcccagagaggctaagagcttaaggtgggcatcggggactctcaagatcaccacgcacctctgcttacctggtaacacagcaagcagcttgcccacctgctcctaaccccgagatgtgaatgggcaaggttcccagtttgaggaactctcttgggccacatccattcagcctaagaggccacagaatcatcaaaccctctacttcatcag

SEQ ID NO: 393440 - DNA, 410 bp, Homo sapiens
aagaaaatgacacagaaaaggcaaatagcagtgaatcacagaatgcctactaagtaataataaatgcagactagctctaacccaagactattcttccaaggtcagagtaattttgtatttaaaaaccaaaaccaaaaacaaaaactcttcttggatccctcacagaatggagatcacagggcaaactgctttctaaaatggagagataatctggcagatacagttgatcacagcttactagtagcagaagaccagaaacagaatccacagttgaagccactattggtaggagcaatttaaactgtaattgaccaattgctggggggtcattgagagttaaaaactccaaggacttacaggtttaagaggacctctccagtttttccaatttcaccgtctaggagcgtaat

SEQ ID NO: 393441 - DNA, 201 bp, Homo sapiens
cagtcttatgttttgttttattggtttattaattttaaggatttaaggattctttttgaactcattttaccataagaatatttacattccttttcaccaacttctgcttattcaaagatgtgaggaaattagttcactgtgctcaatcctcagctgttttcttccagcaactctgataagtccctggagaattcctttagg

SEQ ID NO: 393442 - DNA, 248 bp, Homo sapiens
atgagtggtgggaattcagatcggttgtgtgccttgtgagggcgcggcgaggtaccggcgcgcatctaggctttattaattttaaggatttaaggattctttttgaactcattttaccataagaatatttacattccttttcaccaacttctgcttattcaaagatgtgaggaaattagttcactgtgctcaatcctcagctgttttcttccagcaactctgataagtccctggagaattcctttagg

SEQ ID NO: 393443 - DNA, 259 bp, Homo sapiens
agaaacatttgaagagtggggaaactctccatctctagagttcctcctttggtatgctacaaaaggcttcaaaaaccaccttgtaaactatacggttttaaagctgaacaacttgaaatctggcaaagttaaacaatttttccaaggtgtcttattgatttaagttattaaaataaagtacaaaatcaaatacatatgatgtggcttctaaacccccaagggccagttttactctacccaatccctctattcatttaaa

SEQ ID NO: 393444 - DNA, 313 bp, Homo sapiens
cacacacacacagggggcttaaacaagttcaagtcgcagtattcattttgaaagcatgttttattactacagttcatagtcttggtagaggagaatattctatttgtatttctgaactaagggaagagaagcttattagaaattggctttttactgtggaatcaaactagatgatattaagattgaacaactggtgaacaacaacgagaaaagtatttcagcctatacagcaggttattcctcatctaggaatctttgagtctaggtgaacctggctttagggataaaatagcctttcacaagaaagataaac

SEQ ID NO: 393445 - DNA, 187 bp, Homo sapiens
accctcttgctcaataaacacagcctggcattttaaatgtcagcacatctcaattttgtgagagggtctgcctgagaggattgacttgaaactacacagcaaagaggaggtgctagtccacatttgcgtgttccatttgcatgagcaaaatggacctgaagatggagctgcagcaagaggggaggca

SEQ ID NO: 393446 - DNA, 681 bp, Homo sapiens
aaaaatataaataaaaataagtaaaaagaaatattagtaaatataaatataaatacatataaatataaaaatgcattcatgaaaagaaacaatttttaaatttaacatcactgagggcatcctatccatttcatttcatgattccattatgtcatttcacttagatgaaatgataagatgacttgagatgagatgaaatgatgagatgaaatgacaaaatgataagatgagatgatgagatgaaattttgagatgaaatggtgagtagaaatgatgagatgaaatgatgagacaaaatgacaaagttgaaaagaaattgaaaggagatgagatgaaatgagatgaaatgatgagatgatgaaatgatgagatgaaacgagatgaaatgatgagatgaaatgaaatgaaataatgaaatgatatgaaataatgaaattgaaatgagatgagatgagatgaaataatgagataaaatgagatgaaatgagatgaacgatgagatgacatgatgagatgaaatgagatgaaaaatgatgagatgaaaaatgagatgaaataatgaaatgaaataatgaaatgagatgaaatgaaatgaaataatgaaagcaaattatgaaatgtaatgaaattgaaatgaaattgaaatgagatgagttgaaatgatgagatgtaatgatgaaa

SEQ ID NO: 393447 - DNA, 512 bp, Homo sapiens
caggaataagagcagtcctcaaggctccaggagtgggagctgtagtaacacgcagtgcccagggagggacacatggcagggggtgtgcagcaggtgggcaaggcgctaatgaggggcctggagtcccaggccaagggctcagacttcctcctggggataatgggaaggagaactgtgtggccaggtttgtgcccttagtgaggtccccaagggggagcctggaaggaccactttcttcttttggcccttcggacccccagaggctctgcctcccacaccctggcctccctccccagtctctgggaggccaggcctccgcccctctcctgtgctgctccttcccccagaggactgcatccgccctcagcacttcaaggccctgcacgtgcccgcacctctccactccccaggctcagcttggacctctcttctgaactccagacttgtggatcctgctcccctcgccacttctgcacttggggtctaatggggcctcagcggaacatggagtt

SEQ ID NO: 393448 - DNA, 120 bp, Homo sapiens
ctaagattctctactcctttgagtctggggcatgctgggaaagccatcaggaatcatccaaggccaagtgtcctgaggctgtaggccctcaagcttgtgtcaagagcaaagcagggctat

SEQ ID NO: 393449 - DNA, 256 bp, Homo sapiens
taaaacccatgaagtcctaaacagtgttcacctttatgttcttaattaaatcttgtagcgttaatctccctgtctgccaaatttcctactgaaaggaatgaggcaccagatggcagggcattttctcatctactccacgcacagaaggagcagcgtgaagctatttcctttgccgggtttcactcctactctcccaaagacagtattaggagctgcaaagttggagaaaacccacagacatcatactcaaacaaac

SEQ ID NO: 393450 - DNA, 373 bp, Homo sapiens
agcgggactgcagggagtggggctgggaggtggctgtttgcacgtgtggtcagcacatccagtgagggggtccatgtactgtgggcagccccacagatggagttgggattgccctggactgagtactgggtcatcagactgcaaactgccattctcaagacatcgagtcccaggctggtgcaggagatacattgcagtgtgtcagcctttcttccatcgctcctctccaatgacagttcccgattttccaccgaggagtcactagtaccccacggcatgtgtgcgactggccactccccaccctgatctggggctggggcatgtggtcccagcctggatgtcaatatccttccaccaccctggccacagcgat

SEQ ID NO: 393451 - DNA, 395 bp, Homo sapiens
ttaataaggaaagaaaaaatatggtatgctgaggttgctaagacctacagtaaaaacgaatcttctatccacagaattgtcaaaaaggaaaaagaaattcatgcagttttagtcatctactgtgggtcttgggacttgtccccgtgggataagggagtactgtggtcttaccatacaatccagcaacctcaatctttggtaatgacctaaatgagataaaaatgtatggccacgcaaaaacctgcatatggatgttcatgacatcttcattcattattgacagaactcggaagcgacagtgatgttcttcagttcgtgaatggataaacaaacagtgatgcattcagacaatggagttagtgtttggaagaaacttttttttttttttttttttt

SEQ ID NO: 393452 - DNA, 152 bp, Homo sapiens
acattttagtggcttaacacaatctaagtttactacttgctcatgcaacactctaataaggcgaagctttctggtcaggctcctccaagcaggaagtcaagaaccaaggcttctcccagtctgtggctccgccattccccaagtcctcaaag

SEQ ID NO: 393453 - DNA, 803 bp, Homo sapiens
aatggtgaaagaccaaaaaatttccctgtacaatcaggatgaggacaatgaaacccactttcaccacttctattcaacatagtcctgaaagttacggctagagcaattaggggaaaaagggaaataaaagataaccaatttgtcggggaagaagtaaaagtatctctcttcacagatgacatatgtagaaaaccctagaattactttcacatgagcgcgcacacacacacagggctaagtaaactaaatcagcaaaaccaacacccataaatgagttgtatttctacacactagcaataagcaatctgaaaaggaaatttaaaaaacaatttcatttacagtaacaccacaaaagttaaaataggaataaattaaaccaaggaggcagaagactggtactctgaaaagtacaaaagagtgctgaaagaaatgagagaagacttgaatgaatggaaagatattctgtgttcacggatgggaaaactcgatatagttaagatgacaatactacccaatgtgatctaaaaattctgtgtaatctctatccaaatcttaatggcatttttttgcagcttagaaaaaatccattctaggccgggcgtggtggctcacgcctgtaatcccagcatttgggaggctgaggcgtgtggatcatgaggtcaggagatcaagaccatcctggctaatacactgaaaccctgtctctactaaaaatacaaaaaattagccgggcgtggtggcgggtgcctgtagtcccagctactcaggaggctgaggcaggagaatggcgtgaacctgggggg

SEQ ID NO: 393454 - DNA, 680 bp, Homo sapiens
  misc_feature (604)..(604): n is a, c, g, or t
  misc_feature (612)..(612): n is a, c, g, or t
aattatcagcctcagtgtaagatggtaaatcattgtactggcacagcagtgcatcaaaggcagtctaaagtgcttttaaagtcagtatgacactaggcaaggtctctggtgttactcacaggacagattagaaattgattgaataaccatgcctaaatgttatgtcactctggagggaattttcttttgaattctgcaggactcttttttatgttcttgtctgttaacctatttatcagatttaaacgaatatacaggaaatatttccacaaaatgcagagctgagaaaatagtgaaaatactggaaaacataatcaggaaccacaaatatctgggcagttagaaataacataaacagctaaaaattaccagtgtaaaattgttagatcctagctaaattataaaaatcacatattcttattcagatattgaagattttgtttagaagtagtccatgtgaacatgtcaaaggtaaacttggcatgtttatatataaacttagcctgagtgtgaagaattctgtaactattaaaattgcaatcttaggattaaaataataataaaaaaaaaagaaaactcgaaggggggcctgtacccaattcgncctattgngagtcgattacaattcaatggccgcgttttacacgtcgtgacttggaaacactgcgttacccaaatta

SEQ ID NO: 393455 - DNA, 396 bp, Homo sapiens
ctctttaagccacagtcttttggggatttttgttacagcagcttagcctttactttagtctatataagtggctaggctgggaccaaaccaagtcttgaacccaggtttcctgaccccaagttcagtgtcctcattctcctagccaacccttcctcatttttttttttttttttttttttttgggaaagggggtttccctttttaccccaacttgggttcccccccgggggtttttttttaaaaaaaaacacccataataggttttttgcaaaaggggccctttatttttcttttttttttccaaaaagcaaaaaaaaaatccctcttttaaaaaacgccctccttgtccgaaaggaaggtcttttttttttttttaaaattggaagtcttaacttg

SEQ ID NO: 393456 - DNA, 380 bp, Homo sapiens
tcttcagggctctcagttctaggatagcagctggggttttaccgtcctaccagctgggacccatgcctcagatagaagccccattgcctatgaaatgagaaggtatcacatgagtattccaaaatacaggcctccacttgggctctttccaaaagcaatagcgaaagggacagtttccgtccccgggccggtgagctgtattaactgttctgctcccggggtcgccatccaggcagtgacagccaccgtcgccaggcacaggccaggccaggccctgccgccccacctccatcccccttagtggatgtagatatgattgtttgcgactagcgaaccccctatagatgcagatgcctcctgagccggcatctgtgttgagt

SEQ ID NO: 393457 - DNA, 573 bp, Homo sapiens
aaggtaaatttcctttatgatgctacttggcccccagcatgatggtgcaagctggatcactggggctgctcagggaaaaggaacccagaagcctggcatgctggcaaaagggtaagaatttcttaccagtcagacttctggcttctctctctctctctggcaaacggttgtgaagtcttacagaaatggcaaaatcttacagaaatggtaaaaatcactatatttctcttctgtatagttttgattaatgcgaaaaataattctgaggctagtcttaaactgatgtatttgtgctatgaatttgtttttctgtgtcaaggggtaccttaggataaaatatgggcttaggactccataagcttgctgctcaagacagctcaacaagctggtcaataacaaactttcctgcaggtccctgaaacaaacaaaaaaactggatggggtctcatcttgttttatgtccttgggagcttgaccttgtaaccaggttgaggaactttctcttggtctccgccttccagggaatggggattttagggtttatgtcatagttagctctaaaaattatcttga

SEQ ID NO: 393458 - DNA, 400 bp, Homo sapiens
acacttgggttgctgcagtggttggggaggagggtgaggagtggtgctacagacatctaggaagaagaggacaaggatgctgccaaacatcctaaatgcacagggcatcaccccacagcaaggaatgatctagcctaaaatgtcaataatgctgaagtttcaaaaccctaatgcataggttgaaccatatgaaatgcatataatttttaataatacatattaggctgagccgtataaaactgcaaatattttggtttgtaaaaatggcagtttcatacagttcaacctaatgtaattatggatttctgaatgaactgctgtacaaataaattatttacattttaaaattcaaaaacattgcagggccaggtggctcacacctgtaatcccagcattttgg

SEQ ID NO: 393459 - DNA, 421 bp, Homo sapiens
tatagctgtaccacagacagctagagttggctaatgtagggtctctttgtgaagtaatgtggaatgagaaaagctggatagttaagtagaggctgtgtaatgttgatatttaggggagcatataaagaatattgggcttaatcttttagagcaataggaagtcattgaaatacattattgaggtggatgacatattcaaatttgcgttttgaaaacattgcaatatggagaagagatgtaaggccattagtggctattggttgattaaactgatcttactgcagtactctaggtaacaagtaatggtagcttgggctagagtggtggagccagagataatgggtagataccttaggtatttaggagataaatttgacagaactggatggtagatgggtattagatgtgaggtagagaagat

SEQ ID NO: 393460 - DNA, 206 bp, Homo sapiens
gtgcttgactccttcctctcccagcatgtgcaataaatgaagaaaaaagccccaacatttaaaatggaaagtttatagaaatattaggtgttgggccatgtgcggtggctcatgcctataatcccagcactttgggaggccgaggtgggcagatcacctgaggctgggagtttgagaccagcctgatcaacatggagaaaccccgt

SEQ ID NO: 393461 - DNA, 291 bp, Homo sapiens
  misc_feature (153)..(153): n is a, c, g, or t
aggaaacatcaagaaagacgtggatattagaccagctgctctcaaacttgaggaggcaccggaatcatctggaggacttttagaaacaggttgtgctcacacctgtaatcccagcactttgggaggccaaggcggggtggatcacaaggtcanggagatcgagaccatcttggctaaaacggtgaaaccccgtgtctactaaaaacacaaaaaattagccaggcatagtggcgagcgcttagtcccagctactcgggaggctgaggcaggagaatggcgtgaacccaggag

SEQ ID NO: 393462 - DNA, 458 bp, Homo sapiens
gaaacatttctagtttaccatcagagttttagccgcttccatgcttctgtgactgcagctactctcaggaagctgcactgttgcagaggtccattaactctttcaggacggtgtggaatcagtggggaaatctctaattgctactgacacagagcttttaggggcctggcctttgcagttccagatctactacagcaaacatcgttcaagatgtcccaccaagaaggcagcacagacggcttaccagacttagggactgaaagcctgttcagcagcccagaggagcagtctggagccgtggcggcgacagaggcctcctcagacattgacatagcgacctcagagctgagtgtgacagtgaccggagatggcagtgatagcagggatggtggattccccaacgatgccagcacagaaaatcgaagctcagaccaagaaagcgcaagtgaagacatcga

SEQ ID NO: 393463 - DNA, 261 bp, Homo sapiens
atttgagagtggttatgtatgaggtggaggtggggaatccaggaaaaccatggagttatgaaaaaattaaaactcattggtatattttatttgaactaaagttgatacaatctccaagaactagaagtatttattacataaaatcatctttttcaaaagtatatgtaaaccttaattgctgtcagaaaaatatgcacaatagtgtgtatacttgcattaaaaagggatatatatatatatacacgcacacacacacacaca

SEQ ID NO: 393464 - DNA, 373 bp, Homo sapiens
aaattcgaaaccagcctgaccaacatggagaaaccctgtctctactaaaaacacaaaattagccaggtgtggtggtgcatgcctgtaatcccagctactcgggaggctgaggagaaaaaagttgataaagtacctgggagtagcttgatttcctataggaaatagataaatcctgtagtaatcatgattagaggggaatttattgtagcattgtagcacagtgagccattaggtgccctgataaacttctaattatagttcttcacaaatcttgaggttgtcctccaatacccacctgagaatgttttctgccactcaaatgagttggaaatatagtctatttctgctttacatttccttattgtttatctgg

SEQ ID NO: 393465 - DNA, 964 bp, Homo sapiens
ctccatctcaaaatatatatatattagccttgaggagaaaaatcaaccaatcaaaaacaactcgtagttaacacgaatgttagaattaacagacaagtatattaaaagttattataactgtattttacatatgagaaaagttaagtagaaacatggaccttataaaaacgcccggctgattttgtatttttgatagagatggggtttcactatgttggtcaggctggtctcgaaatcctgatctcgtgatccacccacctcagcctcccaaaatgttgggattacaggcgtgaggcactgcgcccggcagaaagaagaatttctataaacaaagagtgccattgagccatgcgacgatctaggatgtgttcgcatggagtgagtgaaaaaccgcaggtagctgcacttactcaggacataaaccctccctggggaaaagcaacacatctgagcctccagcagcccctcctggcctcaggcagaagggaggcttcagccacagctgcctggactctgagtttaactcacggaggttggttgctccaggttccctagtagagtagagctaaaatccaagtccccagactgctgctcctattcccacatactcacttctccccaggaagacggatgtgttgcggtagcgtcaggcacacgtccctgtgtggccttgggcaagttacttaacttttttgaattaaatttctttatttctaataggagtgataacgcttgtggaaggtggttattggagtatatgggggggataatcattgaaaaatggcaaaaactgtgagaggccgcggtggggttatactgtaccggtataaggaagggaacggagagcttgagccggtaaaaacgctggaatgaactttaaaattaaatcgtggttcggcctagggggggggggaccaaaaaaaaggggaaggggacacttaggagataaaaggaaagaagtaaa

SEQ ID NO: 393466 - DNA, 512 bp, Homo sapiens
tgcataaatattagctagatgactaaataagtgaagatgaaaaggtaggactggttatattcagtttaagaacactgagtttctatgcctgtaatcacagctacttgggaggctgaggcacgagactcgcttgaactcaggaggcataggctgcagtgagccgagattgcacctgcactccagcctgggcgacagagcaagattccgtctcaaaaacaaaacaaaccagtaacttaatcttgaactaacacaagccaaggtattagtaattctcttctttttggtggcacttgactttcaaagctctcaaaacaaatcttcagctaacagcattttccctgtagcattatcaattggatgtctaataaaaaataactcatagcctccttttctatacccaattaatataaacagattacttaccaattacctaaatttctaaatgatatccagaacaatattttaaaattttacaaaagctcaggggtaaatgcagtgcttatgacattcat

SEQ ID NO: 393467 - DNA, 509 bp, Homo sapiens
gctcaacactaattagctctttctcaatcctactcacctattcagtatcctttaagaatttctcaagatatctgtcatttattatttttgaacattgcagtgacatttagggaattaaggaaggtaaataatatgttttgtttttgaaattgtctcctagaagttatttcaaacatactgacctggaaccaatatgttttctgttttttaattccttgtttaatattttttaatttaaggggtacaatatgatattttagtatatgtataccttgtgaaattattaaatcagacaaattaacatatccatcatgtcacatacttaccatttttttattcgatatgttcttaaagatcaaactgctcctgactttagcaaaaattttaacaaatttatatgtgtatgaaatatatgtatatatatttatataggtatatattatataactaccatatttgatacttaatatgtacacataaagaacaagattaaaattgcttcaaaaata

SEQ ID NO: 393468 - DNA, 363 bp, Homo sapiens
aaactttgtaaaatatttagatacagttcagctgataacatctctttttgtattcacattccatgtttcttattaatacaggcttttacttaaaagcaggttcatagtttcttgaaggtgaactgtagcttaattcaagattggactaagctcaaaggtattcactggtatgtgccaaatccacccactaaaagattattcggaggcatttttcacataaatatttttccgttaaccttttaaaaagttttatttagcccctgtgaaatatgctggcacttgtaggttcattagagatgaccaaagacaaatacttgtggaatgagatagcattcttattgacctctttaggatcttagttga

SEQ ID NO: 393469 - DNA, 312 bp, Homo sapiens
ggaggctatgaaggagactaattcctagtacaatacttagctcagagtcagggggaatgaagcaagtagaaagatatcacaatgaattctgtgttttcagtattgctaagaggattctgaacaatttgctaagaaaataaagtgatacctaaattagagcacatgtgtgtatgtgtgtagggagagccttcaaatcatggtttcttgaggaagcaaaagcttaggtgagacctgaaagatgaattagagggagtggtacagacagaaggcagaaaaggaaagaaaggcattcatgtagagagagctgaatct

SEQ ID NO: 393470 - DNA, 192 bp, Homo sapiens
ctaggctgagatcttttggtcccagtggacagcttaaactgcctagaaaagagtggcattctctcttaatctgtagtgaaagcaataatgactggcctttaaaccaccttattgtgcctgtgcttttctgctggaatctcttttactttgggtttcacattttacccccatcagtgactgagaccagaggaa

SEQ ID NO: 393471 - DNA, 139 bp, Homo sapiens
tcaccgcgcccagctggggagctttattattaaacataagcacaaggaaggctgtatgcagcttggtgaaggagaggtagacacacaaggagaggattttttttctttttgagacagtcttgctctgtcgcccaggctt

SEQ ID NO: 393472 - DNA, 395 bp, Homo sapiens
ccgatgcttctttcctgcaggttccgccgagcccgtcccttggcggtggtgtcactggatgctgggaagagatggtgggaagagcctccatccattggcgcgtcactaattagacaaggaggccttgggctcccttgagagagtcacggtttctcctccgttgacccgcccttcattgaactcctttacttggatattcagagcgctggacagagatcacttggcgctaacaccctcggaggtcctcacggcgctccgtcggaatgacacagttggattcccaagctgcgaagggtgagggagggactgcagcgcaggaactgaggaggagaggcccgcgcgcccactggagccgagcggtgaggaataaccggaccgacccccgacggtgcgtg

SEQ ID NO: 393473 - DNA, 364 bp, Homo sapiens
atctttcatttttctattctataagcaatcgctggatcagattcattatccagactgccattaaacaaacaattgttgaaacttattagatgccaagcattataccaagcagcagttgatgtacattaactctttttttaagaaaaatattttagaccatgcccggttaatgtttttattttctgtagagatgggtctcactgtgttgccaggctggcaaactgattctaagtgaaaattcttcaagggatattagtttattttttttaaagaacttcccttatgtgaagttgtgaggttaacattttctttttttctagaagcagaaccttttaaagcctttacaagattatattgcagattt

SEQ ID NO: 393474 - DNA, 542 bp, Homo sapiens
agaaaggaggatatccacaaggtgatcagaacaaaagtgtaaattcggtgaatttttcttctaactctcgattacaggtccaaattaaacacgcattgcatcacatgtattgacgcccattaaaattgaagaatacttttagggtaattttgtcacagttattttctcctggctttctccctgtaaagcatgctgtgtgattctttgcgtgttgctcaagctctggaacttggctgcagctaaccagagacaccccagacagtgccagaagtttgtggctgacaatcaccccttcccccatggtgccccctcagtatggcacactaatcctcaaaaccttgatgggaaatgacaaaatcgctatggtcctcaggcatgcaaagacactttcctcgtgggcaatgaggaaacagttaaccacgcttttccaccgagagtggtggttctgctcattcacaggagtgggcgtctgctctgcccgctaagcagagctgctgctttggagggtttgtagcgctaggaggctttgagggcttgagaaa

SEQ ID NO: 393475 - DNA, 167 bp, Homo sapiens
aagttcatttctgccaagtagagggctgggggtctgtgtccctattgcatcttcaccagggggcctagagaaccaatggggccacgtgggagaagggaagaagaaaaccgttcttaactcgttagataagagacagtgtattcctaatgtgatcaaagccgatgggg

SEQ ID NO: 393476 - DNA, 234 bp, Homo sapiens
cagaacttaaagtccgatgaggaaaacaggcattaaatagatgtcgctcatagatataaaatgacaataatgtggtaagtgcttggaaggaagcatgcaagagaaatgagagtgtccagtagggtggggaggccttgcttggtctgggtctctagctttcctgaagaagtggtgtgtgagctgagagctgcagagggagctaggattcacagagtgaagagcggggatgaaacg

SEQ ID NO: 393477 - DNA, 303 bp, Homo sapiens
tccaacgcccagcaaactacagccgtgaggtcactttcttagagcaagcaaattgttttctgtaaggaaactattttatataagcacgagagcattatctgaaaaaaggaaaatgattcttctctagtacacagctgaaaactccctactgaggcatgacgtcacactgaacccatttaagggaggtcacgctcctccttccccagcacaggcaatcctgtacccctgagagctgctgtcgcctcagctgcttaaaatgcggagaagctcaaaagttaagctgtgacctgttctagtatctca

SEQ ID NO: 393478 - DNA, 292 bp, Homo sapiens
tgaatcgaatacatcgtagaacacatgtgaacaagagaaaacattaacaggagattataactgaagccacaactgcagcctaaaacagacttggctaataacagacttagctcataacagactctcaataagtgaatgaatgaataaatgagaaaaaatgaacaaacaggttaatttgcatattggcatactttgcattagtaatttccaaatatttgcattcaaatatttttgattgatgaatggttgatacagatgaatttctgaggtgctggtctctttgttttttttt

SEQ ID NO: 393479 - DNA, 337 bp, Homo sapiens
ggcaggaggatcacttgaatccaggagtttgagaccagcctgggaaacgtaaggagacctcatgtctacaaataatttaaaaattatccaagtgtgggggtacacgcctgtggtcccagctactcaggaggctgaggaaggaggatcagctgagcctgggaggtcaaggctgcaatgagccatgatcgcgccactggacttcagcctggggacaaaacaagaccaggcctcaaaaggaaaagaaagtggttcatcatgtaaaaggggtcctcgataagattaacagctgattgggaggccagggtgggcagatcacaatgtcaggagctcgagaccg

SEQ ID NO: 393480 - DNA, 354 bp, Homo sapiens
ggcaacagtgaaaccccgtttctttttaaaaatatgaaataaaccgctagttaataaagaggaggagaagcttgcttctgctttcctatgaagaccagctacaccaggtacagcctgacttcagcagcgctaactgtagcagggaccttttaatgaatgctaggcactgtttgaaacaatacgtggtcactcatttcaccctgaggtgacacaggcgctaccactgcttaaacctgacaagaataaacagtcaccaaccgggccctgatgtctcccagtaaggacgaatacagagaagcctgattcacaccccagcaggatggctcacagcctgtgctcttcagcccttcgctg

SEQ ID NO: 393481 - DNA, 575 bp, Homo sapiens
ccgtggtcccagctacttgaaaggctgaggtgggaagatcacttgagcctgggaggtcaaggctgcaatgaaccatgatcgtgccactgcactcagcctgggtgacagagcaagaccctgtctcaaaaagaagttatctgagtacctcctgtgcaaaatgagaagttcacgaggtgcagtggtggaccagaaatgaaactggggaaaatggcttcacgtgggagagagaagtcttgaggagtgatcatatagagacagaatctgtgatcctaaggtctggaagacgacagtttagatgaagaggtccaaaataacaaggggcttttgaacaggtggtctgtccagtagtgggagaagctaccccatcagggggtcctcagctcctaggtcttgagctgccaccgattcacagaagcgaaggctgccttcagaaaacgggtctggacaaccaggaacagcagtttgccaatgcctgtggctagaggagagggccaacctggatcgttcaggtgcacttctcctctcccctcctcagcccacccacgtgtgttctcagttgtctgggtaagtcagca

SEQ ID NO: 393482 - DNA, 555 bp, Homo sapiens
aactattggcctcaaccacttctcccacctgaccctcccaagtgctgggattttgggtgtgagccactgaaccaggtgcacagatgaattttaatggtgccctggaaacccccagcctcaaaagtaaaaatcagaccagcttgtgtgacaaactgtcacagtgcccaggagtcaacacactggatattttaatggttggtttgcattctactaaatgcatatgatgctattccctaggaaaagtctctgggtgtcaggtgtcagcagcacatgaaagatcctaagctggattttttctcttcggtgacgtcaattttttgctcaggtctgagacagaattgtgtacttggtcccaaaatggggtttgtttggatgcatgctttaaaaaaatttttttcaacaaattgcaaaaatgcagaaagtcttatgcagaaatatgaattcccagttgctgttgaataaacaggagttcatcaatggtgctaaggaaatttgctatgctcttcgagctgaggaccatcgttgagctgaggaacatcgttgagctgaggacca

SEQ ID NO: 393483 - DNA, 398 bp, Homo sapiens
cgagtagctgggattataggcgcatgccaccacggccagctaatttttgtatttttagtagatatggggtttcactatgttgaccaagccagtcttgaactcctgacctcagatgatccgcctgcctcggcctcccaaagtgctaggattacaggcttgagccaccatgcctggcctaaagcctaagttctttctactaactctgggtaacccagcctcccgtttttcctcacttcaaaccagccttcacatctctgcctgagtcagctttcttaaacaaatatgatcacatcactcccttctaaaaaactttgtatgcctcttcaatgccttcagaattaactcctaagctcaataaacaagaccctcccagcctgaccccagccttccctgccagg

SEQ ID NO: 393484 - DNA, 256 bp, Homo sapiens
ttttagtagagacagggtttcaccatgttagccaggctggtctcaaactcctgacctcaggtgatccacccacctcggcctcccaaagtgctgggattataggtgcaagctatcatgcccggccagatatatggtcatctttttaaaaaaaatcaggattaagtgtcctcatataagccttaacatattatgtagtaactgattccctgaatgatcagttccaaagattttgctactgtgccccaggaagcaaaca

SEQ ID NO: 393485 - DNA, 508 bp, Homo sapiens
tataaaaaatattttcagttgtttgtttttaccatttttaatgtggctactagaaaactttaaatcacaaatgtgggtgacatttttggcttacattccccttctattgatagtgctacatacagtcagaaagctaaactgatacatcattatttatcagcagccatttttagaggataaagggaaactggaaatcattttagtctaattcctcatttaataccttaattaaaatctaattcccccaaaattagctttacctaggatgccattgacaattaatagaagaatcattttaatgaaactcaaagcaatctctttggtggaaaatatctgtcttctggttatttgtcacctctcaggctactgcatctgtattctgattatatatctgtaagactagaaggcaataaactatatttctcagattccattgccaaatgatttcttattatctaatatcaatgggaaggactttggggtgaagagagtttgaggaaaaggaaaa

SEQ ID NO: 393486 - DNA, 597 bp, Homo sapiens
caaatgacagaaaaaactgtcaggtcaaacagacaaccaataagcagaaataaagagaagctgaacaatacaataagcttgagctattaatttcagcatacagatcttcacactcaacatttacaaaagtaagagtattaaggccataaaaaacacaaattaaaaaataaaaatcaaatgaattaagcattcaatttaaaaaactggaaagaataacatagagcaatcctaaaaaagagataacagcagcagtaacaaaagacagtatggaaaaggaaaaccaaaagcaaaattaatattctaaaaacttaataagatcaagacaaccagcagaattaagatgcaaaatacagaatatgaaaaccagatttttaaaactattgtaaactatgtactaatcaattttaaacctaaatatgtacatgtttaaaatatgaaactccaaaactgatgagagaacttgaataaattagtatgtttaaaaaaaaaaaaattctccaaaactcccctggacctctacttccccaactccaaagtcccaaagtaaatttttagaagagttctaccctaagaactgctaattgctatcttatgcaa

SEQ ID NO: 393487 - DNA, 384 bp, Homo sapiens
gttccataacttgcccaagaggatccagcaaggatttgtacctatggtctcactctttacttggctctcctgcctcccagatttttttccccagggatgcttctgggatgacctttaagaggtagacaggaccagtccctgccatggagaacgtttaggcataaatggtgaggggggtcaggtggtaagaggctgaaggtgtgacagcctgaggtacacctgtgatgagacgtggccctacttctttcagtccctcccccagggcctggggtacagagagggacagcttggcatctgccagtggggagatggacactggttcagtcaactttcactctcaccagctttgggtcaggcactaagctgggtaccaggaatcctgag

SEQ ID NO: 393488 - DNA, 344 bp, Homo sapiens
tcctcccatgtcttttccacattaattactttgtttatctagttgtaatcaaggggcatatacattttggtgccaattcgcatcttgcatttttgcagtgaatttttgaacctgaatggaagaatttatgtccctccttgaggtattgcctaatactggtttggaactcgggccttctccactttgtgtaattcacacacttgcaaagccaactttttgtacttcttagtcattactgtcagcgttaagactgagatgagggcggagccctatgttggcccattagagaatatcttcagcttagctgttccctgagccagggatccttttaactctactatcct

SEQ ID NO: 393489 - DNA, 294 bp, Homo sapiens
ttgccctccaatggggaaaatgaataatatttaagaagcaccaagttgaaggcgagtagcagcttgttggtatagtgagtgtgatgggaaagacgttctctttttcattcaaaacacaatctaacaattccatttagggtcttatggttacttgtgcaggatctaagagtgtctgtgttttagcttgggtgttcagggcaaacctctgtaggagagaacatttgagcagacacttgaaggaaggaaggaagccacatgtgaacctagaggaagaatgtaggagcagagtaagca

SEQ ID NO: 393490 - DNA, 265 bp, Homo sapiens
ctatgcgacagagcagtgcatagggagaatggctctgcttgccaagaagggactggcagtttatttgggtttgaaatccagtctgaccttttgccctgtgtatttactctgctgtctttattgttattgttattttccctccctaaatgtctactgccagaggacatttgttcctatgattagtgggtagacataatcccctgttggataaatcaatcagcctctgcttccttggcgtggttccgacagaaatattctgcgtatg

SEQ ID NO: 393491 - DNA, 369 bp, Homo sapiens
tgagatggagtttcgctgtgttgcccaggctggagtgcactggtgtgatctccactcactgcatgctccgcctcccgggttcacgccattctcctgtctcagcctctcaagcagctgggaccacaggtgtccgccaccacgcctggctaattttttgtatttttagtggagacgggggtttcactgtgttagccaggatggtctcaatctcctgacctcgtgatccgcctgcctcggcctcaaagtgctgggattacaggcagtcatcatcttttatctcttaaatgttcaatacccgctgaaaaacagaattactttttgggaaaaaacatctagatacgtctagatatttatcatcaaagcatttcc

SEQ ID NO: 393492 - DNA, 3537 bp, Homo sapiens
ggctgaggcggtggaacgcgcaggctagtggctgtgtttcccgccggaggcttttgcgcagagccccgcgtccctggggggcggcggcggcggcggcagcgcaggcggcagaggcgcaggcggcggaggcggctggggggtccggaagtcaacaccatgtcaagtctgcacaagagccgaattgcagatttccaggatgtcctgaaggagccctcaattgcattggaaaagctgcgggaactcagctttagtggcatcccctgtgagggcggactgcggtgcctctgctggaagattctcttgaactaccttcccttggagagagcctcatggacctccatcctggccaagcagagggagctgtatgcccagttcctgagggaaatgatcatccagcctggcattgccaaggccaacatgggtgtgtccagggaggatgtgacttttgaggaccatccactcaaccccaaccctgacagccggtggaacacgtacttcaaggacaacgaggtgctgctgcagatcgacaaagatgtccggaggttgtgcccagacatttccttcttccagagggccactgactacccttgcctcctcatcctggacccccagaatgagtttgaaacccttcgtaagagagtggaacagacaacactgaaatctcagacggtggcccggaaccggagtggggtcacaaatcaagagcagaacatcaagcctcagttctttgccttccgctggctgacactgctgctgtcccaggagttcttgctgcctgacgtcatccgcatctgggactccctcttcgccgatgacaaccgctttgacttcctcctcctcgtctgctgcgccatgctcatgctgatccgggagcagttgctggaaggggacttcactgtgaatatgcggctgctgcaggactaccccatcacagatgtctgccagatcctgcagaaagccaaggagctccaagactcaaagtagcccggcggcaagaggcccacgttcgggagagaagcctcccgaccctgtgccctggctcccgggacacatagaaacctgtaggaacccagcctgaggggaagccacaggatcggcccgagacccaggccatgcccactggggacacactgtgccgtgctccttctgccgccacgcccagctccccacctgccctgcactctgccctctttgcccaggatactgaggagggctggagctcgggaagttgtccttcctgggccagggccgtttctggcactgggaggctggcaggggcccctccctgcctcggctctgccgccccagcctcagttcctgcttctggtcttctcctgggctccactcaggggaggtgcttggccaatgggccagaaaccgcttctgagcggggcacttcggctgctccacagggaaggcgacactgaaagctgagtcctgccgtctgtctcacccacagatgtctgtagtcggtcggtgtgaatgtgggcccaagtccccaggcatcttctccgtgtgtgtgtgtgtgtgtgtgtgtgtgtgtgtgtgtgtgtgtgtgtgtgtgtgttagggagtgagggtctctcaggcctccaggtctcccagcccctccttctctgtctctacctctctgcctgtctccttccacctccttcccagagtgggactgtgtcttgcttcatgattcctctctccattactctccctgcccttctctgttggggtgccttatcctgagccacctcctctccccgcttgcctctgctcccctgaacctgggagacagatgaggagactggctcagcaaggcccctggaggtcaagcttggcctttgcctcctgttcccatcccccagccctggctcctaggtcctcccaactgggagggagtcctccgtgcctcacttagagggttctgaacccgttccctacacagaaatcttggaaaccaaatgctgctgagtaaggatgaagctttgagcctcctgcccctgctttctgcccagggagggagaaggaagagggggagctggtttttctggaggttcccccagaggccctcctgtccgaaaagaaaaggaccttgattctgagcccagggtcggaacccattgcttcagaagagttgtcattccctcggcttccaggtcccaacccagggttgggttgagtgagtcccacaaagggcaagtggggcccgaggaagcctctctggggccaggggtagctgagcttaaaggccctgggtcctgccagttccaggagggccatgtctgtgcctctgtgtacccctccacccgctgcgggctgagggaggtgcagggccttctctgacccctgcctgagctgttcccagggctggagcaggtgtaccctgagcaggggcagctggccactcccagttctcaccaagtcacctccctccttgtacaaggtttgcgtccggaagccgggtgccatagtgaggaccctcgtcctccagactggctggcaggagtcaggccccagcagccctcctgcccccaaagctttccgagtctggtgggcaggacttctcgctgcccttccaagcccggctttgggccagaaaaggcttccccaggtggctcttctaccaggcttttcctttgatgccgcctggatttccgcacctgcctgtctcctctcccagagcacagtatttgggagactttgactatttattcagactcctggctatgtattgcacattggcaagtgctctggggatgaggcatgggtataggaagggagaaaggagttggagacaagatcctcttcattttccaagatcaaagtcagcctcttctccccatgcttctaggaactgcctggttttcaagcaggtcctggctgagcgggctctgagttctgtactggaattgagtgtaaagatgggaagagaactgggctgactccaggacctccaggatgaggcagaggcatgatgcttcctgctcacctgggccaccctctctccaggacttgtcagctggtggttcagccccttctccaaccccttcataagcttgggccactgcctgggacccagcagacactgcccaggactctttagtgcactcactcttgtctgccccctaccttccctcctggaaccacactacttgaatcaccattactttgcctcgctggcagagttgggtcaagtgccctctccttgaccttgagatgaaggtcaagagcacagggaccaggccttggttaggctgagctcccagcaggacaccgcctgcagaaaggacctgccctgataatgtcccttccccagattctcaagcagatgcccaagggaggtccccacagagccagagtgcctgaggcttcctgcttgagaacctgccccctggatcttggacacttacagattgagctgtatgaattcagcgggtctcactccagagggtcagaacgtttgctttagttttttcatctgttttgttccttgagtcagtgctgttgatgacgagttgtcttgaataaatcatgtgttctttgcaa

SEQ ID NO: 393493 - DNA, 3833 bp, Homo sapiens
agttactggctatgtcgaccacgcgccccgcgtccctggggggcggcggcggcggcggcagcgcaggcggcagaggcgcaggcggcggaggcggctggggggtccggaagtcaacaccatgtcaagtctgcacaagagccgaattgcagatttccaggatgtcctgaaggagccctcaattgcattggaaaagctgcgggaactcagctttagtgattctcttgaactaccttcccttggagagagcctcatggacctccatcctggccaagcagagggagctgtatgcccagttcctgagggaaatgatcatccagcctggcattgccaaggccaacatgggtgtgtccagggaggatgtgacttttgaggaccatccactcaaccccaaccctgacagccggtggaacacgtacttcaaggacaacgaggtgctgctgcagatcgacaaagatgtccggaggttgtgcccagacatttccttcttccagagggccactgactacccttgcctcctcatcctggacccccagaatgagtttgaaacccttcgtaagagagtggaacagacaacactgaaatctcagacggtggcccggaaccggagtggggtcacaaatatgagctccccacacaagaactctgtgccatcatccctaaatgagtatgaggtgctgcccaatggctgtgaggcccactgggaggtggtggagcggatcctgttcatctacgccaagctcaaccctggcatcgcttatgtgcaaggcatgaatgaaatcgtggggcccctctactacacctttgccaccgaccccaatagtgagtggaaagagcacgccgaggcagacacctttttctgcttcaccaacctcatggccgagatccgggacaactttatcaagagcctggatgactcgcagtgtggcatcacctacaagatggagaaggtttactccaccttgaaagataaggatgtggagctctacctgaaactgcaagagcagaacatcaagcctcagttctttgccttccgctggctgacactgctgctgtcccaggagttcttgctgcctgacgtcatccgcatctgggactccctcttcgccgatgacaaccgctttgacttcctcctcctcgtctgctgcgccatgctcatgctgatccgggagcagttgctggaaggggacttcactgtgaatatgcggctgctgcaggactaccccatcacagatgtctgccagatcctgcagaaagccaaggagctccaagactcaaagtagcccggcggcaagaggcccacgttcgggagagaagcctcccgaccctgtgccctggctcccgggacacatagaaacctgtaggaacccagcctgaggggaagccacaggatcggcccgagacccaggccatgcccactggggacacactgtgccgtgctccttctgccgccacgcccagctccccacctgccctgcactctgccctctttgcccaggatactgaggagggctggagctcgggaagttgtccttcctgggccagggccgtttctggcactgggaggctggcaggggcccctccctgcctcggctctgccgccccagcctcagttcctgcttctggtcttctcctgggctccactcaggggaggtgcttggccaatgggccagaaaccgcttctgagcggggcacttcggctgctccacagggaaggcgacactgaaagctgagtcctgccgtctgtctcacccacagatgtctgtagtcggtcggtgtgaatgtgggcccaagtccccaggcatcttctccgtgtgtgtgtgtgtgtgtgtgtgtgtgtgtgtgtgtgtgtgtgtgtgtgtgtgttagggagtgagggtctctcaggcctccaggtctcccagcccctccttctctgtctctacctctctgcctgtctccttccacctccttcccagagtgggactgtgtcttgcttcatgattcctctctccattactctccctgcccttctctgttggggtgccttatcctgagccacctcctctccccgcttgcctctgctcccctgaacctgggagacagatgaggagactggctcagcaaggcccctggaggtcaagcttggcctttgcctcctgttcccatcccccagccctggctcctaggtcctcccaactgggagggagtcctccgtgcctcacttagagggttctgaacccgttccctacacagaaatcttggaaaccaaatgctgctgagtaaggatgaagctttgagcctcctgcccctgctttctgcccagggagggagaaggaagagggggagctggtttttctggaggttcccccagaggccctcctgtccgaaaagaaaaggaccttgattctgagcccagggtcggaacccattgcttcagaagagttgtcattccctcggcttccaggtcccaacccagggttgggttgagtgagtcccacaaagggcaagtggggcccgaggaagcctctctggggccaggggtagctgagcttaaaggccctgggtcctgccagttccaggagggccatgtctgtgcctctgtgtacccctccacccgctgcgggctgagggaggtgcagggccttctctgacccctgcctgagctgttcccagggctggagcaggtgtaccctgagcaggggcagctggccactcccagttctcaccaagtcacctccctccttgtacaaggtttgcgtccggaagccgggtgccatagtgaggaccctcgtcctccagactggctggcaggagtcaggccccagcagccctcctgcccccaaagctttccgagtctggtgggcaggacttctcgctgcccttccaagcccggctttgggccagaaaaggcttccccaggtggctcttctaccaggcttttcctttgatgccgcctggatttccgcacctgcctgtctcctctcccagagcacagtatttgggagactttgactatttattcagactcctggctatgtattgcacattggcaagtgctctggggatgaggcatgggtataggaagggagaaaggagttggagacaagatcctcttcattttccaagatcaaagtcagcctcttctccccatgcttctaggaactgcctggttttcaagcaggtcctggctgagcgggctctgagttctgtactggaattgagtgtaaagatgggaagagaactgggctgactccaggacctccaggatgaggcagaggcatgatgcttcctgctcacctgggccaccctctctccaggacttgtcagctggtggttcagccccttctccaaccccttcataagcttgggccactgcctgggacccagcagacactgcccaggactctttagtgcactcactcttgtctgccccctaccttccctcctggaaccacactacttgaatcaccattactttgcctcgctggcagagttgggtcaagtgccctctccttgaccttgagatgaaggtcaagagcacagggaccaggccttggttaggctgagctcccagcaggacaccgcctgcagaaaggacctgccctgataatgtcccttccccagattctcaagcagatgcccaagggaggtccccacagagccagagtgcctgaggcttcctgcttgagaacctgccccctggatcttggacacttacagattgagctgtatgaattcagcgggtctcactccagagggtcagaacgtttgctttagttttttcatctgttttgttccttgagtcagtgctgttgatgacgagttgtcttgaataaatcatgtgttctttgcaa

SEQ ID NO: 393494 - DNA, 3569 bp, Homo sapiens
ggctgaggcggtggaacgcgcaggctagtggctgtgtttcccgccggaggcttttgcgcagagccccgcgtccctggggggcggcggcggcggcggcagcgcaggcggcagaggcgcaggcggcggaggcggctggggggtccggaagtcaacaccatgtcaagtctgcacaagagccgaattgcagatttccaggatgtcctgaaggagccctcaattgcattggaaaagctgcgggaactcagctttagtggcatcccctgtgagggcggactgcggtgcctctgctggaagattctcttgaactaccttcccttggagagagcctcatggacctccatcctggccaagcagagggagctgtatgcccagttcctgagggaaatgatcatccagcctggcattgccaaggccaacatgggtgtgtccagggaggatgtgacttttgaggaccatccactcaaccccaaccctgacagccggtggaacacgtacttcaaggacaacgaggtgctgctgcagatcgacaaagatgtccggaggttgtgcccagacatttccttcttccagagggccactgactacccttgcctcctcatcctggacccccagaatgagtttgaaacccttcgtaagagagtggaacagacaacactgaaatctcagacggtggcccggaaccggagtggggtcacaaatatgagctccccacacaagaactctgtgccatcatccctaaatgagtatgaggtgctgcccaatggctgtgaggcccactgggaggtggtggagcggatcctgttcatctacgccaagctcaaccctggcatcgcttatgtgcaaggcatgaatgaaatcgtggggcccctctactacacctttgccaccgaccccaatagtgagtggaaagagcacgccgaggcagacacctttttctgcttcaccaacctcatggccgagatccgggacaactttatcaagagcctggatgactcgcagtgtggcatcacctacaagatggagaaggtttactccaccttgaaagataaggatgtggagctctacctgaaactgcaagagcagaacatcaagcctcagttctttgccttccgctggctgacactgctgctgtcccaggagttcttgctgcctgacgtcatccgcatctgggactccctcttcgccgatgacaaccgctttgacttcctcctcctcgtctgctgcgccatgctcatgctgatccgggagcagttgctggaaggggacttcactgtgaatatgcggctgctgcaggactaccccatcacagatgtctgccagatcctgcagaaagccaaggagctccaagactcaaagtagcccggcggcaagaggcccacgttcgggagagaagcctcccgaccctgtgccctggctcccgggacacatagaaacctgtaggaacccagcctgaggggaagccacaggatcggcccgagacccaggccatgcccactggggacacactgtgccgtgctccttctgccgccacgcccagctccccacctgccctgcactctgccctctttgcccaggatactgaggagggctggagctcgggaagttgtccttcctgggccagggccgtttctggcactgggaggctggcaggggcccctccctgcctcggctctgccgccccagcctcagttcctgcttctggtcttctcctgggctccactcaggggaggtgcttggccaatgggccagaaaccgcttctgagcggggcacttcggctgctccacagggaaggcgacactgaaagctgagtcctgccgtctgtctcacccacagatgtctgtagtcggtcggtgtgaatgtgggcccaagtccccaggcatcttctccgtgtgtgtgtgtgtgtgtgtgtgtgtgtgtgtgtgtgtgtgtgtgtgtgtgtgttagggagtgagggtctctcaggcctccaggtctcccagcccctccttctctgtctctacctctctgcctgtctccttccacctccttcccagagtgggactgtgtcttgcttcatgattcctctctccattactctccctgcccttctctgttggggtgccttatcctgagccacctcctctccccgcttgcctctgctcccctgaacctgggagacagatgaggagactggctcagcaaggcccctggaggtcaagcttggcctttgcctcctgttcccatcccccagccctggctcctaggtcctcccaactgggagggagtcctccgtgcctcacttagagggttctgaacccgttccctacacagaaatcttggaaaccaaatgctgctgagtaaggatgaagctttgagccttctctgacccctgcctgagctgttcccagggctggagcaggtgtaccctgagcaggggcagctggccactcccagttctcaccaagtcacctccctccttgtacaaggtttgcgtccggaagccgggtgccatagtgaggaccctcgtcctccagactggctggcaggagtcaggccccagcagccctcctgcccccaaagctttccgagtctggtgggcaggacttctcgctgcccttccaagcccggctttgggccagaaaaggcttccccaggtggctcttctaccaggcttttcctttgatgccgcctggatttccgcacctgcctgtctcctctcccagagcacagtatttgggagactttgactatttattcagactcctggctatgtattgcacattggcaagtgctctggggatgaggcatgggtataggaagggagaaaggagttggagacaagatcctcttcattttccaagatcaaagtcagcctcttctccccatgcttctaggaactgcctggttttcaagcaggtcctggctgagcgggctctgagttctgtactggaattgagtgtaaagatgggaagagaactgggctgactccaggacctccaggatgaggcagaggcatgatgcttcctgctcacctgggccaccctctctccaggacttgtcagctggtggttcagccccttctccaaccccttcataagcttgggccactgcctgggacccagcagacactgcccaggactctttagtgcactcactcttgtctgccccctaccttccctcctggaaccacactacttgaatcaccattactttgcctcgctggcagagttgggtcaagtgccctctccttgaccttgagatgaaggtcaagagcacagggaccaggccttggttaggctgagctcccagcaggacaccgcctgcagaaaggacctgccctgataatgtcccttccccagattctcaagcagatgcccaagggaggtccccacagagccagagtgcctgaggcttcctgcttgagaacctgccccctggatcttggacacttacagattgagctgtatgaattcagcgggtctcactccagagggtcagaacgtttgctttagttttttcatctgttttgttccttgagtcagtgctgttgatgacgagttgtcttgaataaatcatgtgttctttgcaa

SEQ ID NO: 393495 - DNA, 1646 bp, Homo sapiens
agtacgagatccgtgttgatgcgtgcacgaccgttccctacacagaaatcttggaaaccaaatgctgctgagtaaggatgaagctttgagcctcctgcccctgctttctgcccagggagggagaaggaagagggggagctggtttttctggaggttcccccagaggccctcctgtccgaaaagaaaaggaccttgattctgagcccagggtcggaacccattgcttcagaagagttgtcattccctcggcttccaggtcccaacccagggttgggttgagtgagtcccacaaagggcaagtggggcccgaggaagcctctctggggccaggggtagctgagcttaaaggccctgggtcctgccagttccaggagggccatgtctgtgcctctgtgtacccctccacccgctgcgggctgagggaggtgcagggccttctctgacccctgcctgagctgttcccagggctggagcaggtgtaccctgagcaggggcagctggccactcccagttctcaccaagtcacctccctccttgtacaaggtttgcgtccggaagccgggtgccatagtgaggaccctcgtcctccagactggctggcaggagtcaggccccagcagccctcctgcccccaaagctttccgagtctggtgggcaggacttctcgctgcccttccaagcccggctttgggccagaaaaggcttccccaggtggctcttctaccaggcttttcctttgatgccgcctggatttccgcacctgcctgtctcctctcccagagcacagtatttgggagactttgactatttattcagactcctggctatgtattgcacattggcaagtgctctggggatgaggcatgggtataggaagggagaaaggagttggagacaagatcctcttcattttccaagatcaaagtcagcctcttctccccatgcttctaggaactgcctggttttcaagcaggtcctggctgagcgggctctgagttctgtactggaattgagtgtaaagatgggaagagaactgggctgactccaggacctccaggatgaggcagaggcatgatgcttcctgctcacctgggccaccctctctccaggacttgtcagctggtggttcagccccttctccaaccccttcataagcttgggccactgcctgggacccagcagacactgcccaggactctttagtgcactcactcttgtctgccccctaccttccctcctggaaccacactacttgaatcaccattactttgcctcgctggcagagttgggtcaagtgccctctccttgaccttgagatgaaggtcaagagcacagggaccaggccttggttaggctgagctcccagcaggacaccgcctgcagaaaggacctgccctgataatgtcccttccccagattctcaagcagatgcccaagggaggtccccacagagccagagtgcctgaggcttcctgcttgagaacctgccccctggatcttggacacttacagattgagctgtatgaattcagcgggtctcactccagagggtcagaacgtttgctttagttttttcatctgttttgttccttgagtcagtgctgttgatgacgagttgtcttgaataaatcatgtgttctttgcaa

SEQ ID NO: 393496 - DNA, 4164 bp, Homo sapiens
ggctgaggcggtggaacgcgcaggctagtggctgtgtttcccgccggaggcttttgcgcagagccccgcgtccctggggggcggcggcggcggcggcagcgcaggcggcagaggcgcaggcggcggaggcggctggggggtccggaagtcaacaccatgtcaagtctgcacaagagccgaattgcagatttccaggatgtcctgaaggagccctcaattgcattggaaaagctgcgggaactcagctttagtggcatcccctgtgagggcggactgcggtgcctctgctggaagattctcttgaactaccttcccttggagagagcctcatggacctccatcctggccaagcagagggagctgtatgcccagttcctgagggaaatgatcatccagcctggcattgccaaggccaacatgggtgtgtccagggaggatgtgacttttgaggaccatccactcaaccccaaccctgacagccggtggaacacgtacttcaaggacaacgaggtgctgctgcagatcgacaaagatgtccggaggttgtgcccagacatttccttcttccagagggccactgactacccttgcctcctcatcctggacccccagaatgagtttgaaacccttcgtaagagagtggaacagacaacactgaaatctcagacggtggcccggaaccggagtggggtcacaaatatgagctccccacacaagaactctgtgccatcatccctaaatgagtatgaggtgctgcccaatggctgtgaggcccactgggaggtggtggagcggatcctgttcatctacgccaagctcaaccctggcatcgcttatgtgcaaggcatgaatgaaatcgtggggcccctctactacacctttgccaccgaccccaatagtgagtggaaagagcacgccgaggcagacacctttttctgcttcaccaacctcatggccgagatccgggacaactttatcaagagcctggatgactcgcagtgtggcatcacctacaagatggagaaggtttactccaccttgaaagataaggatgtggagctctacctgaaactgcaagagcagaacatcaagcctcagttctttgccttccgctggctgacactgctgctgtcccaggagttcttgctgcctgacgtcatccgcatctgggactccctcttcgccgatgacaaccgctttgacttcctcctcctcgtctgctgcgccatgctcatgctgatccgggagcagttgctggaaggggacttcactgtgaatatgcggctgctgcaggactaccccatcacagatgtctgccagatcctgcagaaagccaaggagctccaagactcaaagtagcccggcggcaagaggcccacgttcgggagagaagcctcccgaccctgtgccctggctcccgggacacatagaaacctgtaggaacccagcctgaggggaagccacaggatcggcccgagacccaggccatgcccactggggacacactgtgccgtgctccttctgccgccacgcccagctccccacctgccctgcactctgccctctttgcccaggatactgaggagggctggagctcgggaagttgtccttcctgggccagggccgtttctggcactgggaggctggcaggggcccctccctgcctcggctctgccgccccagcctcagttcctgcttctggtcttctcctgggctccactcaggggaggtgcttggccaatgggccagaaaccgcttctgagcggggcacttcggctgctccacagggaaggcgacactgaaagctgagtcctgccgtctgtctcacccacagatgtctgtagtcggtcggtgtgaatgtgggcccaagtccccaggcatcttctccgtgtgtgtgtgtgtgtgtgtgtgtgtgtgtgtgtgtgtgtgtgtgtgtgtgtgttagggagtgagggtctctcaggcctccaggtctcccagcccctccttctctgtctctacctctctgcctgtctccttccacctccttcccagagtgggactgtgtcttgcttcatgattcctctctccattactctccctgcccttctctgttggggtgccttatcctgagccacctcctctccccgcttgcctctgctcccctgaacctgggagacagatgaggagactggctcagcaaggcccctggaggtcaagcttggcctttgcctcctgttcccatcccccagccctggctcctaggtcctcccaactgggagggagtcctccgtgcctcacttagagggttctgaacccgttccctacacagaaatcttggaaaccaaatgctgctgagtaaggatgaagctttgagcctcctgcccctgctttctgcccagggagggagaaggaagagggggagctggtttttctggaggttcccccagaggccctcctgtccgaaaagaaaaggaccttgattctgagcccagggtcggaacccattgcttcagaagagttgtcattccctcggcttccaggtcccaacccagggttgggttgagtgagtcccacaaagggcaagtggggcccgaggaagcctctctggggccaggggtagctgagcttaaaggccctgggtcctgccagttccaggagggccatgtctgtgcctctgtgtacccctccacccgctgcgggctgagggaggtgcagggccttctctgacccctgcctgagctgttcccagggctggagcaggtgtaccctgagcaggggcagctggccactcccagttctcaccaagtcacctccctccttgtacaaggtttgcgtccggaagccgggtgccatagtgaggaccctcgtcctccagactggctggcaggagtcaggccccagcagccctcctgcccccaaagctttccgagtctggtgggcaggacttctcgctgcccttccaagcccggctttgggccagaaaaggcttccccaggtggctcttctaccaggcttttcctttgatgccgcctggatttccgcacctgcctgtctcctctcccagagcacagtatttgggagactttgactatttattcagactcctggctatgtattgcacattggcaagtgctctggggatgaggcatgggtataggaagggagaaaggagttggagacaagatcctcttcattttccaagatcaaagtcagcctcttctccccatgcttctaggaactgcctggttttcaagcaggtcctggctgagcgggctctgagttctgtactggaattgagtgtaaagatgggaagagaactgggctgactccaggacctccaggatgaggcagaggcatgatgcttcctgctcacctgggccaccctctctccaggacttgtcagctggtggttcagccccttctccaaccccttcataagcttgggccactgcctgggacccagcagacactgcccaggactctttagtgcactcactcttgtctgccccctaccttccctcctggaaccacactacttgaatcaccattactttgcctcgctggcagagttgggtcaagtgccctctccttgaccttgagatgaaggtcaagagcacagggaccaggccttggttaggctgagctcccagcaggacaccgcctgcagaaaggacctgccctgataatgtcccttccccagattctcaagcagatgcccaagggaggtccccacagagccagagtgcctgaggcttcctgcttgagaacctgccccctggatcttggacacttacagattgagctgtatgaattcagcgggtctcactccagagggtcagaacgtttgctttagttttttcatctgttttgttccttgagtcagtgctgttgatgacgagttgtcttgaataaatcatgtgttctttgcaaaaaaaaaaaaaaaaaaaaataaaaaaacacaaaaaaaacaacagaaacaaaacaacaaaagatccacacgaacagaaaagccaaaaagggggggcgcgagcccacaaaagatacccccggggggggcccccaaagtcaccacgccacccatgttggtcggacaaaagaggggcccacaatgggagcacgctctaaaacagcagcgcgcgagccggcagcagataacaccaacgcgggcagcgcacagaggtg

SEQ ID NO: 393497 - DNA, 210 bp, Homo sapiens
ggtgggcctggagtgcgccacttctgcccccatcctgctctctcccagagcacgccgaggcagacacctttttctgcttcaccaacctcatggccgagatccgggacaactttatcaagagcctggatgactcgcagtgtggcatcacctacaagatggagaaggtttactccaccttgaaagataaggatgtggagctctacctgaaac

SEQ ID NO: 393498 - DNA, 3912 bp, Homo sapiens
ggctgaggcggtggaacgcgcaggctagtggctgtgtttcccgccggaggcttttgcgcagagccccgcgtccctggggggcggcggcggcggcggcagcgcaggcggcagaggcgcaggcggcggaggcggctggggggtccggaagtcaacaccatgtcaagtctgcacaagagccgaattgcagatttccaggatgtcctgaaggagccctcaattgcattggaaaagctgcgggaactcagctttagtggcatcccctgtgagggcggactgcggtgcctctgctggaagattctcttgaactaccttcccttggagagagcctcatggacctccatcctggccaagcagagggagctgtatgcccagttcctgagggaaatgatcatccagcctggcattgccaaggccaacatgggtgtgtccagggaggatgtgacttttgaggaccatccactcaaccccaaccctgacagccggtggaacacgtacttcaaggacaacgaggtgctgctgcagatcgacaaagatgtccggaggttgtgcccagacatttccttcttccagagggccactgactacccttgcctcctcatcctggacccccagaatgagtttgaaacccttcgtaagagagtggaacagacaacactgaaatctcagacggtggcccggaaccggagtggggtcacaaatatgagctccccacacaagaactctgtgccatcatccctaaatgagtatgaggtgctgcccaatggctgtgaggcccactgggaggtggtggagcggatcctgttcatctacgccaagctcaaccctggcatcgcttatgtgcaaggcatgaatgaaatcgtggggcccctctactacacctttgccaccgaccccaatagtgagtggaaagagcacgccgaggcagacacctttttctgcttcaccaacctcatggccgagatccgggacaactttatcaagagcctggatgactcgcagtgtggcatcacctacaagatggagaaggtttactccaccttgaaagataaggatgtggagctctacctgaaactgcaagagcagaacatcaagcctcagttctttgccttccgctggctgacactgctgctgtcccaggagttcttgctgcctgacgtcatccgcatctgggactccctcttcgccgatgacaaccgctttgacttcctcctcctcgtctgctgcgccatgctcatgctgatccgggagcagttgctggaaggggacttcactgtgaatatgcggctgctgcaggactaccccatcacagatgtctgccagatcctgcagaaagccaaggagctccaagactcaaagtagcccggcggcaagaggcccacgttcgggagagaagcctcccgaccctgtgccctggctcccgggacacatagaaacctgtaggaacccagcctgaggggaagccacaggatcggcccgagacccaggccatgcccactggggacacactgtgccgtgctccttctgccgccacgcccagctccccacctgccctgcactctgccctctttgcccaggatactgaggagggctggagctcgggaagttgtccttcctgggccagggccgtttctggcactgggaggctggcaggggcccctccctgcctcggctctgccgccccagcctcagttcctgcttctggtcttctcctgggctccactcaggggaggtgcttggccaatgggccagaaaccgcttctgagcggggcacttcggctgctccacagggaaggcgacactgaaagctgagtcctgccgtctgtctcacccacagatgtctgtagtcggtcggtgtgaatgtgggcccaagtccccaggcatcttctccgtgtgtgtgtgtgtgtgtgtgtgtgtgtgtgtgtgtgtgtgtgtgtgtgtgtgttagggagtgagggtctctcaggcctccaggtctcccagcccctccttctctgtctctacctctctgcctgtctccttccacctccttcccagagtgggactgtgtcttgcttcatgattcctctctccattactctccctgcccttctctgttggggtgccttatcctgagccacctcctctccccgcttgcctctgctcccctgaacctgggagacagatgaggagactggctcagcaaggcccctggaggtcaagcttggcctttgcctcctgttcccatcccccagccctggctcctaggtcctcccaactgggagggagtcctccgtgcctcacttagagggttctgaacccgttccctacacagaaatcttggaaaccaaatgctgctgagtaaggatgaagctttgagcctcctgcccctgctttctgcccagggagggagaaggaagagggggagctggtttttctggaggttcccccagaggccctcctgtccgaaaagaaaaggaccttgattctgagcccagggtcggaacccattgcttcagaagagttgtcattccctcggcttccaggtcccaacccagggttgggttgagtgagtcccacaaagggcaagtggggcccgaggaagcctctctggggccaggggtagctgagcttaaaggccctgggtcctgccagttccaggagggccatgtctgtgcctctgtgtacccctccacccgctgcgggctgagggaggtgcagggccttctctgacccctgcctgagctgttcccagggctggagcaggtgtaccctgagcaggggcagctggccactcccagttctcaccaagtcacctccctccttgtacaaggtttgcgtccggaagccgggtgccatagtgaggaccctcgtcctccagactggctggcaggagtcaggccccagcagccctcctgcccccaaagctttccgagtctggtgggcaggacttctcgctgcccttccaagcccggctttgggccagaaaaggcttccccaggtggctcttctaccaggcttttcctttgatgccgcctggatttccgcacctgcctgtctcctctcccagagcacagtatttgggagactttgactatttattcagactcctggctatgtattgcacattggcaagtgctctggggatgaggcatgggtataggaagggagaaaggagttggagacaagatcctcttcattttccaagatcaaagtcagcctcttctccccatgcttctaggaactgcctggttttcaagcaggtcctggctgagcgggctctgagttctgtactggaattgagtgtaaagatgggaagagaactgggctgactccaggacctccaggatgaggcagaggcatgatgcttcctgctcacctgggccaccctctctccaggacttgtcagctggtggttcagccccttctccaaccccttcataagcttgggccactgcctgggacccagcagacactgcccaggactctttagtgcactcactcttgtctgccccctaccttccctcctggaaccacactacttgaatcaccattactttgcctcgctggcagagttgggtcaagtgccctctccttgaccttgagatgaaggtcaagagcacagggaccaggccttggttaggctgagctcccagcaggacaccgcctgcagaaaggacctgccctgataatgtcccttccccagattctcaagcagatgcccaagggaggtccccacagagccagagtgcctgaggcttcctgcttgagaacctgccccctggatcttggacacttacagattgagctgtatgaattcagcgggtctcactccagagggtcagaacgtttgctttagttttttcatctgttttgttccttgagtcagtgctgttgatgacgagttgtcttgaataaatcatgtgttctttgcaa

SEQ ID NO: 393499 - DNA, 3655 bp, Homo sapiens
agcggaatataaaattagccgggcgtggtggtgggcgcctgtggtcccagctacttgggagaatgaggcaggagaatggcgtggacccgggagttggagcttgcagtgagcagagatcgctccactgcacttcagcctgggcgacagtgcaagactccatctcaaaaacaaaaacaaaaacaaaaaacaatgcttatggggagtcttggggtctcctggcagatgggatggcgaaaacttccaccttgagtaacaagattatttcctgttccctcttgacaggaggttgtgcccagacatttccttcttccagagggccactgactacccttgcctcctcatcctggacccccagaatgagtttgaaacccttcgtaagagagtggaacagacaacactgaaatctcagacggtggcccggaaccggagtggggtcacaaatatgagctccccacacaagaactctgtgccatcatccctaaatgagtatgaggtgctgcccaatggctgtgaggcccactgggaggtggtggagcggatcctgttcatctacgccaagctcaaccctggcatcgcttatgtgcaaggcatgaatgaaatcgtggggcccctctactacacctttgccaccgaccccaatagtgagtggaaagagcacgccgaggcagacacctttttctgcttcaccaacctcatggccgagatccgggacaactttatcaagagcctggatgactcgcagtgtggcatcacctacaagatggagaaggtttactccaccttgaaagataaggatgtggagctctacctgaaactgcaagagcagaacatcaagcctcagttctttgccttccgctggctgacactgctgctgtcccaggagttcttgctgcctgacgtcatccgcatctgggactccctcttcgccgatgacaaccgctttgacttcctcctcctcgtctgctgcgccatgctcatgctgatccgggagcagttgctggaaggggacttcactgtgaatatgcggctgctgcaggactaccccatcacagatgtctgccagatcctgcagaaagccaaggagctccaagactcaaagtagcccggcggcaagaggcccacgttcgggagagaagcctcccgaccctgtgccctggctcccgggacacatagaaacctgtaggaacccagcctgaggggaagccacaggatcggcccgagacccaggccatgcccactggggacacactgtgccgtgctccttctgccgccacgcccagctccccacctgccctgcactctgccctctttgcccaggatactgaggagggctggagctcgggaagttgtccttcctgggccagggccgtttctggcactgggaggctggcaggggcccctccctgcctcggctctgccgccccagcctcagttcctgcttctggtcttctcctgggctccactcaggggaggtgcttggccaatgggccagaaaccgcttctgagcggggcacttcggctgctccacagggaaggcgacactgaaagctgagtcctgccgtctgtctcacccacagatgtctgtagtcggtcggtgtgaatgtgggcccaagtccccaggcatcttctccgtgtgtgtgtgtgtgtgtgtgtgtgtgtgtgtgtgtgtgtgtgtgtgtgtgtgttagggagtgagggtctctcaggcctccaggtctcccagcccctccttctctgtctctacctctctgcctgtctccttccacctccttcccagagtgggactgtgtcttgcttcatgattcctctctccattactctccctgcccttctctgttggggtgccttatcctgagccacctcctctccccgcttgcctctgctcccctgaacctgggagacagatgaggagactggctcagcaaggcccctggaggtcaagcttggcctttgcctcctgttcccatcccccagccctggctcctaggtcctcccaactgggagggagtcctccgtgcctcacttagagggttctgaacccgttccctacacagaaatcttggaaaccaaatgctgctgagtaaggatgaagctttgagcctcctgcccctgctttctgcccagggagggagaaggaagagggggagctggtttttctggaggttcccccagaggccctcctgtccgaaaagaaaaggaccttgattctgagcccagggtcggaacccattgcttcagaagagttgtcattccctcggcttccaggtcccaacccagggttgggttgagtgagtcccacaaagggcaagtggggcccgaggaagcctctctggggccaggggtagctgagcttaaaggccctgggtcctgccagttccaggagggccatgtctgtgcctctgtgtacccctccacccgctgcgggctgagggaggtgcagggccttctctgacccctgcctgagctgttcccagggctggagcaggtgtaccctgagcaggggcagctggccactcccagttctcaccaagtcacctccctccttgtacaaggtttgcgtccggaagccgggtgccatagtgaggaccctcgtcctccagactggctggcaggagtcaggccccagcagccctcctgcccccaaagctttccgagtctggtgggcaggacttctcgctgcccttccaagcccggctttgggccagaaaaggcttccccaggtggctcttctaccaggcttttcctttgatgccgcctggatttccgcacctgcctgtctcctctcccagagcacagtatttgggagactttgactatttattcagactcctggctatgtattgcacattggcaagtgctctggggatgaggcatgggtataggaagggagaaaggagttggagacaagatcctcttcattttccaagatcaaagtcagcctcttctccccatgcttctaggaactgcctggttttcaagcaggtcctggctgagcgggctctgagttctgtactggaattgagtgtaaagatgggaagagaactgggctgactccaggacctccaggatgaggcagaggcatgatgcttcctgctcacctgggccaccctctctccaggacttgtcagctggtggttcagccccttctccaaccccttcataagcttgggccactgcctgggacccagcagacactgcccaggactctttagtgcactcactcttgtctgccccctaccttccctcctggaaccacactacttgaatcaccattactttgcctcgctggcagagttgggtcaagtgccctctccttgaccttgagatgaaggtcaagagcacagggaccaggccttggttaggctgagctcccagcaggacaccgcctgcagaaaggacctgccctgataatgtcccttccccagattctcaagcagatgcccaagggaggtccccacagagccagagtgcctgaggcttcctgcttgagaacctgccccctggatcttggacacttacagattgagctgtatgaattcagcgggtctcactccagagggtcagaacgtttgctttagttttttcatctgttttgttccttgagtcagtgctgttgatgacgagttgtcttgaataaatcatgtgttctttgcaa

SEQ ID NO: 393500 - DNA, 3519 bp, Homo sapiens
tggtgactctagaggttccccaacgtcaataagcgcaggtaggatgtgacttttgaggaccatccactcaaccccaaccctgacagccggtggaacacgtacttcaaggacaacgaggtgctgctgcagatcgacaaagatgtccggaggttgtgcccagacatttccttcttccagagggccactgactacccttgcctcctcatcctggacccccagaatgagtttgaaacccttcgtaagagagtggaacagacaacactgaaatctcagacggtggcccggaaccggagtggggtcacaaatatgagctccccacacaagaactctgtgccatcatccctaaatgagtatgaggtgctgcccaatggctgtgaggcccactgggaggtggtggagcggatcctgttcatctacgccaagctcaaccctggcatcgcttatgtgcaaggcatgaatgaaatcgtggggcccctctactacacctttgccaccgaccccaatagtgagtggaaagagcacgccgaggcagacacctttttctgcttcaccaacctcatggccgagatccgggacaactttatcaagagcctggatgactcgcagtgtggcatcacctacaagatggagaaggtttactccaccttgaaagataaggatgtggagctctacctgaaactgcaagagcagaacatcaagcctcagttctttgccttccgctggctgacactgctgctgtcccaggagttcttgctgcctgacgtcatccgcatctgggactccctcttcgccgatgacaaccgctttgacttcctcctcctcgtctgctgcgccatgctcatgctgatccgggagcagttgctggaaggggacttcactgtgaatatgcggctgctgcaggactaccccatcacagatgtctgccagatcctgcagaaagccaaggagctccaagactcaaagtagcccggcggcaagaggcccacgttcgggagagaagcctcccgaccctgtgccctggctcccgggacacatagaaacctgtaggaacccagcctgaggggaagccacaggatcggcccgagacccaggccatgcccactggggacacactgtgccgtgctccttctgccgccacgcccagctccccacctgccctgcactctgccctctttgcccaggatactgaggagggctggagctcgggaagttgtccttcctgggccagggccgtttctggcactgggaggctggcaggggcccctccctgcctcggctctgccgccccagcctcagttcctgcttctggtcttctcctgggctccactcaggggaggtgcttggccaatgggccagaaaccgcttctgagcggggcacttcggctgctccacagggaaggcgacactgaaagctgagtcctgccgtctgtctcacccacagatgtctgtagtcggtcggtgtgaatgtgggcccaagtccccaggcatcttctccgtgtgtgtgtgtgtgtgtgtgtgtgtgtgtgtgtgtgtgtgtgtgtgtgtgtgttagggagtgagggtctctcaggcctccaggtctcccagcccctccttctctgtctctacctctctgcctgtctccttccacctccttcccagagtgggactgtgtcttgcttcatgattcctctctccattactctccctgcccttctctgttggggtgccttatcctgagccacctcctctccccgcttgcctctgctcccctgaacctgggagacagatgaggagactggctcagcaaggcccctggaggtcaagcttggcctttgcctcctgttcccatcccccagccctggctcctaggtcctcccaactgggagggagtcctccgtgcctcacttagagggttctgaacccgttccctacacagaaatcttggaaaccaaatgctgctgagtaaggatgaagctttgagcctcctgcccctgctttctgcccagggagggagaaggaagagggggagctggtttttctggaggttcccccagaggccctcctgtccgaaaagaaaaggaccttgattctgagcccagggtcggaacccattgcttcagaagagttgtcattccctcggcttccaggtcccaacccagggttgggttgagtgagtcccacaaagggcaagtggggcccgaggaagcctctctggggccaggggtagctgagcttaaaggccctgggtcctgccagttccaggagggccatgtctgtgcctctgtgtacccctccacccgctgcgggctgagggaggtgcagggccttctctgacccctgcctgagctgttcccagggctggagcaggtgtaccctgagcaggggcagctggccactcccagttctcaccaagtcacctccctccttgtacaaggtttgcgtccggaagccgggtgccatagtgaggaccctcgtcctccagactggctggcaggagtcaggccccagcagccctcctgcccccaaagctttccgagtctggtgggcaggacttctcgctgcccttccaagcccggctttgggccagaaaaggcttccccaggtggctcttctaccaggcttttcctttgatgccgcctggatttccgcacctgcctgtctcctctcccagagcacagtatttgggagactttgactatttattcagactcctggctatgtattgcacattggcaagtgctctggggatgaggcatgggtataggaagggagaaaggagttggagacaagatcctcttcattttccaagatcaaagtcagcctcttctccccatgcttctaggaactgcctggttttcaagcaggtcctggctgagcgggctctgagttctgtactggaattgagtgtaaagatgggaagagaactgggctgactccaggacctccaggatgaggcagaggcatgatgcttcctgctcacctgggccaccctctctccaggacttgtcagctggtggttcagccccttctccaaccccttcataagcttgggccactgcctgggacccagcagacactgcccaggactctttagtgcactcactcttgtctgccccctaccttccctcctggaaccacactacttgaatcaccattactttgcctcgctggcagagttgggtcaagtgccctctccttgaccttgagatgaaggtcaagagcacagggaccaggccttggttaggctgagctcccagcaggacaccgcctgcagaaaggacctgccctgataatgtcccttccccagattctcaagcagatgcccaagggaggtccccacagagccagagtgcctgaggcttcctgcttgagaacctgccccctggatcttggacacttacagattgagctgtatgaattcagcgggtctcactccagagggtcagaacgtttgctttagttttttcatctgttttgttccttgagtcagtgctgttgatgacgagttgtcttgaataaatcatgtgttctttgcaa

SEQ ID NO: 393501 - DNA, 2073 bp, Homo sapiens
agttactggctatgtcgaccacgcgccccgcgtccctggggggcggcggcggcggcggcagcgcaggcggcagaggcgcaggcggcggaggcggctggggggtccggaagtcaacaccatgtcaagtctgcacaagagccgcccctccttctctgtctctacctctctgcctgtctccttccacctccttcccagagtgggactgtgtcttgcttcatgattcctctctccattactctccctgcccttctctgttggggtgccttatcctgagccacctcctctccccgcttgcctctgctcccctgaacctgggagacagatgaggagactggctcagcaaggcccctggaggtcaagcttggcctttgcctcctgttcccatcccccagccctggctcctaggtcctcccaactgggagggagtcctccgtgcctcacttagagggttctgaacccgttccctacacagaaatcttggaaaccaaatgctgctgagtaaggatgaagctttgagcctcctgcccctgctttctgcccagggagggagaaggaagagggggagctggtttttctggaggttcccccagaggccctcctgtccgaaaagaaaaggaccttgattctgagcccagggtcggaacccattgcttcagaagagttgtcattccctcggcttccaggtcccaacccagggttgggttgagtgagtcccacaaagggcaagtggggcccgaggaagcctctctggggccaggggtagctgagcttaaaggccctgggtcctgccagttccaggagggccatgtctgtgcctctgtgtacccctccacccgctgcgggctgagggaggtgcagggccttctctgacccctgcctgagctgttcccagggctggagcaggtgtaccctgagcaggggcagctggccactcccagttctcaccaagtcacctccctccttgtacaaggtttgcgtccggaagccgggtgccatagtgaggaccctcgtcctccagactggctggcaggagtcaggccccagcagccctcctgcccccaaagctttccgagtctggtgggcaggacttctcgctgcccttccaagcccggctttgggccagaaaaggcttccccaggtggctcttctaccaggcttttcctttgatgccgcctggatttccgcacctgcctgtctcctctcccagagcacagtatttgggagactttgactatttattcagactcctggctatgtattgcacattggcaagtgctctggggatgaggcatgggtataggaagggagaaaggagttggagacaagatcctcttcattttccaagatcaaagtcagcctcttctccccatgcttctaggaactgcctggttttcaagcaggtcctggctgagcgggctctgagttctgtactggaattgagtgtaaagatgggaagagaactgggctgactccaggacctccaggatgaggcagaggcatgatgcttcctgctcacctgggccaccctctctccaggacttgtcagctggtggttcagccccttctccaaccccttcataagcttgggccactgcctgggacccagcagacactgcccaggactctttagtgcactcactcttgtctgccccctaccttccctcctggaaccacactacttgaatcaccattactttgcctcgctggcagagttgggtcaagtgccctctccttgaccttgagatgaaggtcaagagcacagggaccaggccttggttaggctgagctcccagcaggacaccgcctgcagaaaggacctgccctgataatgtcccttccccagattctcaagcagatgcccaagggaggtccccacagagccagagtgcctgaggcttcctgcttgagaacctgccccctggatcttggacacttacagattgagctgtatgaattcagcgggtctcactccagagggtcagaacgtttgctttagttttttcatctgttttgttccttgagtcagtgctgttgatgacgagttgtcttgaataaatcatgtgttctttgcaa

SEQ ID NO: 393502 - DNA, 397 bp, Homo sapiens
aataaagacggctctatcatctggcctggggtacagtggcataataatagcttactgcagcctccaactcctgtgctcaagggatcctcccacctcagcttcccaagtaatagggaccataggcatgtgccactgcacctggctcctactctagattctttccctgtgtaatttattatactacttaagacttttaagctccagacagtatatctgaaacctggttcaatatctttacaaagtttaatcctcctccaatctttcccatttcagtaccaccaattgctcaagtcagagctactactagtcaaactactacaggttactatgatagtacacattcctgccacctctctggaagccactcctgagtcttatctgcagatctgatttggcc

SEQ ID NO: 393503 - DNA, 343 bp, Homo sapiens
gattacaaatggacacatataaatgaatcttacaaaaatgtttttttgtaagtccattgtttcatcccttttgagaaggaagggaagtattagctttctgggatggaaagatattggggtgatctttggcatgactacagaggggttgaggattggaacagaaccaacttccatgtctatttatttactcgattattaattttatttatttatttttctttttttcttttttcttttttttttgagaaggagtctcactctgtagcccaggaggcggaggttgcagtgagccaaaatcgtgccaccgcactctagcctgggcaacagagccagaccatatctc

SEQ ID NO: 393504 - DNA, 516 bp, Homo sapiens
tttttgagacggagtctccctctgtcgcccaggctggagtgcagtggtgccatctcagcttactgaaagctccgcctcccgggttcacgccattctcctgcctcagcctcccgatgctgggattacaggcatgagccaccgcgcctggcctttgttaaatctttatcttggatcttacttttccagaaaaaaccttggataattagggagttatttgtcttttggtcatttttaaggcattaaaatgacctctttttcacttgagaggaattctgtttgtttactccacaaatacgtactgagtgcccactgtgtaatgagcatagttaaatacacaagatttggtcagcaagaacttgttcccctttccatcttctgtaaaaagtatggtatgtaggcttgtggtggatgcacgtgaaggaccacctacttagtcctatcagctgacgcactccgttatcagaggagtagcagatgctatagccgtgttgttctcatgtggaaagaggtggcaga

SEQ ID NO: 393505 - DNA, 799 bp, Homo sapiens
tctaacaaacaatcctaactcattctcaagttttattctgcttaatggaaaatggtagaagaaaaagcctttgcataactacccagtgaatgggagatttcattcttttccataagttgagggctatttcctgttttctttttcatttttttttgagaaaactaacccttcattgagatatttttaagtcgaatatctagtataaaaagtttgcattgtttcagcttgttttcatttaaacctgtggttgtctttcatctgcttctggcaatttttttttttttttttttgagacagggtctcgctctgttgcccaggctggagtgcagtggcacaatctcggctcactgcagcttccacgtccccagttcaggcgattctcctgcctcagcctcccgggtggctgggattacaggtgcacaccaccacgcccagctaatttttgtatttttagtagagatggggttttaccatgttggccaggctggtcttgaactcctgacctcaagtaatccaccagcctcgacctcccaaagtgctaggattacaggcatgagccaccacactccgcctacttctccattgaagtgctctagttttggtaaaatcttctccttgacttcaggaccctctccacatttatccccagtctataactcgcatatttcgtgttttcaaacagaaaaccgtaattcaggagtgaacagcatcctctgtaaggtgtcacaggagcagcctgaaatccattaggcagtcattctgaagctgtggtgaaatcgaagggaagctaatgttgcag

SEQ ID NO: 393506 - DNA, 349 bp, Homo sapiens
aaaaggatactttcagagggggtaaggctctgctagttgttctccttgcttctaatataaaacaaaacaataagaacctttatcacaaaccttaataataaccctactcctactgtaaatggagagaaatgagatgatgttagctccaaggatttccaagtctcctaagaagtttcctaaaaccacaccctcctgggaaccctataggattgggattagattcattgggtttcaacatgagcctcatcaataattttcagataaaataaaagtctttggttatcttatttctttatctttagataaaaagaagtctttaattacacttgagagtatagagaacacttga

SEQ ID NO: 393507 - DNA, 357 bp, Homo sapiens
ccccttgcttgctcaggtctcatggacatattactgacagataatttctttaagcttcaggttctacctctataaaataggggatgataattatattttatctgtcagtgcacattgtgactgtcaaggctgaattttgtgaaataaggtcaaatgaaacagtgtatgtgtaagtaacttgtaaacagttaagcgttctatacaaattttttaattactataagaatcagtttcctctggtaacctttcatcttgagcagggctcaacatagactttttatactgcaagctgtggttttgtgggtcatgttttaggaaggcagcaatgtatttcggagcagacctaagcaagcccgg

SEQ ID NO: 393508 - DNA, 571 bp, Homo sapiens
gagtacacattttcagttacaagatgaacaagttttgggaatctaataaataacatggtgacatggttaaaaatactgtatttaatatatacttgaaacttgctaccacagtagatcttaaatattctcaacacgcacacacacacacatagacggtcatggtgtgaggtgacagatatttcaattagcttggttgtggtaattatttcacaatgtatatgtatatcaaagcatcatgttgtacactgtaactatatacaatttttatttgtcaaatatgcttcgataaagctgagagggggggatagaaaacaaagaaatttctcacaatgtctctcagtagatctaagggtaacatattaaaaactcgaaaatatttggcccaatcctgggctgctaacatgggttagtggaaaagtgcactgtggcgccagaaaggtctgggttcaaatctctatcttgctgtttgctaatatttcttaacctctctgaacctccaatttctcctgtgcaaaatgaatataataatacccatcttattggactgttgcaagatttaaacaaaaaaaaa

SEQ ID NO: 393509 - DNA, 465 bp, Homo sapiens
cctctcaagtccagaatgtggcatgtgatggaaatacatcgagttcccaaatccagaaaccctcagccttggggatctcctggaaactcaagaaatgagaaaaacctggtggagtggacaggtatagggatagacacggtggccccaagagcaatggctgttgagacagccagcaaccaacctcggggccactccctgattctgtctggcccctgtaagacctgggccctcccacggtgggagagcctatactcccaataaggcaggtgggatctgccatgggcccagacttcaagggtcacggctcttggtaactagagcggcttctctatcaatctctctctctctgatacatataccaatcatataggcagacagtacaacaaataaaactaaacactgcccagcctgcagcaagcactcaagaaaaggtagctgttaaccaccatcccctgtgcctggccc

SEQ ID NO: 393510 - DNA, 342 bp, Homo sapiens
gggaaacttggaaagtaaaagcacaaaaaatatttttttaatcacctgtaattcatctccccccaaaattaccaccactaaaatatggatttctgtcttgctagtatatgtttctgtaaataattatatattaagcaaaaataagaacatcttgtgatactgttatgtaactgcttttttccacttagatcatgtccccatgttaataaagactcacataaaacatggttttagataaggtatctatcatgaaatttagtggggttttttttgtttttgtgtttttacagggtgatggtatgtcccctaggggccatgtagaaaatctgggggctatttgtg

SEQ ID NO: 393511 - DNA, 641 bp, Homo sapiens
aagggccaaggcagtctgagacatgagcgagaaaagaaaactgccttcccaaaaagtgtacttgtgcacctgtgtcagtgcatctgtgcatatgtgtaggtgtgcatgtatgtgtgcatgtgcatgtgtgtgtgtgtgtggttggttggttagggctgtaaagggggcctgttgaagaaaacaaggaagtcctagagggaaatggagaagcgaaccttcccaaaccaagggaatgttctaaattggcccagctgcttggggttctggaaaataggtaccacacctaaacttcccaagctttaaagtgtgtttgaaccacctgcggatcttgttaaatgaaaatcctgattcatttgggttggcagaggcctgagattgtgcattcctaacaaatccagacgatgctgatactcctgctctgaggaccacattctgagtagcgaggagatggaacacacccaggagtaagggaccagagaaggccgattggtggctaactgagcagaaacagagacgggaaacaagaacggaaggtgataaggtcagacaaatggacccagaggtacctactggatatcaaagtgacctcgctggtaattaggatgcaagacctctggccagccctgggtagcactgattca

SEQ ID NO: 393512 - DNA, 358 bp, Homo sapiens
cacctcagcctcccaaagtgctaagattataggtgtgagccaccgtgcccagcccacgtacatatttttttttccaagcagttaaaagtaaatcgcatgcatcatcctcctttaccacataatacttgaatatcctaataagtacattctcttatgtaaacaaaatacatacaattaacaactccaggaaatttaacattgctgtaatactttaccatccatgttccaaatgttgtcagttgatcaaataacatcattcttagcattttttttattttccagcacaagatccagtttaggatcatatattacatttaattgtcatgtctctttagtgttctttaatctggcacagttc

SEQ ID NO: 393513 - DNA, 846 bp, Homo sapiens
cgtcgatcgagccggtcctcgcgacgtgtatcctagttctttcacataactagtaagtggaagaactaggataacagtgacttacatttattaagaggttctaagaacttaccatatttaaatctcataattgctgtgaagtaggtgggattattagtttccatattacagatgaggctgttttctagctgtcattctacttcctctgtctatgatgttcttctcccttttatctttccctgctttgaggcttttataaagatattctcctgagtcttcttaatagctttaaagttttaaagtatttcagaagtgggtctttggtatatctggaattaattttatatatagtataagataggaatctagttctatttttccccatatatggaaagacatttatttcaacacttaattttttgtcatttctattcttctgcaacttctgcagctatgagatttgtttcagattctctgttttctttgagttctgcttccctgaaccaatatggctgttttgttttgttttgttttgtttttgagactggggtttctttctctctgtcacctaggctcgagtgcaggggcatgatcacggctcactgctgcctcgacctctcaggctcaagtgatcttcccacctcagcctcccaagtagctgggaccgcaggtgcacaccatcatgcctggctaatttttaaatttttggtagagttggggtctatgttgcctaggctggtctcaaactcttgaactcaacatccttccatctcagcctcccaaagtgctgagattacagatgtgagccaccacaccatgattgcattcctggatatcactgtttaa

SEQ ID NO: 393514 - DNA, 867 bp, Homo sapiens
  misc_feature (816)..(816): n is a, c, g, or t
cgtcgatcgagccggtcctcgcgacgtgtatcctagttctttcacataactagtaagtggaagaactaggataacagtgacttacatttattaagaggttctaagaacttaccatatttaaatctcataattgctgtgaagtaggtgggattattagtttccatattacagatgaggctgttttctagctgtcattctacttcctctgtctatgatgttcttctcccttttatctttccctgctttgaggcttttataaagatattctcctgagtcttcttaatagctttaaagttttaaagtatttcagaagtgggtctttggtatatctggaattaattttatatatagtataagataggaatctagttctatttttccccatatatggaaagacatttatttcaacacttaattttttgtcatttctattcttctgcaacttctgcagctatgagatttgtttcagattctctgttttctttgagttctgcttccctgaaccaatatggctgttttgttttgttttgttttgtttttgagactggggtttctttctctctgtcacctaggctcgagtgcaggggcatgatcacggctcactgctgcctcgacctctcaggctcaagtgatcttcccacctcagcctcccaagtagctgggaccgcaggtgcacaccatcatgcctggctaatttttaaatttttggtagagttggggtctatgttgcctaggctggtctcaaactcttgaactcaacatccttccatctcagcctccctacactactatgattaccgacgtacgcaccaacanccatcaattccttccctcacactcgatgatcccgggaccgagctcgatcta

SEQ ID NO: 393515 - DNA, 852 bp, Homo sapiens
tgacatgatagaatcgagctggtaccgggtatacggggtcatcctagtacaattataagtgggatcgtggtagagtcagatgaggtgtgtaagatgtgtaaggaggtcgtgactagtagagtattgggtctcataattgctgtgaagtaggtgggattattagtttccatattacagatgaggctgttttctagctgtcattctacttcctctgtctatgatgttcttctcccttttatctttccctgctttgaggcttttataaagatattctcctgagtcttcttaatagctttaaagttttaaagtatttcagaagtgggtctttggtatatctggaattaattttatatatagtataagataggaatctagttctatttttccccatatatggaaagacatttatttcaacacttaattttttgtcatttctattcttctgcaacttctgcagctatgagatttgtttcagattctctgttttctttgagttctgcttccctgaaccaatatggctgttttgttttgttttgttttgtttttgagactggggtttctttctctctgtcacctaggctcgagtgcaggggcatgatcacggctcactgctgcctcgacctctcaggctcaagtgatcttcccacctcagcctcccaagtagctgggaccgcaggtgcacaccatcatgcctggctaatttttaaatttttggtagagttggggtctatgttgcctaggctggtctcaaactcttgaactcaacatccttccatctcagcctcccaaagtgctgagattacagatgtgagccaccacaccatgattgcattcctggatatcactgtttaa

SEQ ID NO: 393516 - DNA, 667 bp, Homo sapiens
atttggcaggctgtcatgtcactttatgagcttaaacattcagccttccaacatggcttactttctgcatgatcagagaaaggacacacataacccagtttaatacagtgtttgtcaaaacagaaggcaggatgccttggcctctgtctagtattatgtaaatattcaaaattctttttcttttttaaaaaaaaaactcccatgaacacaaagctctttaaccttgcctttcttctacctattctccagggagttgagtgggtcagaacattttgaaaatcatcgttttaaatatcaagttcatattttaaattctacatttttcatactttctgctgttacgatttaagtctcatttcccaaagcaggcttcttaacttgttagctataagcaaattgaactactggtgcttttttgcttttttaatgtttatttatttgttgggggttttgttgttgtgttactgtttatttcagttaaaagcttttcttaagttgtgtttggcattttcttctggggagaaggaaaatttcaaaaacaagaccaaagaaataacaaactcgcagttagcataaaataataacaagtagaaaattttggctgaaacctctatattcactaagttttccagaggcaaatgttatagctaatcacttccatatttgc

SEQ ID NO: 393517 - DNA, 781 bp, Homo sapiens
taatcagaaaacaactataattcacactatttagtacccagaatgaaaatgatttaaggtcatagatatttgttggtaatacaagattaagttgattattaaagatgctaaactttcccaggcacagtggctcatgcctgtaatcctattgctttgagaggctgaggcaggaggattgcttgatactgggagtttgagaccatcctaggcaatatggtgagaccttgtctctacaaaaaaataaaaataaacaaatttagctggatgtggtggcacacacctgtagtcatacctatttaggaggctgaggcaggaggatcgcttgagcccagaaagtggaggctgcaatgaactatgaccatgccactgcactccagcctgggtgacaagaatgaggtctcatctcagatagatagaaatttttaaatgctgacttattttctattactgtttatttactattcggacaaaatttagtcacctgtcattttttccctaaatttttatttactttaaacttaatgtaaattagattttaatctaatgatgtattttgacaaaacatggaatttcatgacatttttttactaacaaaagtcggaatcctaagatagtatgttctaactagttcagtgatggacatattgtctactattagaaggtaaatcatagtctatctcagtgtcctgttctttaataaaaactttagtttgcacatatctactctttatgttttttaaagtatgtctttctggacccttgaggtaagtgttacataaat

SEQ ID NO: 393518 - DNA, 413 bp, Homo sapiens
tcgctatcatcggcaccccccagccagtctctctgattccgtaatgtggttggtgattattataccttaaggtacttgtacttgcttgtgcctcttttccatcagtactagggtttcttattttccttatcctcccaagctactgatatagagagccctttaagaaattggagaagatacattttacctctctaaactttgtttctttcgctattcatcggcacctacctaacagattagagaataaacctgagaaatgagctcattattctacttaataaactaccataagcaagcaatgtactgggagttagggatgtaaacacaataatagtaactacatttattaggcaccgaccatgcacgaagcagtctaaacatgcaagtcttaatccctgcagccaccttgtaag

SEQ ID NO: 393519 - DNA, 447 bp, Homo sapiens
gtatctcagagcaacataggttaaaggtttagacagtgtcttggagggagggagcaagggagaagtagggaagctatattagctaggtgatgaggaagagcctggctaatagaaaaggtgatggggaatgcatccaggcagagggaagggaaaaggctttgatacgggtgtgatctggtgtgttcagggaagggcagaaaggccagcatggttgcggtacagtgatgaaaaaagggctggaaacgaaagcaagcggcaagattacgtaggccatagaaaacacttcatattttattctaaggataatggaatgtcatccttagaatggttttgagcaagggggtgcgttgatttggtttttcttttattttccttttcagagacagagtctcgctctatcgctcaggctggagtgcactggaggaatcacagctcactatctccttg

SEQ ID NO: 393520 - DNA, 450 bp, Homo sapiens
ctgagtagaggccatacagagagacaagcagagactcattaacatccaccacaaatctgctgtgttggagaaggaaagaacatggaacagggaaaaatgacatgggagctaattagtcccagagaggggcaatgccttacccagggtctggcaggacgggtgctaggcccccagacccaggtgaaatgttttttcttgttttgaggcactttcaactcactttatcataacagccctgagaggaataggaagaacaggaatttaaagcctatctaccttatagaagaggaaggtgacagcccaagattgagaaaggcctgaggtcacaccagatcaaccatggcatccattcccagcctcagcttcttggggtcaggataagcattccttgtggtgcaggaccctctcagatgcagcccaccatcttggacagagtcctgggcaaggacc

SEQ ID NO: 393521 - DNA, 470 bp, Homo sapiens
gtagcttccctcgccgcagctctcccagcctctccctctggatccacaggatcagcggccccagccctccgccccacgtggcttgctgcattccgggaagggggtggaaatgattcactgggggaactgtgactgtcccttcctcgggcggggatgcgcctgcgaggtcccagcggccttccctgggcggctgcgccctccctcgcgcccagggcgccccgaggcctgcgcggcggcggaaggggcaggtgcgcctgcccgcccgggtcagccctccacctgccgccgccgtgccccgcagctcccgcggctccccgccccccgcgctctttgttacagcccgacttcctgtttgcggcagccgacccggctcacttcccgggccgggaagccgccgaaggccgcgagcttctcggaggctcccccgcccgctcggctccgcctcctgcctccccaatctcgctccggcc

SEQ ID NO: 393522 - DNA, 351 bp, Homo sapiens
ctgcacttacggtaggtgtgggggagcacatgggctgtgtgagagcatctctgtagggcctgcatgccaggctgtccgtgggcacctctgtgtaaagggcgtgaagctctcctgctccatacttggcagcagctggggtcccccacaccccacagccccacggcagcagagcacagggtgctccacatacctatgtgacaaggactcgaggactccgctgcagatcctgcctcaaattctatcagataaggcaacgctggctgcatcttccagagagggaacctgggaccggaagaggcagaggggcacctcaagccccacagctgctgagtggcagctctgagaggaagt

SEQ ID NO: 393523 - DNA, 342 bp, Homo sapiens
tggatcccaagggcctgttggtgaacccacagtggaaatgtttacctggggtcattttctacaagggtaatgccagtaggatgggaaacctcatcagtatgaggctgtggggaataccatggggtatagaagctgaggggtaaggtgtggctggccacaggagaggcactgcccacattggcaaagtcatagttgtggaggcctactaaggaagtaagtctcaaataacctgtgaaaataatattcacaagagagagctggctctagcccatctccttggccagagaaaaggaatctttaagtatcaagcaagaactttccttcactatgccccacagtgat

SEQ ID NO: 393524 - DNA, 501 bp, Homo sapiens
cctatattttctagatttgcaagatcagatcactgcagttagcaataagtgttacagtaagctgtataaaaaacaattcagttaaattttctgtctcagaaaatgtctcaatttttaatcaagacagagaacttgaaaatttctcttctatcatacaccagaaaacgtacacaatgtttaccatgcatccacaattaagtgacaattagagatcagcttaagaaaatggaaatcataatgatgaaaggtaagagaatatgccatcccaaaatatgccactttgacataagaattattttgagctgagggcaattgagctacaaaaaagcctctcttccctcttcctatttgtctaaaagcaggacataaattggtaaaggtgttcttactcccctctctgcccaaataacagaagttaatcaccagagatgtacctagacccttatcagcccagagatggcactagaggaatctacaaaacagattactgaccagcccata

SEQ ID NO: 393525 - DNA, 203 bp, Homo sapiens
atccctggggtctggagcccctgctctggggaaggagaggtggggcgctgccttcccacagtcccctcaagctggcagggactgctgtacccccagggtgagaggagaactaaaaggagcggaagctggcctgggtccggggagagccctcgtgtttgcccaaaagggaactggagaagggtggctgggcccatacgcaggga

SEQ ID NO: 393526 - DNA, 488 bp, Homo sapiens
agcagccatgtgaaagaccccaggcaagactagcagaagagctgcccagctgagcccaatccaaattgcagaattgtgactgtagataaccaggcacaaattcacaaaatgatgaatggcagggccaggacttggacccaggcagctcaggagtccaggacacatgccttcaccactggcacgaagcccacaaagaaacagcgaagcccatcagcaatgacagaggacaaaaatgtaattatcatctcttcaagaggacgaaggaaaatatttgtcaaccaaaactgtctttcagctcaactgtctttcaagggcaagggcaaaataaagacatttcagacaaagactgaggaactttaccactcacagctctttgctgaaagagctagtaaaagatgacctaaggaagaagggaatcaagccctgtaccaagcacattctgcaagaagcaatgaatggagatatggaaacatgggtaaaatctaaat

SEQ ID NO: 393527 - DNA, 418 bp, Homo sapiens
tagcgtagatttgagagtatagattgtctttcagattacagaactagtccctgacttactccagaagttaagtagcagagcttttaccatgcttagttccaaattctagaacaacccccagccttctccaaagttaaaaacagtctaattgacagtggttgattttggctggctgggtgatgatgaaagaaaggagagcacttgcatagtttatggtgaagataaagcacatatcaggcattgtaattatctagccgcacactataaacttttccatttcattcatttccgtatctcttgctctttattgtcagttgcagaggcacaacacttttctcaggattcatgatcaactctgccctttggaattgttcctactgtctaaaaattaattccacatgcatgtacaaacttacat

SEQ ID NO: 393528 - DNA, 344 bp, Homo sapiens
tttttttcctaccttaaattattaataggaatgccagtctttaagaaaacacctctggtaagctttgctgggagaaaaacacattggtccgcaattctgaggttattatacactaaagggatttggtgacagctaatattcaagttttctgctaacagactgattaaatgctttacatttccgtagtgtaaaatacacactcttgtgtttattgcaaattgtaccgtttctcattttttgacttgtgcatgataagatgcattgcaggaaacctgttattttttttttctaacattcactcctttttcttccaagtttaagaatcaactattttaaaagttcac

SEQ ID NO: 393529 - DNA, 484 bp, Homo sapiens
actgatacatcctggtgcatggctgaataaatcactgaatgaaagactgcacacttccaattatttaactcagactttaagttccctgggagcagaaaccctggtcaatcttggtcacccagggccaaacagagtttctgtacacaggccctccttaagtactttttaaaataaatgaatgaaatgaaacttaacaaatcacgatcaggcgcagtagctcgtacctgtaatcccagcactttgggaggccaaggtgggtggatcacctgaggtcaggagtttgagaccagcctggccaacatggcgaaaccccgcctctactaaaaatacaaaaattagctgggcatggtggcgggcacctgtaatcccagttactcaggaggctgagcaggagaattgcttgaacccgggaggcggaggttgcagtgagccaagatcatgccactgcactccagcctgggcgacagagcaagactcagtctca

SEQ ID NO: 393530 - DNA, 771 bp, Homo sapiens
tctgccccaaaattggtttgtataattgagaatatttaagaggttgttaaaatttgaaccactttctattcttctattaagtgtacacatctattaaagatccccttgtagctctttttatctgggccatcacatttctgcccagcagatgcagaggccctgtcctctcttccacctccccactacctctccttccctacttttggactgtaaaagctgtctttctgcagttaattgttttattctttgtaggttctactcgttgataatgttatctactgctataataattacagacggcaacaggatgatcaaatcttggatattttaaatttacattatgccttttttattttatttttttaaagtctctgcttgacagcaaataagcctaacgttccctaacaaatgatgatgtcccattaatgatttgatgacttcctgtttgtagtttttatttagagtgcttgtgggtagtttttcataacgacatttaaaaatcaggatataaataattttttaagttttttttttaggcggggcacagtggctcacacctgtaattccagcattttgggaggctgaggtgggcagatcttgtgaggtcaggagttcaacaccagcctggccaacagggcgacaccccatttctactaaaaatacaaaaattaggccgggtgcggtggctcacacctgtaatcccagcactttgggaggccgaggcaggcagatcacaaggtcaggagatcgagaccatcctggctaacacgg

SEQ ID NO: 393531 - DNA, 343 bp, Homo sapiens
tgtcataaatattaaaaataaacaaataaaaaagcatataaatttctagcaattgtccagaagatagaacagactactctcaaaacagtatgttccctttacaccagaaacttccaagcggaagctggctaaactatctcatctttcaggaaatattccagaatcatttccagtaaaaagtcagttagatggtctccaaattctttctagttcccgactataacaaatatcatcaacctaaaatgacaccatcacttacaacagaaaacaacctgattttaaaataggcaaggctgggcgccatggctcacgcctgtaatcccagcactttggaaggccaagg

SEQ ID NO: 393532 - DNA, 832 bp, Homo sapiens
ggtgtcagagattctgtctataggaacagcagggagtaggtggttcagcatgctatgtgactctcagcagctatagggaagtgggccagagtgcaccagtgcatgcatcctggtcaggtcctaactataattctgcctaaaatctggcttgtaaatcttattagtttctccaatggaagggttatcaaattaattgaacccaaggtgggaacttgaatgtatagcctgttgagaagtatgggtaacaacttactacttgtgatttgcatctgaagtggggagtaggagtagtcttgtgggactgagcccttgatctgtggattctgactcttaactcaaataagacagtgttagaattaaattgaattatagggtacccagttggtgtcctctagagtattgcttgatgtgtggagaaaactccttcacatttagttgtagaagtattctacattgagtgtgagagtagagagagaaaaagagtttttttacccatagtgtaggattttgcatggtcacccaaattaaataatggcaaaaaaaaaaaaaaaaaaaaaaaaaaaaacttgtgtggggggacttgggcccctgaaaaactttttaagacacattcgctttggggggcgggccccatgtggtctagtggaccattgggctaaacggggccccagagagacacgcggggccaagacacaaggggcgggagattcccacccgaataaaaaacagccgggggggcaacccaagcgttcctcgacacaacccgagagggagctcggagggccaacaaggggaccatctaaacgggagccacaagagccgaataaagtca

SEQ ID NO: 393533 - DNA, 428 bp, Homo sapiens
ccaccttatgcgtgggccatatgccgtggggacagagcctgcaggaatctgaattttcgaccttatgggggtggggcagcaagggcctcccaaacccaaaccgagaggttttcactgaattttttgtattttgggtgttgcccagtggctctttcctgaggctcagacacatttttgtcattcctgagtctgggcctctgctttgcggcctggacagacagacagacagggtggcttggacagccaggggaggggaagggtctccgcttccattctgagtcaatattgatgcagcaggacattagcctgacccgtgacctcccccaccagcttttcctttccccacaaataaaagccagacccccagaaggcctccagaggtcaccatatcactcaccaggcatttctaagcctcctctccttctccc

SEQ ID NO: 393534 - DNA, 581 bp, Homo sapiens
agtacttatggatgaagaagctctgcaaagtgacaataggaacaaaacatcggcagtttctggcttggatcatatttcctttttccttcagactgtgaagaaaagtgagggaaaaaaggtgagagacaaaggaattgggtatacctcgtttaaacctgctcagtttctctgctctgccttgaggagacactgtagtaagcatttgatagagacagtgatcccacttcacgtagttacctgaggcacatgccatagataggcagcatctcctttaaatcaactgcaacagggattacgaaatcagttggggcaggcattatttctcaagcagattgttttgtatcctctacagcaaaagggcaaaggtcttattctgtagaactggattctaagatgcaatttcttcattcctttagctctcgccatctgtcactgtttaactctttgtggctatgtggtttgtctccccacatagcttctaagttcttagagagaagacattgggtcttactgtatgtcccctgtgcctggaatagggcttgaggaggggtggtccagagctgagctagcacatatggtaa

SEQ ID NO: 393535 - DNA, 304 bp, Homo sapiens
ccctcctccggcatcttcctctcccatttttaggggagtctactagatcatattgctctgtagagtgatatgtgcgtgtgtgttcatttcatccctgaacttctgtggacagggaacagatagcattaacagaaacagcagcctagagacagagatgaccaggagaggtaacctcttggttgctcacataactctttgggagggttgcagcactataggacttgagctatattccctaagatttcaatggtatcccaggctgcaaaattgggcacaccgtggattagctgtttctgatgatgtc

SEQ ID NO: 393536 - DNA, 297 bp, Homo sapiens
gtccattatggctatctaggggccatctcattagagccactgatggcaacagatactgtactgagagaccctgcagctggcttagaagggtgactctcttaccttccaccaggttccattcaaaccagaaataactgtgaagggagcaggaactctgggcatcatttgctcaactacatatcaccagtttgaattggcttagacttagaatcatagaagtttttactcaagaggtcacacacatctaattttcagccctgttcctacaccctgcccattattgttcttgaaaaaagg

SEQ ID NO: 393537 - DNA, 443 bp, Homo sapiens
catttagtgtacttctaatacatttaagttagtataccttccagaatatttctcattaacatagaatcccttctgatttttctttccaaggttgggtttaagaatacacctggtaggctgggcacagtggctcacacctgtaatcccagcactttgggaggccgaggtgggcagatcacgaggtcaggagattgagaccagcctggccaatatggtgaaactctgtctctactaaaaatacaaaaattagctgggtgtggtggcatgcgcctgtagtcccaactacttgggaggctgaggcaggagaatcactggaacccgggaggcggaggttgcagtgagctgaggtcgcatcactgcactccagcctggtgacagagcgagactccatctaaaaaaaaaaaaaaaaaaggaatatacctggcaatttatcagagaatggg

SEQ ID NO: 393538 - DNA, 278 bp, Homo sapiens
ctcatgcacacagcaaaacttcagaaggtctggccaagagcacacaggaaataggagctgtgagctgaatgcttctcagagctcacatttttttcagttgtgtttccatggcatcaacctcagctcccttttccttatagttcacaaattcaacctagccaatctcaaccatgtctacagcttcacccacgttggtaacttctaaaaccacattgtaaacatcaccactagacctccagagtcaattctagccccctcccttatatgacaggccaata

SEQ ID NO: 393539 - DNA, 416 bp, Homo sapiens
aaacaggtataatcgttctgcaatgggaaaaaccccgtggagtttttacatataaaataaagcatatggatctataatgtttatgaataccctattaataatttattatttatgaatcctgtttttatatattttgccccatgacaggtacactcagtatgaaatgctgaattataaagctcctcactatgtcttgacatggtttttgcctttatgtgtaaagtcacatgagaaataaatatttttaaagttctgaagatgaaaggcataaggaagcatacattccacagttttgtcaggaaacacaagagactgcttttctagcttttccgagacttcattgcttccccatcagtgctctgttctggcctagccatgaaaaatcaagaagcaaggatgatacacctatttagaag

SEQ ID NO: 393540 - DNA, 288 bp, Homo sapiens
ccaactataaatgagagagaaaactgttttacaatttacagtattctaacaaaataatccagtgtgacagggaagaagtcatcttggacgaattacataacttctctaattttttggtgtcctgatccataaagcagagatagtgataactacctttcaaattttctacaaatactaagtgagatactatgtgtacgttacctggtatacggtaggtacttggtacaaatgccacttgactttcctacctaattatcctgtttatccctgactcccagccaagatgcc

SEQ ID NO: 393541 - DNA, 299 bp, Homo sapiens
caatagcccagcgataacatttgatcctatcatgttatttctgttttgcatgaagtgagtaagctgaagtctagagaaactgagatattgaaatcttattcaaagaaaatgcaaacctagcatcctaatttctttaggcccatgttggtaaaggtgactgagatggagacagttcataaagagcttaggcatgtagatcacaaaaattgtccctgcatgtattcagcttaagttttagcccttcaattggatttgtgattccagagttatttctaaatatagaaaaatgaaccatagca

SEQ ID NO: 393542 - DNA, 526 bp, Homo sapiens
gctgaggcagcgctaggctcaccgatggtccatagtcattgtattgagctaatagttacacacccttcgttacatgctgggcaatgttctaagcgatttacacatattcaataacataatcccttaaataacccatgcagtaagtaccatcattggcctcatttttcagatgggggaaagctgaggcatacagaggtgattccatgctgcaaggtcacccagcccatacatgatgggtgcagacctggcacccgggcagtctgcttccagagaacaggctccgtgctgctgcactgaacgctgccccagtggggctcaggaggaagggctttgacctcaggcagcacggggtgtgaaccccaacaccactgccatgtgtaagtcacctcccccaggctcagtatcctctcccacaaatggggctaatgatacttaccccagagggtggctgtgaagattaagcaaaagacatctcaagcatctggcacagttcctggcacttacggggcactaaacaagaggctgt

SEQ ID NO: 393543 - DNA, 412 bp, Homo sapiens
tttgactttttccttctatctctttaaaaagtagttaatgatctataactatactattcctattcaagtgtggcattgacaatttctactatttaagagatagtatagtgtaccatataagggacagtaaaaggaattgcaattagcatctaatttgttctgtctctggaattttgcattttaaggcacacctgatgttcctttcaagacatctaaaaatgttatttttttgtcaaaatagttataatgtgacagcatgtggaagtgaacactttaaaatatgaaatgaaaatatagtattttcaactatctaaaaagtggcccttccatcacctttcctaagtggtaaagctgggattcatatccaaggctgatggaaagaccaatcttgagctacctcctcactctgcct

SEQ ID NO: 393544 - DNA, 450 bp, Homo sapiens
caagtctgctgggcggggacagagcctgcagtgtggaatgcctgccaatcagccattcatccaaggggcgtttgttgacctttgtccttgttaaaggacagcgcacctgctgtgtactagaacgtctgagcgtgagagttgagaatccctgctgtgtactagaacgtctgagcgtgagagttgagagtccctgctgtgtactagaacgactgagcgtgagagttgagagtccctgctgtgtactagaacgactgagcgtgagagttgagaatccctgctgtgtactagaacgactgagcgtgagagttgagagtccctgctgtgtactagaacgactgagcgtgagagttgagagtccctgctgtgtactagaacgtctgagcgcgagagttgagagtccctgctgtgtactagaacgactgagcctgagagttgagagtccctgctgtg

SEQ ID NO: 393545 - DNA, 221 bp, Homo sapiens
aaaaacaaaaaataaagaaaggggattacttgtccaagttcaaagagccaggaactggaggagccagagtgtaagcccgggtggcctggtgccagtctgtgacgttaacgcctgcatgctgctccctctcctacagccatcccagggactatcactggggctgctcggccccaggattcacctaaatgagcaagccccttccaaaggggccatttgaagca

SEQ ID NO: 393546 - DNA, 1225 bp, Homo sapiens
aagtcactggtcacgggagggaatgaaaaatgccagcggcctgccgggagttgcagtgaacccagccacccgctcgcgtagtcttttgcgcaggcgctgtccctgttgcgcatgctcagtcttcttcgcgcggagggagtagggcggggaggagctcgccagcccgaggcgaaacggcttctgggatagtagtcttcatccactaaactgagaggcgcggagcgagcttattccccgctcccgggccaagcccagctgcgggtcccgcccgccgcgctcctccctcctaggaagagcatgagacctcacctatgaacttgccctcccacgtattgtcaagagccgtggaggactggtgctgtggtagagatgacgtggcgggcgggccgctggaaagagatgacgcgaaaacgggccttagagagggtgcggagggagcacctggcctgaaggagtcggggctgagagctgggggtttcagtcccagtgctgcgaaggctttcgagctttggaacagaatcactgaccggagactggcctactcagcccagcctgggaggccgggcagtgcccaagggagacggacgatagggagggagcgcctggatggagggtctcaagcggagtgaggaggccccgggccctgtggggaagtgggtgggggaaggtatacggccaggtgagcacccagggacgcccacagtatctggaaggagaccacggaatggagagcacctgttgcctctggagaggggacctatagagcaggaattgttaaatcatatggctgtatcacctacttttagaaataaataataggctactcgggaggctgaggctggaggttcaatcgcttgacctgggaggcggagattgcggtgagcctagatcttgccactgctctccagcctgagcgacagagcgagactccgtctcaaaataataatagtaacaatagaaataacagagaatggcctggagatagtgagtgcaaaagtgcgagctgggagatcagtgagccttttgtagtcttccaggagacaggtgattgtggcttggagcagagggaagtaaaaagtgagcaaagaaatattttgcccactttgagaaatatttgacggaatattttggagaccaaaagtatcgaactggaatggtggatgtagggctgaggacgtcgaatatgattccaagctctgcttgtggaggtgggtggctgggggct

SEQ ID NO: 393547 - DNA, 414 bp, Homo sapiens
accctaagccaacccccgccagagtgttctggggcctagggggctgtccccacttggctgatacctgaccgtggagtgattggtgcaggagaacagtggccccagtctaagagcctgataaaggagatggtggggctgtaagctctggattgcatatgaaaggtgctcttgcagttgtctgttctctctgggaattagccagccttgggagggacagtgcttgtggtgtcaacaagtccccagatatcaaagcattaaatacaacggacatctcactgtagaattggaatgaaatatgaattaaaaatgaccatctggtgattacctaaaagcaaatcacagtctgaaaccacttaaactggcaatttagaatgttataaacatcaccgaactaaactggacacagaacacatg

SEQ ID NO: 393548 - DNA, 394 bp, Homo sapiens
gtttcaataagatattgcaaagtagctgggcgcggtggctcacacctgtaatcccagcactttggagggctgaggcaggtggatcagttgagcccaggaattcaatactagcctggccaacgtgacaaaaccttgtctctactaaaaatacaaaaattagctgggtgtggtggtgtgcacctgtagtcccagctactcaggaggctgaggcaggaggatcacttgagaccaggagtttgcggctacagtaagctaggatcgtgccactgcactggagcctgggcaagactgagactctgtctctgggaaaaaagaaaaaaaagagatgttgcaaaggaggtgccctattcccctccccccatcttactgaacccttacaccacgtgtactattg

SEQ ID NO: 393549 - DNA, 347 bp, Homo sapiens
atttggtattctcaattttcttagtaaactttaatttaactgtatttgctagagaaagggagataagtttagagggcttgaaaaaggtagtaaacattttggaatggtatgaaaaacagaagtgatatctaaccaaagacttggaagtaattgctaagtgatgctaagggccaacctaagactataaacttgaaatactccaattttatgatttttaatttttttttcagttttgtttcttagcaacttagatgtaagagcagtgaaggtggttttttttttttttttttaaaatggacctaaaattagggttttgagggatacagtagggggggggaaccgggctc

SEQ ID NO: 393550 - DNA, 403 bp, Homo sapiens
tgtttcacctttggggagacggaatcccagagaggtttaggatttgttctcttcatacttaggcccttcttcttctaggagacagcttttcttatgccgtcatgcaggttcgcaaaaattacagcctgactcacataaccaggacaggatgtctggcacctgctcacccagggatccttacatagcagaacctagaggcttaactcccaacctgttactaagatggctcggccaggttggaaccaggtgataccctttaacaggccccaagggggcaggtgtggtatcagcttccagaaaggggggccttaaagagccagatctgaggtgagatctgcttctcttcctgtccagatgcccttcagtctcccattcctctgtccccactgtgaatgacctggct

SEQ ID NO: 393551 - DNA, 318 bp, Homo sapiens
accggcaaaatgggcgcactaacccatgtcctgccaaggctgcctcccagagttgtccctgagaggtctgaaggagatgtggggtgggaaaacgatttcttttttgagattgggtctcactctgtctccaaaaaaaaaagaaaaaggaagatgacctggcacggtggctgatgcctgcctgtaaccccagcactttgggaggctgaggagggcagatcacttgagcccaggagtttgaaaccagcctgggcaacatagggagaccccctgtctctaaaaataataataataaataataaataaataaataaataaaat

SEQ ID NO: 393552 - DNA, 118 bp, Homo sapiens
ccatcatacttcattaggcaacaaaagaactttaggggtactttccgtttaatcacacagaatactaaaaagacatgtacccaaggatcaagcgtcaataaaattaacacattttatt

SEQ ID NO: 393553 - DNA, 798 bp, Homo sapiens
tcacaaatatccatcacattacaatagcgtcaagtaggcatgacatatattatcagtcttgacacaatttttcttattttggctgttcaactctgcaactctgctgtagtgttacagcaatcatggatgatgcttattttaacaaataatcatatctgttccagaatattttgtatccatagactatttagaaatggcttatttcatatttaatatatacatgttagacatcaaattacattcaataggaaccaaactcagtgaggacttgaatccataccacctagaaagaacagtatgtgtggatcataacaggctctcaaatgtattaatgaatgagttgctgagaagcctgtataaaaatctaactgaattcttccatatgcaaatgtaaagtatttcctagcttattgtcacctaatttttggttaaagaaaattatatttgctggaaaatttaacagtattttgtgctgtcataagcaagatacaattctacaaacccataagccaggtggttgtagttgaaactttggaacttttttttttttttgagacagagtctcactctgtcgtccaggctggattgcagtggagcaatctcagctcactgtaatctctgcctcctgagttcaagcaattctcctgcctcagcttcccgagtagctgggattacaggtgcccaccaccattcccggctaattttggtatttttagtagagacaggatttcaccatgttggccaggctggtctcaaactcctgacctcgggcgatctacccgccttggcctcccaaag

SEQ ID NO: 393554 - DNA, 202 bp, Homo sapiens
tcagatcgggcgggcctgactctgcctcacactgttagcaactggggttggcattcatgggacgcctcctgcatgcaagaccctctcctgaggcctcctgtaagctgtggggacaccctaaccaagggcaaggccatcctgggacagcgtgtgtcaccagtggaggaacgcagcaccactcacagtgttctcctcaaaaccc

SEQ ID NO: 393555 - DNA, 429 bp, Homo sapiens
tttaaaagaactcttaaaaccacaaagttaataatttatgccagtcaaaatactgaaaagaagaagctgctgaaccagaaactggtcgtgtaatcttctgtaatgaagtctgagtctcacctgtttcagttaaacttacttccagttggcagtagcacactggacttgatgacactcaattccttcaattattttatcattttggtaattcctcttgttggttcaaaagatcatatgccattagcatataaccatagaagccaagtaagcaggctgattaggaaatcactttttccttcaaacttgttttatagccactttgagccagtttttgcagggaggagctaagcaggcaaccatcctctgagcatctaagcttctattctcccaaactatccagtgcatgcaccttgcagcagtcaagacagg

SEQ ID NO: 393556 - DNA, 410 bp, Homo sapiens
ggaccaacttcatcaatggtcatcggtacggatatcttcaactagacccctgaagagtaggatctgttctattttgttcagaacccagcatgatgctgtcctaacaaatactaaagtggtaactactctccttcaccagccctcagactaaagtccaaacagatgtaccggcccaggagccccggcagcacaggagcagtgcctcctttgaaactcagctctgcaggggagacccagggattaaaggctctgaatctgtaaggcagacagccctgcactcttgcttactgtctggggagaccttgggtgggtaatttaaaatctctgtgcctcagtgtcttctataagatggagcttttgtaaggaggaattgagtttcatgcctagaaagtctaaagtctggctctcag

SEQ ID NO: 393557 - DNA, 309 bp, Homo sapiens
caggtaggggggtgatgacggaatcaagggggggtgacgacggaatcaggggggacatctgtgctttagatcctgaccccatggagtcggagcctgcctgtgcccgcaggatcatgccagggcctcagtgcttgggtgggggccatgcatccagttcagaggccagcatccagggagggtgccaggtcgctcggctgttcggatgttgtcacaggggaacctgctggcttccgtccctgtgaatgaggcttcatgtcaggtacagtcttttggccaggaatgagggcatgagcgagtgagctgccaggt

SEQ ID NO: 393558 - DNA, 599 bp, Homo sapiens
tgaagtgtattcttaataagctcatgttggtaataagattcctcatttttttgcctttggaaatcatttagtgcatcctcacttattcaaaatatgttagtgaagtatctaattattggttgaacagtaacctctcagcactcttacttatttctctgttttctagctgaacacaggctgtggagactttgctctcaccttcattgattctccctgcttttctctctcatggttttaaatatttttttcttttctttcatgttacgcagtttgacttttatttctgttgagtatttttagttggtggtcacttttaatcacaatacacttcagcattcaagggttcctatctgatattcagtttcagaaatgtataaatatttgttattagtgtgatttgttatttgtatgtaagctagtgaaaccaatgtgtttgatttcatctcattttattctttgtacatgtacaatcatatttgtattgtgatcattttgtttttctgtagttcttttatttattcatctcagtattctagttcactaatcctgttgttattaacttggtttaataattaaaccatacattgtatattaaattt

SEQ ID NO: 393559 - DNA, 164 bp, Homo sapiens
tgtacttttgatgctgtttccatgcctaatacacagcagggataatttctgcaggctgcacaattggcctaaagtcatactgtcattctgatggtatacctgtttaattatcatcaccaacagtaataggaagccatgaacactttggctcctatctttttagc

SEQ ID NO: 393560 - DNA, 260 bp, Homo sapiens
gcgaagaacaaaggtattaatgtgtatgttgtgtttagaaaaatgcagaaagtctaaatggctgaaaagtaaaatgtctgtgaagtgggagagaggataaatgatgctgctagaaaaagatcaataacagattatgaagggcgctaagggtcatattccttttgatactgccaagtaaatatgggtttttagcctgaaaatgtgatcagatctatgtttcaaaagatgagtaatgagagaatggaaaacagactaggcag

SEQ ID NO: 393561 - DNA, 301 bp, Homo sapiens
caatccttctgcctcggcctcccaaagtgctgggattacagacgagccactgcacccagcccaaactgtacactttcttagtgtattttcctgtatgtaaattgtacttcagtttaaaaaaatttaatcctttaaacccatcagtttatgataaatgtaggaagtgaaaaattccagataagtagaatgtagcgataactcttcagactattatcgttacttcttccatattactagaaataaagctgcaatatattccaatcctagatggcagatattagcatttgaccttcttatttga

SEQ ID NO: 393562 - DNA, 823 bp, Homo sapiens
agaagattctaggtggcactcagggctcagctaagctgggagactggatttgcagtgaccccagttcttcgaggcccagttcccccatcagcccggtgctggagtggagacagcctgtgactgcgttgtcccagacagtggtgctgacaagggtgcaagatggtgccaagccaaggggaagaggaagttgagggctgtggtggaatgtcaagggtgtgatagggttgtctgtgatatccagtggggtagagatagatgggaatctgagggggcggacagtgtgcaaggaggggagagtcaggggctgaaaaatctcaggacagatgtaatggaggcgagggcactggctgactttctctccaaacccttcctttttattggcttcctcttccactgcctcccaggaccaaagccaagaccagagacccagtatgttagagtcttcttcaatggtgcctgagctcagaagtcactagaacagtgactttgttttttctctgcttatcagaggggtaggttagctgggagatctcttcctgtagcaggtgtccaaccttagagaaaatgagtggagtcaatagaaaaaaaagcatattttcacaccaacactagtacacaaatgttcatagtagctttctttgtaatggcccagaactgaaaacaacccgtaagttcagcaacaggtgaatgaatgaacacactgtggtgtttcctacaatggaatactattcagcaattaaatggaatcaaacgaccacacaccacaatatggaaaaaagcacgaaagtcagacagctgggtgctgtggttcacactgtaatcc

SEQ ID NO: 393563 - DNA, 434 bp, Homo sapiens
aatagtatattaacttaaacatacttggtatgtaaaacatacatattgcataacaactaaatatgtaactataaaaatcaaaagtgatgactaaagataaaaattttgcaagaatataacattaaaaggctcatggataaaaaatggtttggggccaaaatgaaaaaacaaggccttgctaaaaagcagaatgatactaaacttgctaaaaagcagtatgattaaaaatactgcacttgcagtaagtttcatgaatgcaagaaccttccttatctgttctgtttacttcagcacagtgactgaaacagtaggcatacaataaatatttgttgaacagcaaaagataaataagaaactgatccttgtcttcaaacaccttacttaggagataaatttttaatcacaattcaacattaaccagtgttataatacag

SEQ ID NO: 393564 - DNA, 466 bp, Homo sapiens
acccccagtttacaacagctccagttacaacagctcaagaaggtgatgttacaacagctattgtgtaattactttcattgtggctatttctcaagatgaaatttttattgttctaatggatttcatcagaaatgtgtatacggatctgctgacagtagtagtattttgttttaggatgttgtgacttagcaaaaataatacagatgtcttccccccttttgtagctttgactgagctgttgtaacagctgttgtaactggagttacaacagtcacaaagaataaaaaacgtctaaggggaagtctggaatacatcaagaacaatgtattcttcaagactcagctcaaattctatcttttatagttcattcccatctttccattttccacattttctaaaatactattaaactgtctttattttaatagtaatttacttctaagtacaaagctgcaattcagtttac

SEQ ID NO: 393565 - DNA, 328 bp, Homo sapiens
agagtgacccagcttccatgggctgggtgtttcctttgggacatgcgctgagtgaagtattttacaggtcttcgtgcagttagtcctttcagtgatcccatgaaagaggtatcattatcttcattttacaggtgagcaaacagaggctcaaagaggctaagacatttctctgaggtcacacaggtagaaagtggtagaatgttgagcccagatctgcctaactcccaggtcgatgctcccaaccatcagaacactctgcttcctcacccagtgaagaagctgggagaggaatagccgaaggggatagatgatgaggccacccacctgc

SEQ ID NO: 393566 - DNA, 889 bp, Homo sapiens
atgggggaagaggcttatttacttctgtgtactttgcctgcagtcacagttttaaaaagaaatcccaactgagttgaaaaactggccatgttactgtctcaagccacacctccggggcacttatctgccgagtccaggtgcacagcagtgtgacctcatgttctggcctgatagctcctctcaagggcttcttcaagtaagcattcatctgactttttactcagctatgtcttcttaaaatacaaggaaacaacttgattacaatagtcaatcccaaagaccgtaggccataagacccccatttcaaacagacaccgtcactagtttcattcattgttatgtatttatgagataaaggctatacacaagggaagaccaaaagatggctggtttttccatttgttgtgcacttacatttcaggcactgtgctatgcatttcacacacgttgttcttttgattctcacagccacacccaagaagtaaatcctattatgatctccttgttactcatgaggaaacagttttagagaggctcgtttcatattaatgttacccacagactggtggaaatctgagactcaaacctgggtcaggttgactgcaaaggcagacctttaaagaaatgcagacatctaggtatgattacatactatgcattaagaattaagctttaggccaggcacgatgtctcacgcctgtaatcccagcactttgggaggccaaagtgggcggatcacctgaggtcaggagttcgagaccagcctggccaacacagtgaaaccccgtctctactaaaaatacaaaaattagctgggcatggtggtacacgcctgtagtctcagctactcgggaggctgagacaggagaattgcttgaacccgggagac

SEQ ID NO: 393567 - DNA, 455 bp, Homo sapiens
atgggggaagaggcttatttacttctgtgtactttgcctgcagtcacagttttaaaaagaaatcccaactgagttgaaaaactggccatgttactgtctcaagccacacctccggggcacttatctgccgagtccaggtgcacagcagtgtgacctcatgttctggcctgatagctcctctcaagggcttcttcaagtaagcattcatctgactttttactcagctatgtcttcttaaaatacaaggaaacaacttgattacaatagtcaatcccaaagaccgtaggccataagacccccatttcaaacagacaccgtcactagtttcattcattgttatgtatttatgagataaaggctatacacaagggaagaccaaaagatggctactattacccttcctttacactccacttcagcactgtcctcgcaccggtatcctctcctcttcccac

SEQ ID NO: 393568 - DNA, 270 bp, Homo sapiens
cccagacggcccatgacaatgagtggcgggacaagtctaccagagtttcaggcccctgtgctcccaacacccccagcagtggccatcccaagtccctctcagccatcaggaacccacccaggttctctgaggagggtccagtttggctcctggttcatgatctgctgcccttgtcctagggtagacacaggctcaagatggcgaaaccccatctcttgtccatgacgagatgggccagtccacatcacaggctcaagatggagacacagg

SEQ ID NO: 393569 - DNA, 360 bp, Homo sapiens
taaaactgaggctcagaacagctggtagtttgtgaagctaagacttgaaatcccacgtctgggatgggttcttactgaaacagacacctccagtcctgctgctgtgcctgacatttgctgcttctctacctgggataaggcactggagttagaagcatggagtccacggatgagaagagtaagtttcagaaatccctttcaggaccccatcgtccttccaagatggagctgcttagatctcctccctatccttgctgtacatgcccaagattttgtgaacatgatgtgtgcgatttcaagagcaggatctggagcttccttctggtatctagactcatgatagatgctcaatacatgttg

SEQ ID NO: 393570 - DNA, 198 bp, Homo sapiens
tcagactcttccctcccttaatctatattcagccaactccactttcaaaccatgaggtttcttgctactgtttcagcctcaagagaaaggcaaggtgtgctcatggtagctttccccttgacaaacaggaaatgttatgggcaccattgtgtcctccagggtgagtgacaagtggtaattgtagtgcctctccttttc

SEQ ID NO: 393571 - DNA, 275 bp, Homo sapiens
gcaaaaatgcaaagactgtaaagatctctaaatatgtagcttcaatatgtagctattttatgggttaggatccttgcataaatctagataaaattttcaaaatagacattgaacacacacatagttctttccaacaaagaaaaaaatttccaaatattcacttaggtgtttcaagagagctgtaccaatacatcctagcatatacatccaaccactatagaaagattggtaaagtgcacacaggaatttgaccgaggactgttatgttcactatg

SEQ ID NO: 393572 - DNA, 349 bp, Homo sapiens
ttatacacgtgatctacatagaacccaatgatggggatgatactgtggcctgtacctcggccccctgcctgttgccctgtgcgtagatgctcaggcagtatggcttcctttcttcactcattcattgcacaaacagcatgcagggctctgtgccaggtgctgtaggggatgaagaggtagatgcggccctgctctgcccccgcagaccttacaggcctgcagagcacagaagacaaagacacggatgagttcaatataagggacgggtgccaagcaccaagccagcagcccaggtagagagaaggcccatttagctgttgggatggatcagggaagtcttcatggagga

SEQ ID NO: 393573 - DNA, 490 bp, Homo sapiens
cagatgatctgtgggctctctctgtgagaattacatcctccacaacccacaagattttagaatttaagtaagttaagccataaactagattccagttgacaaggattctctgaatttacagctctacaacgagtgaaaagcaagtgagttaatttattattttattttgagatggagtctcgctctgtgcgatcttggctcactgcaacctctgcttcccaggttcaagcagttctcctgcctcagcctcccaagtagctgggattacaggcgtgtgccaccatgcctggctaagttttgtatttttagtagagatggggttttgccatgttggccaggctggcttgaactcctgaacctcaagtgatctgcctgccttggcctcccgaagtgctgggattacaggtgtgagccactgcaccctgctggttatatttttaaaaggaaatttttttgagtccaccaaatggaggacatgtattatctatta

SEQ ID NO: 393574 - DNA, 762 bp, Homo sapiens
gaaagaaagtctttcaaaaaataaatgtagtatagcctaagtgtacagtgtttacaaagcatagagtactggtcagtagtgtcctaggccatcacattcactcaccagtcattcactcactcatccagagcaacttccagccctgcaagctccagttacggtaagtaccctatacaggtgtaccattttaaaaatcttttatgacatatttttactgtactgtttctatgtttagttatatttagatacgcaaatacttgccgttgagttatagttgcctacagtgtcagcacagtgatgtgctctatgggtttgtagtccaagagcaataggtcatgccatacagatgaggtgtgtgccatctagatttgtgaaagtacactctgtgatgttcacataggatgaaatcacctcataacacatttctcagaatatatgctcattgttaagcaactgataactgtagcaccgttgaaaaccatagatgaagagaaagagagaaaggcggaggttgcagtgagtcgagatcacaccactgcactccagcctgggcaacagagcgagactttgcttctaaaaacaaaaaccaaacaaaaaaagaatgacagctgtgttcttaacagaaataatggaaaccaaaagtctattgaaatttaagtcctcaaagaaagttactgtgaacccagaattctgtatgcagcaaaaatgtccttcagaaaatacagttgaaataaagatactttcatataaacaaaaacaatg

SEQ ID NO: 393575 - DNA, 348 bp, Homo sapiens
agggctgcctggatgcccgtgggtgctggtgataggaaaagtgggtggtttaaaagatgacagagtcagtgaactgctggggagagaagacacatcaaggcttttgctataggtcattgtcctgaaaaccttaagagtactagagtagaggccaaggagtaggttacagatgttaaatgacaacttctagtgaactggaaaatttaataccttatatgttcatttttttccccttaacattaagagggttgtacatttcacttagcaaattaagaaagtgggaggggatttgtaacacaaaccagaactgttttatatattaaagctgaagaatatataggattgatg

SEQ ID NO: 393576 - DNA, 120 bp, Homo sapiens
tttgaacgttggaaattatttcacaaaatgatatcttgttcctcagccagtcccgtccctagtaaatcatcttgggtgtgtgttattgttgttgtcattcttaagctacttaccatttct

SEQ ID NO: 393577 - DNA, 183 bp, Homo sapiens
tctaacaggcttactaccaggcaggtgattctatttttgccaaaaataaatctacgatcagagatggaaagtaagttttcttttcttttctttcttgagacaaggtctctctctgtctgcactctgtcacccaggctggagtgtggtggtgcaatcttggctcactgcagcctcgacctccaa

SEQ ID NO: 393578 - DNA, 338 bp, Homo sapiens
atcctcctgttgttccttgcaacttcctgatgagacatcgccatgtccacactggaaaggaagaacatgaagctccgagatgacagctggctctgacctcaggcaggaaagtgggaaccagtgggccctaaagcctccatccagccatcggccctaaaggacagtccagcattccacagtggacacaaggacctcaaaacgggggcagaaatcaacgactgcctgggaggacaacgtaaagacccgtggggttttgactaagagtgttgaatgattaggatgtgcaacaggccacacaaacggcacccatccaagactaagctcctgccatccttcca

SEQ ID NO: 393579 - DNA, 246 bp, Homo sapiens
catacaaaatatgaacactcaaaagctggatgtgatggcatatgcctgtagtcccagccatttggggaggctgaggcagaagatttgcttgagcccaggagtttgagttcagcctgggcaacatagagagaccctgtctctaaaaacaacaacaacaagaaaagaaaacccaaagagccagacggttgacccttaataccctcttcgttggggagagggaactgggagatataggggtaactgatt

SEQ ID NO: 393580 - DNA, 547 bp, Homo sapiens
aagatatttgaggttttttggggggccatttttagtggctctgatatatccaagctcttttagacactttagaatgaagagctgttctaatgttccaaaatctattcgttggtcaaaacatttggtagcatatgaagctttatacagactagggatattggaaaagaaatgtgacttttaaaatgacacctaaaacatgcattcggtgtctggtctgttaactaggggccatctgggtcaataacaagttacctcatggagaaaatgcaataggaccaaacaaggaaggaaataggaagtaactcagtctctcttgggtttaatgctaacctgctaaggtcaggcaaaatttaagtggatttagaaaccataaaaccttctagtgagatgaatgcagtgacaaaggacctttgaccagagagtcaactcttcattattcggactttaaagccatctttttggaggtgatattgtattaggcaatccgttatttactagacattgcagagcaccccttctagatgatgaggcggatatagggggagtg

SEQ ID NO: 393581 - DNA, 253 bp, Homo sapiens
ccacctcagcctcctaaagtgctgggatcacaggtatgagccaccgtgccctgtctttttattttgaccccctcttggctctaacagcacacgtgtacctctgttacaggacatcagtctacagtgctacctctttttatagtcatttatctcactaacctgtgtctttctgaaatgccagacccatgttcacttttgaatctacagtaccttctactgaaatgtagtagctggctcagtccatgtttataac

SEQ ID NO: 393582 - DNA, 503 bp, Homo sapiens
caggaccatttcatcgagtgagtgctggtgcaagttatgaaaatcccaactcagattggcttaagcaatggaaactttttggttcagataatggaagagttcaggagtagttctgttttcagatctggctgcatcaagaggcttatgtgatttttgcacattgattttgtatcctgagactttgctgaagttgcctatcagcttaaggagattctgggctgagatgatggagttttctagatatataatcatgtcatctgcaaacagggacaatttgacttcctcttttcctaactgaatactctttatttctttctcctgcctgactgccctggccagaacttccaacactatgttgaataggagtggtgagagagggcatccctgtcttgtgccagttttcaaagggaacgcttccagtttttacccattcagtatgatatcggctgtgggtttgccatagatagctcttattattttgagatagggaaaccatggcgaaa

SEQ ID NO: 393583 - DNA, 612 bp, Homo sapiens
gttagctttttttctcagatgatttaatgaaaattatggcagtctgctcattgttcagcaaaatccatttcctcttctccttgaacacaaagcttgactatgtttcctagatggcccttgcagttagttggggccatgtgactgggttctagcttgttgattataagtggaagtgatgctgccacttaaaggcttgaaagtgccactgcatactgactgagatgcagtggaagccctgtgtttatgaggtggaccccctctcaggctgaaatgtctcttaagagtcatttcagcaacctatttacttgcccaccaagagagaaattgtgactaagaaacttttatggggctgtgccattatatgcttgtatccatttgttactgtagcctatgctagtaactaacacaataataaaggtttttttcagtcttagttttctattcatttgtagaccaattgtaaatgtgaatattgtatttccattgtatcttggcttacatgttcaaagcaccataaaacagataaaaggattatattaacaagtacttaatgtagaaaagatcagtgcaagggagtctatggaataacatgcaaatatgtctctttccccc

SEQ ID NO: 393584 - DNA, 575 bp, Homo sapiens
gtactgtgtacatgttacctattcaaataataacttaaaaagaaaatgcgtaacagtgaaagagaatgaaaagggaaaaataattctcttagttttatacaagtaatatcaaagtttaacatttataaacatggtgaatgatttttaaaaattttttcaacctctaaattctatactatataacttataaaaatatggtttactacaaaaagcttggaaaaaaatagagataacaatttatataatttacatatcaaaatgtctctctgcccaaagcaataccctttgtcagaagcctttttaattagtcctagcaatttgaaataacttttaatatgagctattattaagatgacattaatataacattactagacacactctgttaacagattacaagaaatcagaaggagatatctgagaggaaagaacctaaaggttctgtatatataaatacagccttgcaaaggtacacagtattttttagtaaattttctgactaaggattcaatggtgcatgccagagttttaactaaagacttaagcataatcggaggggggaagaaaactacaga

SEQ ID NO: 393585 - DNA, 133 bp, Homo sapiens
aaaaaaaaaaaaaaaagattcataaggaatctccagggacccaaatcgccaaaacaatcttgaaaaagaagaacaaagttggacttcttacactttccagcttcaaaacttactacaaagctataataatcaa

SEQ ID NO: 393586 - DNA, 301 bp, Homo sapiens
cacacacacacacacacacacacacacacacacacacatatgcacgcacacacacaagcacacacacatttcttcctacacaccatctccttgcgtgtcttagcagcagacaggtatcagccccagacctgaggcagacacttggggatctggttcgggacagggcagacaggcatttggtgcatggatcctactgacctcccagagataactagaaacaaatgtaagaactgctgcctacaacatcttttggccttgggtgttaggtgccacatgctattgaaacttctaaaactaggct

SEQ ID NO: 393587 - DNA, 342 bp, Homo sapiens
cctcagcctcctgagtagctgggactacaggcacatgccaccatgctcggctaattttttgtattttagtagagacggggtttcataatgttgcccagggtggtctcgaactcctgagctcaggcgatctggctaccttggcctcccaaagtgctgggatcagaggcgtgagccaccgcgcctggtctttccttcctcttaaaacatgactcagaaaaaatgaaactccttggctggcactatccctggaggggctcagcaagagcactgcagaggcggagtactggggccagagattgaatttctctggcactgtcatggagctcccctgggtctcagttt

SEQ ID NO: 393588 - DNA, 302 bp, Homo sapiens
tagctaatttttgtattttcagtagagacaggatatcaccatgttggccaggctggtctcaaactcctgacctccagtgatctgcccacctcagcctcccaaagtgctaggattacagacgtaagccaccgtgctcggccagagcttttacttttgcccctttaaaatagcagctctctttgaaaagtaaatatatcacataagcacagttggcttgtgggtaggaaatgatggttgaaaaaaatgtgtgatgaaaaagtccccatagttaccctaacctcaaattcagaaattctctgaca

SEQ ID NO: 393589 - DNA, 173 bp, Homo sapiens
ttttggcagaattcacctcaggctacagtgggtttttttggggttgtgtctttgttttgttcttttgcttttttcttagaaaaggtctcactatgtttctaggctggtctcaaactgccaggcccaagtgatgcttccacctcagcctctctagtcactgagattacaggcat

SEQ ID NO: 393590 - DNA, 194 bp, Homo sapiens
tagtcaggctcggccctccttctgtggtatatttgtcttctaagtcaagttgaaatgactatttaattacgctctataattttaacctgctttgtaacagtctcatacaaaggtgcccctatgatatgctcaggtaattatctcatcaaccctcaaatggcaagtcaacctaatttccacactaattttaggag

SEQ ID NO: 393591 - DNA, 231 bp, Homo sapiens
ggaataaccgtgtgctggtttaagccactaaattttgtgagtaatttgttacacaacaatacaactattacaagatgaaacagcccagatgtcagatttaaataacctgccccaaatcacacaatggaagatttgaacccccatctacaaggtgatttgctttactgctcagtcctccctcttggcagcctctggtacaggtgaacactggactgtgggcctctgttagac

SEQ ID NO: 393592 - DNA, 3923 bp, Homo sapiens
gccgctccgggtacctgagggacgcgcggccgcccgcggcaggcggtgcagcccccccccaccccttggagccaggcgccggggtctgaggatagcatttctcaagacctgacttatggagcacttgtaacctgagatatttcagttgaaggaagaaatagctcttctcctaagatggaatctgtggtttgggaatgtggttgatcaacttgatatgttggccaaatgtgccccatgtaataaaatgaaaagaagagacaagatgatgtcattttcccatattgtgaaaccaaaaacaaacgccttttgtgagaccaagctaacaaacctctgacggtgcgaagagtatttaactgtttgaagaatttaacagtaagatacagaagaagtaccttcgagctgagacctgcaggtgtataaatatctaaaatacatattgaataggcctgatcatctgaatctccttcagacccaggaaggatggctatgacttggattgtcttctctctttggcccttgactgtgttcatggggcatataggtgggcacagtttgttttcttgtgaacctattaccttgaggatgtgccaagatttgccttataatactaccttcatgcctaatcttctgaatcattatgaccaacagacagcagctttggcaatggagccattccaccctatggtgaatctggattgttctcgggatttccggccttttctttgtgcactctacgctcctatttgtatggaatatggacgtgtcacacttccctgtcgtaggctgtgtcagcgggcttacagtgagtgttcgaagctcatggagatgtttggtgttccttggcctgaagatatggaatgcagtaggttcccagattgtgatgagccatatcctcgacttgtggatctgaatttagctggagaaccaactgaaggagccccagtggcagtgcagagagactatggtttttggtgtccccgagagttaaaaattgatcctgatctgggttattcttttctgcatgtgcgtgattgttcacctccttgtccaaatatgtacttcagaagagaagaactgtcatttgctcgctatttcataggattgatttcaatcatttgcctctcggccacattgtttacttttttaacttttttgattgatgtcacaagattccgttatcctgaaaggcctattatattttatgcagtctgctacatgatggtatccttaattttcttcattggatttttgcttgaagatcgagtagcctgcaatgcatccatccctgcacaatataaggcttccacagtgacacaaggatctcataataaagcctgtaccatgctttttatgatactctatttttttactatggctggcagtgtatggtgggtaattcttaccatcacatggtttttagcagctgtgccaaagtggggtagtgaagctattgagaagaaagcattgctgtttcacgccagtgcatggggcatccccggaactctaaccatcatccttttagcgatgaataaaattgaaggtgacaatattagtggcgtgtgttttgttggcctctacgatgttgatgcattgagatattttgttcttgctcccctctgcctgtatgtggtagttggggtttctctcctcttagctggcattatatccctaaacagagttcgaattgagattccattagaaaaggagaaccaagataaattagtgaagtttatgatccggatcggtgttttcagcattctttatctcgtaccactcttggttgtaattggatgctacttttatgagcaagcttaccggggcatctgggaaacaacgtggatacaagaacgctgcagagaatatcacattccatgtccatatcaggttactcaaatgagtcgtccagacttgattctctttctgatgaaatacctgatggctctcatagttggcattccctctgtattttgggttggaagcaaaaagacatgctttgaatgggccagtttttttcatggtcgtaggaaaaaagagatagtgaatgagagccgacaggtactccaggaacctgattttgctcagtctctcctgagggatccaaatactcctatcataagaaagtcaaggggaacttccactcaaggaacatccacccatgcttcttcaactcagctggctatggtggatgatcaaagaagcaaagcaggaagcatccacagcaaagtgagcagctaccacggcagcctccacagatcacgtgatggcaggtacacgccctgcagttacagaggaatggaggagagactacctcatggcagcatgtcacgactaacagatcactccaggcatagtagttctcatcggctcaatgaacagtcacgacatagcagcatcagagatctcagtaataatcccatgactcatatcacacatggcaccagcatgaatcgggttattgaagaagatggaaccagtgcttaatttgtcttgtctaaggtggaaatcttgtgctgtttaaaaagcagattttattctttgccttttgcatgactgatagctgtaactcacagttaacatgctttcagtcaagtacagattgtgtccactggaaaggtaaatgattgcttttttatattgcatcaaacttggaacatcaaggcatccaaaacactaagaattctatcatcacaaaaataattcgtctttctaggttatgaagagataattatttgtctggtaagcatttttataaacccactcattttatatttagaaaaatcctaaatgtgtggtgactgctttgtagtgaactttcatatactataaactagttgtgagataacattctggtagctcagttaataaaacaatttcagaattaaagaaattttctatgcaaggtttacttctcagatgaacagtaggactttgtagttttatttccactaagtgaaaaaagaactgtgtttttaaactgtaggagaatttaataaatcagcaagggtattttagctaatagaataaaagtgcaacagaagaatttgattagtctatgaaaggttctcttaaaattctatcgaaataatcttcatgcagagatattcagggtttggattagcagtggaataaagagatgggcattgtttcccctataattgtgctgtttttataacttttgtaaatattactttttctggctgtgtttttataacttatccatatgcatgatggaaaaattttaatttgtagccatcttttcccatgtaatagtattgattcatagagaacttaatgttcaaaatttgctttgtggaggcatgtaataagataaacatcatacattataaggtaaccacaattacaaaatggcaaaacattttctctgtattcattgttgtatttttctacagtgagatgtgatcttgccaaagccaccagaccttggcttccaggccctcctgtagtgagttgattgtctgcacttgccttgcccaatagccagtaggctacagcttttgccccacacccttattttcagattctggatcattcttgtttacaactgaaatatatataacctcagtccaaagtggtgattgatttgagtatttgaaaattgttgtagctaaatgaagcatgattagtcttagtatgaatatcatttaatctttaaaaaatcaagtaaaaatgtttatctgataatgtttaaataatttacaatataaactgtaaaccttattaggcatgaaatcaatcagaagagaaagaaaaatgctggaacatgcttgatgtattatgtaaaaagcatatttaaacaagggtcctcaaccctgactgcagataagaatcacttgggttacttcagatgcctaacaccttcctctcatacaaataagaattggtagctttcttaaaaaaaaaaa

SEQ ID NO: 393593 - DNA, 2783 bp, Homo sapiens
gccgctccgggtacctgagggacgcgcggccgcccgcggcaggcggtgcagcccccccccaccccttggagccaggcgccggggtctgaggatagcatttctcaagacctgacttatggagcacttgtaacctgagatatttcagttgaaggaagaaatagctcttctcctaagatggaatctgtggtttgggaatgtggttgatcaacttgatatgttggccaaatgtgccccatgtaataaaatgaaaagaagagacaagatgatgtcattttcccatattgtgaaaccaaaaacaaacgccttttgtgagaccaagctaacaaacctctgacggtgcgaagagtatttaactgtttgaagaatttaacagtaagatacagaagaagtaccttcgagctgagacctgcaggtgtataaatatctaaaatacatattgaataggcctgatcatctgaatctccttcagacccaggaaggatggctatgacttggattgtcttctctctttggcccttgactgtgttcatggggcatataggtgggcacagtttgttttcttgtgaacctattaccttgaggatgtgccaagatttgccttataatactaccttcatgcctaatcttctgaatcattatgaccaacagacagcagctttggcaatggagccattccaccctatggtgaatctggattgttctcgggatttccggccttttctttgtgcactctacgctcctatttgtatggaatatggacgtgtcacacttccctgtcgtaggctgtgtcagcgggcttacagtgagtgttcgaagctcatggagatgtttggtgttccttggcctgaagatatggaatgcagtaggttcccagattgtgatgagccatatcctcgacttgtggatctgaatttagctggagaaccaactgaaggagccccagtggcagtgcagagagactatggtttttggtgtccccgagagttaaaaattgatcctgatctgggttattcttttctgcatgtgcgtgattgttcacctccttgtccaaatatgtacttcagaagagaagaactgtcatttgctcgctatttcataggattgatttcaatcatttgcctctcggccacattgtttacttttttaacttttttgattgatgtcacaagattccgttatcctgaaaggcctattatattttatgcagtctgctacatgatggtatccttaattttcttcattggatttttgcttgaagatcgagtagcctgcaatgcatccatccctgcacaatataaggcttccacagtgacacaaggatctcataataaagcctgtaccatgctttttatgatactctatttttttactatggctggcagtgtatggtgggtaattcttaccatcacatggtttttagcagctgtgccaaagtggggtagtgaagctattgagaagaaagcattgctgtttcacgccagtgcatggggcatccccggaactctaaccatcatccttttagcgatgaataaaattgaaggtgacaatattagtggcgtgtgttttgttggcctctacgatgttgatgcattgagatattttgttcttgctcccctctgcctgtatgtggtagttggggtttctctcctcttagctggcattatatccctaaacagagttcgaattgagattccattagaaaaggagaaccaagataaattagtgaagtttatgatccggatcggtgttttcagcattctttatctcgtaccactcttggttgtaattggatgctacttttatgagcaagcttaccggggcatctgggaaacaacgtggatacaagaacgctgcagagaatatcacattccatgtccatatcaggttactcaaatgagtcgtccagacttgattctctttctgatgaaatacctgatggctctcatagttggcattccctctgtattttgggttggaagcaaaaagacatgctttgaatgggccagtttttttcatggtcgtaggaaaaaagagatagtgaatgagagccgacaggtactccaggaacctgattttgctcagtctctcctgagggatccaaatactcctatcataagaaagtcaaggggaacttccactcaaggaacatccacccatgcttcttcaactcagctggctatggtggatgatcaaagaagcaaagcaggaagcatccacagcaaagtgagcagctaccacggcagcctccacagatcacgtgatggcaggtacacgccctgcagttacagaggaatggaggagagactacctcatggcagcatgtcacgactaacagatcactccaggcatagtagttctcatcggctcaatgaacagtcacgacatagcagcatcagagatctcagtaataatcccatgactcatatcacacatggcaccagcatgaatcgggttattgaagaagatggaaccagtgcttaatttgtcttgtctaaggtggaaatcttgtgctgtttaaaaagcagattttattctttgccttttgcatgactgatagctgtaactcacagttaacatgctttcagtcaagtacagattgtgtccactggaaaggtaaatgattgcttttttatattgcatcaaacttggaacatcaaggcatccaaaacactaagaattctatcatcacaaaaataattcgtctttctaggttatgaagagataattatttgtctgtgagatgtgctcttgccaaagccacctagacgtcgctttccacctag

SEQ ID NO: 393594 - DNA, 946 bp, Homo sapiens
gccgctccgggtacctgagggacgcgcggccgcccgcggcaggcggtgcagcccccccccaccccttggagccaggcgccggggtctgaggatagcatttctcaagacctgacttatggagcacttgtaacctgagatatttcagttgaaggaagaaatagctcttctcctaagatggaatctgtggtttgggaatgtggttgatcaacttgatatgttggccaaatgtgccccatgtaataaaatgaaaagaagagacaagatgatgtcattttcccatattgtgaaaccaaaaacaaacgccttttgtgagaccaagctaacaaacctctgacggtgcgaagagtatttaactgtttgaagaatttaacagtaagatacagaagaagtaccttcgagctgagacctgcaggtgtataaatatctaaaatacatattgaataggcctgatcatctgaatctccttcagacccaggaaggatggctatgacttggattgtcttctctctttggcccttgactgtgttcatggggcatataggtgggcacagtttgttttcttgtgaacctattaccttgaggatgtgccaagatttgccttataatactaccttcatgcctaatcttctgaatcattatgaccaacagacagcagctttggcaatggagccattccaccctatggtgaatctggattgttctcgggatttccggccttttctttgtgcactctacgctcctatttgtatggaatatggacgtgtcacacttccctgtcgtaggctgtgtcagcgggcttacagtgagtgttcgaagctcatggagatgtttggtgttccttggcctgaagatatggaatgcagtaggttcccagattgtgatgagccatattccatacaaataggagcgtagagtgcaaaaaaaaaagtcatatgcggccctcgtg

SEQ ID NO: 393595 - DNA, 404 bp, Homo sapiens
cttgcctctagtctgaagtataacctattttgtcactattttgctttaccatctgcaccattcaatctcagcttcgtatcttcaaggtcataagcacaactgtgtaagattattcatatgactaatatgttttttttttaattctcttaaacgtgacggtcggtccaataactttttaataattcctcagtgccttcctcaatactggaaaatcctcagaatactgagtaaaaataacaaaatatctttattttcaagagcaaaagattaaaggctgggcacggtggctcacgcctgtaatcccagcactttgggaggccggggtgagccactgcacctggcccaaactaaattcttaacagcaatattatgtaaatttttgaaaactttgacaaagggaaaca

SEQ ID NO: 393596 - DNA, 408 bp, Homo sapiens
tctgtcaagtgctgttcaatgagatatccaaggccatgggcagagctgagctcagagctcagagttcctggagtgtccacacctctctcctttgtgcttcttgcagctcctgtaccccttaccctggggcagccagtatgaatgcatgaggcacatgtggggactctgcttctgagttcggatactgcatgccatcaccattatccctgaatgttccagatgagaacactgagatccagagctgccgcccctcaaggcctctaggcagagaggtggagtggaggctaagtctgttacccttcagccacccagcactgctatgccaatgggtttaccatttcagtgcctcctcactggtctaagtgacagacactgacattcacacattctcagccagggtgggtggca

SEQ ID NO: 393597 - DNA, 171 bp, Homo sapiens
caacgggaaagaacaagtcttatgtctaccacagaaaagatgatctccacagaccatcaatatttatatatagtttataatacaattaacctaactggaggtgaccatggatttatagttggggaactagtaaacaccttcaaaattttaagtgtatatgactcaaaataa

SEQ ID NO: 393598 - DNA, 303 bp, Homo sapiens
gagatgccacataccccaaagtctccatgaagcatgaaggtcatgcttcccattaaaagagcgaaactcaagctcagggactgggagtgagggcagtgacttgacccaggcctcccaggtacaaagtacagggtggagcatgagggagcctgatatgaggcccccaacgagaacctgcacctcctggaccttagctttctggtctgtacaatggatggggctttcattctgctcgcccagggaagtcagagctagagtcataggaaagtttggtcggagttcctggggagagctctttccaca

SEQ ID NO: 393599 - DNA, 388 bp, Homo sapiens
tcactctaatcccaacactttggatggcagaggtgggagtatcgcttgaggccaagagttcaagaccatcctgggcaacatagtgagagctcgtctataaaaaaaattttttttagttatccaggcatggtggtgcacacctacagtcccagctactcgggagactgaggtgacaggattgcttgagcccacgaggtggaagctgcagtgagctatgatgatgccactgcactttaggctggatgacagagcaagactctgtctcaacaacaacagaaaaacagctcttctatcttctggatacaagatcctttccagatctatgattagcaaaaattttctcccattccgtgatttatcttttaactttgatagggccttgacactc

SEQ ID NO: 393600 - DNA, 390 bp, Homo sapiens
ataatttaaagtgacattatattattgactgggaaggaataacttaaatttttagaaattgtttggggccgggagcagtggctcatgcctgtaatctcagcactttgggaggctgaggcgggcagatcacctgagctcaggagttcaagaccagccttgccaacatggcaaaacccatctctactagaagtataaaaattagccaggcgtggtggtgggcacctgtaactccagctactcaggaggctaaggcaggagaatcacttgaacctgggaggctaaggttgcagtgagctgagatcacgccactgcattccagcctgaatgacagagtgagactccatctcaaaaaaaaaaaaaaaaaaaaaaagaaatttattttggaattac

SEQ ID NO: 393601 - DNA, 484 bp, Homo sapiens
aggaccgtatacacaggcatgtgggttcagtgccctgtgttgaacgttcttagccatgcggggaaagtggtccgagccaccctctgttcagaagggatcactcactgctatgcagaatgccaggcctccaagtagaagagctgggcctcccctgtagtacctgttaaaacagaagtgctcactgaattgctttggtgattactgctatcatgatagcacttttggttgaagggtcctacagcgagttccttaattggactttgttcaggaaagtgacgtgcagcccatgttgcggagtgtagcgatgcttggtgagagcactcattatgcgctgtgcacactcttaacagctggttgctcccggggtgctacgaggtgccacctggagaccacctcacctgctccatgaaggactgtgcccagggctccctggtgtccccttgtgtcagtggggagttgctcgccgtgcttgtgataaatgaca

SEQ ID NO: 393602 - DNA, 251 bp, Homo sapiens
ctgcttcctatttcccttcttcattattctagcggagactgtcaccttcttctacttggaccgtgcattactctttgatgccaggctttgtacgctttccccttctgcttcactctaccaccccaccatggcttttcatactgcctccaggcagctttattcaagacctatatctgaccatgtggctttcctgcctaaagcctttcccattttgtgttaaaaagtcaacttcacttttaagtaaattaata

SEQ ID NO: 393603 - DNA, 139 bp, Homo sapiens
tctccttgggcatgcagggaaaatgatccattccctgcacactgccatattctccttctcagacagaccagagccttgcccttgggtccttgcccttgagattagctaggacctcctcctcttcttctccttctttctt

SEQ ID NO: 393604 - DNA, 333 bp, Homo sapiens
gtttgttgttttcatgcttggcacaagatgaaaacccatggaattgtcattgtggtgttgctgagggtgtgatcgtcattactttacaattccgtgtacttgagcctttatcttctttgtgatgagttacaaaaatggaggagtcatatttgcgttttaagatcagtatcacattggcagtagtttggagaatgcaatgaaagtgtgaaagctagaataggaaaaagctgaggaccatcgttgagctgaggaccatcgttgagctgaggaccatcgttgagctgaggaccatcgttgggctgaggaccatcgttgagctgaggaccatcgttg

SEQ ID NO: 393605 - DNA, 357 bp, Homo sapiens
ttgttttgtggatcttcagttgcttcaggccatctggatgtctacgtgcaggtcacaggggatatgatggcttagcttgggctcagaggcctgacaatcactcccagcacattccattgatgagagcttagtcatatgaccatatctgctacagagtagtttaggaaatacagtctgtatctgagcattcttatgccaccaaaattctgttactacggaagatagaatgtattttgagggaataaacagcagtgtgaactgggtgctgtggcacatgcctgtagtcccagctactcaggagactgaggtgggaggactacttgagcccagagtctaacctgggcaatatagctagat

SEQ ID NO: 393606 - DNA, 406 bp, Homo sapiens
aacccaagactgatgaggctatagactggccactctcatgtaagtgtaatcacatatttaagagaaaaagctctacaatggtacaaggcttagcctacaatgatttgaaatcaacacaattattagcaatatatcagtgaagataacacagactgcagcttttctgaaattcctagggcaatagttattcttatacctcacacttatgaaaacagatccaaaacacaaatgggtaaagctgacatttgtgttagaataactgaatctcatttatttaaaaaagtaagtcatctgcaaactgggtaacaaatttcttatggtatctcaaccatcacaaaacatacgtttgctctaacagtgaagaaccactgaattatagcagacgtaggcagtacatggtagagag

SEQ ID NO: 393607 - DNA, 208 bp, Homo sapiens
tgactgacacagggttaaattaattcttttctttattactcaaagtgatacagacctttcttggactaatgtagcttaattagtggtcaattaaaactgaacattgctgaattgaagttctttgatcaaactccctggcatgggcttgctttctttaactagccaccatcttgaattcatttggaatcagtagtataaacaagttaaa

SEQ ID NO: 393608 - DNA, 578 bp, Homo sapiens
gctttaaaagaattagacattgtaatatacaacatgcctccaaggtattattattatacgggtggcggggagagaaacaaacagtgaggagaaaagctaccttaaaaaaacaaacaaaaacaacctcacaaatcttcatgtggctgcttcagtctatggtactacagctaatatttcctcctcacaatgtttctctattttttaactgtttcctaaagaacaagtattgctttcattttattttttacttattttttgaaatggagttttgctcttgttgcccattgcccaggctggagtgcaatggcatgatctcagctcaccgtgacctccgcctctggggttcaagtgattctcctgcctcagcctcctgagtacctgggattacaggcatgcgccatcacacccagctaattttgtatttttagtagagatggggcttctctatgttggtcacgctggtcttgaactcccagcctcaggtgatccgccctccttggcctcccaaagtgcttggattataggcatgagccactgtgcctggccaagtattgcttttataatagaaaattgtatct

SEQ ID NO: 393609 - DNA, 267 bp, Homo sapiens
gatgccggatttgaggcattcgtgcttactgtgtctgtctatggacttgccaggccaatatattgatcccatggatagccagtgaatgtttgatggagtagggggtgtgtgtactacccttgatcttattccaaattcagggatgaggcactatgaaaaatgtgggagggtggaataggagcaggatttggaatctcaaagtcttgggatgggaaatctcatgttcaattcttactagcagtatgaccttgaagcaagcccctgtct

SEQ ID NO: 393610 - DNA, 343 bp, Homo sapiens
ctatgtagttactaaggagggattcagctggtggaggagatccttgcgcaaatgccaggaaggaagcccttttcctcgcatttcagtgtttcctttgaagcctagtgagggtgaagtcttttggcataggtgctccaccatctgtctattcacatagactcttcccatctacctggctatgtgccacccttgttgtggacatagagtgggtagagagcagagaccactgcttcagtaactaaaaatagatggaatttcagatcctgacagagattctctgtggagtcgctaccactgctcctcatctcctggagttagttgcaaggaacagctgtttgtctga

SEQ ID NO: 393611 - DNA, 247 bp, Homo sapiens
agactggcaattgggaaactcttggtgacctctgctacaggatttttgctggtggtggtcaggcccaaagactaaaaatgaagaggaagcagagtcacgaaatgtagggagggaagaagctaaagcagcaactagtcggaaacacagatctgagggaaggtttcctaaacacagaggcttgagcagagttagaagctatgggaaagtaacccttgaagagggagagggtgaaaatgagggaatatca

SEQ ID NO: 393612 - DNA, 140 bp, Homo sapiens
gcagagagagagttggcctgggtacttttcctctgtcgaagcccttattaggggtgggccgttggaggtggcggtgggttcattggcctcctgtctgcctcccgcgctgacgtcagctccctagtgcaggcccttgtgtg

SEQ ID NO: 393613 - DNA, 550 bp, Homo sapiens
gtaggacaaatttagttttgtttttacatttgaaaaaacaaaaaataaaataaaagatatgcctgtgtgatacattaataattcattgcttattatcttagggacatttaatatgaaaataacatatcctaatttgttgtcatatgcatgttatttcttgttcatgtaaataattcacacaagaggaaataataaaagctttctacactaattgagatcatttgaaatatgaacttaaggctgtttctatttgtaaataagttggctaaacactgtgtaaaaggtgataactagggatgcaacaatagatctgaaatgaaaagaaatccatcgtcaaggattttacaagaataacaaaagagaaagatgttcacaaataacttacaaaggcgaaatgtgataaatgctatacaagtggcagcaaatttcagaggaaaggaggataaatgtttattgggagaaatctaaaatattgttcaatccatttgggcattaaagataaggaatagacctttaacaagtaaaaatgaggaaagagcttttcagcatg

SEQ ID NO: 393614 - DNA, 335 bp, Homo sapiens
ggagaatcgcttgaaactgggaagtggaggttgcagtgagtcaagagtcgatgccattgcactccagcctgggcaacaagaatgaaactccatctcaaaaaaaaaagagagaatgacaatgagcagtccccattggaaaactatgaagaatttcaagacagcaacagcagagcattaaatggagcacagggaccctctgcccacaaggccctgggcagcagcccacaggtcgcacgtctgtgttgccgcccctatgggtccctccgaaactatgccccaaggagttaaagacgtcagggactaacagaaattcttgagtttgcgtgcgatgaagc

SEQ ID NO: 393615 - DNA, 215 bp, Homo sapiens
tcagtcctcacagctgcccagggagggacctttctagagaggaagccaggccctggccttcagtcccatgtccaggttctcacagctagtaatacacacacagctagtgctctcacagctagagcacagtcaggatttgaactcagggctacgtaatttcaaagtccgtggcacaaaggactctgtgagctggatggctcctttcacaactgctc

SEQ ID NO: 393616 - DNA, 405 bp, Homo sapiens
agacccaagtttcctgaggctgtacaagtcccagaaataatcttaaaaagagatcaagttatgatctgaaaagaagacagtctagttagccctgcctccttacatgaaatttatttaaaaccaaaattacaagatttggagcacaaagcccattgtctgctggaaatgttgttttttggggagaaatccattgttttaaaatctagtatagataggctctatttagtacctgtccgcccatgacaagatatgtacatttcacggtagggaagcctcattattgaattcagaaatacatgaattgacccacctggcctattctggtttgaaatagaaaccaacacagaaatgatcaatcttaaggggtaggataatgagacatataactagcatacagccacagcc

SEQ ID NO: 393617 - DNA, 418 bp, Homo sapiens
ctccaagctgcttggtgtgcggtaatttaatgactatttgcggttcttctgttgcatagcagagttgtatttcttgtaataactcacaagtattgaaactagggaatcgtacaaatcatcgtttggcccttgggccataaatttaaaggttaaaataacagtaaaatttctatttaatgaccacctccttttaaaaatcaatattggtttaacacctattatgtgcttagcacagaaatctatccctcaagataagcataacataaaggtttaagcaaatcagccgtagtgaaagacctaataaacttgatacgctatctctgatgaccattgaaaaagtttaaactttggtaataatctggtgttggatctgctatgccttgcgagattaattttgttctggaagatcctgttttcc

SEQ ID NO: 393618 - DNA, 473 bp, Homo sapiens
aagtgcctagcgctccctgatatattaaatataagactttcataaaaggaaattccaatttcttcttaaattattttaaaaacagaatggccttctcaatagttaaatgtttaatgcaagcaacatgcttagaaggaagaggaggaagaatttgtctgagtaattcaaaaggccagaaagagctcagtcatttgtaatcagatatttcaatacttgcaaggctttttactttggcatgatgaatggccataaaaaactatacaccttcatgtaaaagacgttggcttcctctgctctttacataatcaatttgacatttgaattttggcaaaggatcgcaggtaccttgctttatttattacctgagattagataaaaacatcactgttatcaagccataccaggcttcttcctaaaatcatgtgcaatttttcaagtaaggatcactttgtcctgacatcgaactctcccaa

SEQ ID NO: 393619 - DNA, 377 bp, Homo sapiens
cagcaagagtcttcaacagaaaaattgtaaggaaaagaatgagggggaaattggtcacttaaaataagtttaaaaggcatgcaaaaaatgggaggactgaaatgcagcctctgacgatacacgcgtgggtgatgacatcataaacacacacaaggacacaaagactgtggagccaggagtctgcttacttttggagggaggtgggtggctacaagcagaccagacacatggagtggggtgcttggcaaagttctgtgtctccacctgcatgacggttacctggatgttgcccttcccatccctcccaacgcagagcatctctttcgtgtggtgttcagtgcccatgctttattttacaatacaaagcttttctttta

SEQ ID NO: 393620 - DNA, 353 bp, Homo sapiens
caattttactgtatagcactgaggaacttgcatccacatcagctcatttgaataaacatcaatcattaccctaggcatgaaataaaccatgtatcaaaaggaagttaactaaaaggtatactcatatataatcatcttaactaagtaaggatgactaaaactttgaacacacacaatggaagagcactgatattttgccaaaaaaagttatcaggagatgaggctcctgaggtatagattagcagtgatttcttataggttttgttacacattttctctaaataacaaagaaggaaagtttgcaaccttcttcaaattctacaaggacaattactagaggctctaaatactca

SEQ ID NO: 393621 - DNA, 465 bp, Homo sapiens
atgtctgctcccatcatcttccagcgggtgggagcctgtgtctgctcgcatctcccagggtgcatgtccatggggcatgtgggctctgcactacctccagctgaccatggcattcagttgagaaaccccaggccccctagggtcactgagacatggatgtgtggggacaaaggggcctggggaacagttggcctgcgttcggtgccttggggcactggaaccatatttctgaaagtaggatgtgttatttctcactagagccttcctcagtggggaagtggtgacactgtgtccggaactggtgggttcttggtctcaccaacttcaagaatgaagccgcagaccctcgcggtgagtgttacagttcttaaaggcggcgtgtctggagtttgttccttctgatgtttggatgtgttcagaatttcttccttctggtggtttggggtatccctggttcaggaatga

SEQ ID NO: 393622 - DNA, 577 bp, Homo sapiens
caaatgttttctccaacttcccaccacccaaagcgtgtgtgtgtgtgtgtgtgtgtgtgtgtgtgtgtgtgtgttagcatctatgtagcccttctccttgacagtaactcataccactaagcacatacgtgtgtgtgtgtgtgtgtgtgtgtgtgtgatcaaaaatctaagggaagaaagtggcttccgatggagggaagggcggagtgctgaatgctgctgagaattaggaacagtgagatgaggacaggagagttcctgctggctgcagcaatatgggatttttctgtggattggcattcacaatttaagtgcaaaggtcaaatgaaagccaaattgaagaggaatgaagactcagtagggatagggaagtaaacatttatgtgtaggtagatttccagaagtttgattgtgaagatgagagaatagggctggagaaaggtttaagttggatgtattggcacacatttgttgaagaatctggcagtagcccagttaaatagccccctcctgactaggtcatgttagcttgatcgaaatgtagttcaggcaaaaagtcgccctccagcgtgaacag

SEQ ID NO: 393623 - DNA, 184 bp, Homo sapiens
aggttaggtggaaaagcagaactcttctgaactgagtggggagccagggcaaccagagctaagggagctgaagaggaaggggtccctttcagagttggagctatcatgggagaggctagagctaaggcagctggggagatgggaggccctattaggtttggtaggaaggttggggcttcagggg

SEQ ID NO: 393624 - DNA, 477 bp, Homo sapiens
attggatctgggatagctctgctgcaaggattgaaacttctaaaaccaattaagtctaccttttttttctatttcattaatttttgtctcccacggctccatcattcattgaatctaacaagatgctggacttaaaagaattagtcctttgtcctctctacttgactgcttcccttattcttgactacttccctcatttttacttgtagttaaagggctagaaacaagacaaaaattaaaccaattattttatgaaatttcttttaaaaaattcactcattcaggaaagttaactctcctttctcccagactattccaaagttgagtcaaaagagaaacacggctgggtgtggtggtggctcacgcctgtaatcccagcactttgggaggccggggcgggcagatcatgaggtcaggagatcgagaccatcctggctaacacggtgaaaacccgtctctactaaaaatacaaaaaaa

SEQ ID NO: 393625 - DNA, 222 bp, Homo sapiens
cgtgaggtttcattgtggcaccagggaagaagaggtctctgcatctgggagggccccagaggaagcagcaacattcctgggtttcagcggaggaggatgggacatgagacacagcagatcctgctctaagctggcccctgagcagtgccagaaacacatgacatgtccagctggccttgcttctgaaacgcctgtggtttagcagcagaggcagagaagaga

SEQ ID NO: 393626 - DNA, 359 bp, Homo sapiens
gttaatgagtacaaaagacatgttcaacctcactagaaatcaaagaaaatagactcaaatacctttatatctttatgcacacacaacagcaatgagtgcctaagtccaccaagacatacacaagaatgttcctattagtaaaaaactgaaacccaaaggcttatctaaaataaacaataaatgatatactgatacattcacacaatggagtagcatacgatgacgatgaaaaagaactacaccttaactgactgctttctccatagataaatttgcctgttcttgaatgttacatacatatacttttttatatctgttttctttcagtgaagattacgtctgtattatttactcatgtt

SEQ ID NO: 393627 - DNA, 342 bp, Homo sapiens
tgaacgttacagttgtggaagactcttccaacaggcaacctttgggaagtctcaggcacttcccaacagcctggccaagccactctaaaaactacactgcagggtattttcttaaaggaaacctgaggcacacctccacagctgccacaggtaattattttctcaacatgagaattctatagtctccttcccagggatccaagtctggttcccagtaatctgtgagctgaagtgggagaaaggactgaagatgccatcatcagtttgtggactgtcattgagtcttttttttttccagggtagtgactcaccacctgtttccactggccttagtattccaga

SEQ ID NO: 393628 - DNA, 134 bp, Homo sapiens
gtgttttcatgtggaccattttttattcattgggctcggtactctctggaccttttaatccagttttacatatcttagttctagaaatgttcatatactatttcttaataattttctccccctttttttttccc

SEQ ID NO: 393629 - DNA, 198 bp, Homo sapiens
agcaggattcaatagacaaacattcagctgtcatgtacctttataggaagacaatagctatctacacctacatggacaggcaatatctgaagggttgtttctgttccacttaccgagagcctgctgagctaaaagcatagatcgaccttccctacgactctctccccacccagctcaaggggtcaaagcagggaaggg

SEQ ID NO: 393630 - DNA, 410 bp, Homo sapiens
gaggtgttttggaagcaccatacctctgagactctatatttcaagactgttattttaagttagaataaaaataatactagttatcatttactgagtattgactagatggcaaagtgccaagtgctttatgtgtactacttcagacactttcagtaaggggcaattaaatagagtgttaaaggtatcatgcaaagtaggtaaatttccactccttcttatgatctcaattcagagcatgcttcatttgcaccctaagtttggtaactctagtagcacggtcctgattatgactcacctttctacgtatttgttcttcaactctccaattcgtttgtaagtccttggcaagcaagggctatgttttgtaccaggagtgactatgaagttgtcaactttgaaaaaacccaaca

SEQ ID NO: 393631 - DNA, 599 bp, Homo sapiens
tgtgggcttatgcttctccaagagatccttcaaaggaggggccaaaagagctgggagtgtgagggtacactctctgtacttcctcttcctcttgcctgcgatgtaggcttttgacctggaggtgcagcggccctcctgggaccatgaggcaaccttgacattggaagccacatgcagagacagcagagaatgaagtcagaagcagtctggggcatgaatgacacctctgaggtgccagatcagccctggactgcaaccacctgaattgattttacatgaaaacaaaacaaaacaaaacaaaaaaaacaagaaaacccttgttttgtttaagccagtggtatttctggtctctgttatcagcagaagtacaaaatttttccctctccctttttcctccccagcagtttgtcataaaacttctaaaacataaagcaaaggtgaaagaattttcagtgaataccaattacctaccatgtaaattgtattgatagagttaatattttactaaactttcttactttattataatccatatcactattcattccctatccatccatcatccttatttatttgttcatttgcttcttttctttctc

SEQ ID NO: 393632 - DNA, 300 bp, Homo sapiens
catgatcgccaatgcactccagtctgggcaacaagagaccctttatcaactaaaaaaaagaagaccagcttgaaggggcttctcttccctggctccacctgctctttccttctttctccaaggttctgtcttcaacatccaggaggatccagccttcatggctctgcagataccttcccagtgttagcattattattaccttgaggatggatattttctccctctcccctgagtatctcaagattcctagcaagtggtggtcgtctgggagtcagagacccgtgttcctgtcccagcctg

SEQ ID NO: 393633 - DNA, 809 bp, Homo sapiens
acagtgtatactggaaaaaaaatccctcttcaatggggttgaccccattcttgcttctcctcactcctcaataaaagaaaaccagcattaattagaggaaaaatgttaacaggttaagattaaaaaaaaaaaagcttaggccgggtgtagtggctcacacctgtaatcccagcaatttgggaggccaaggtgggcggatcacttgaggtcaggagtttgagaccagcctggccaacatggtgaaacactgtctctactaaaaatacaaaaaattagttgggcatcatggcaggcgcctgtaatcccagctactcaggaggctgaggcacaagaatcgcttgaacgcaggaggcagaggttgcagtgagccgagatcacacccctgcattctagcctgggtgacagagcaagactctgtctcaaaaagaaacaacaacaacaaaaataatttaaaacccaaatgttcaatcaagggatgggaaaatactgaaagcattaaaagttgaaaggttcacgcctgtaatctcagcactttgggaggctgaagcaggaggatcgcctgagtccaggaatttgagaccagcctgggcaacaaagcgagaccctgtctctacaaaaaatatttataaataaaaaattagccagacatcgtagcacgcacttataatcccagctacttgggaggctgaggttggaggatcacttgggcccaggagataaaggctggagtgagccatgattgcaccactgcactccggcctgggtgacagagcgagaccctggcttcaaagaataataatcataatcca

SEQ ID NO: 393634 - DNA, 217 bp, Homo sapiens
tattacctataatacaaccagaaataaaatgttaaaaactcaagctcatgcatacccaaggatgacaaaaaaaattctgcatgtataagaacactttacattgcattttgtaacaacttgcaaagaagataaataatatgtatgactccagattgcagtaaacagactcccacttagcttagcttttaagttatgcaacttcctcactgatgactta

SEQ ID NO: 393635 - DNA, 219 bp, Homo sapiens
ttagggaccgggggcaggactagagtgtccccgggaagcaccaaatgggatgtcaggacccctgttcccatcaccctgggggagtccatcctctcctctctgggcctcattcatgaggcaagggcctctctgcagcgtccggatgttctcactgccagtgacacccaccacaccagaaacacatctgggggcacctcactaagccctgcacacacatta

SEQ ID NO: 393636 - DNA, 770 bp, Homo sapiens
atagaattccttttttaaaaaaaaacaggcttatggagacaaagtagatttgtggtttcccagggttagggagatggagcgatcgagggagagcagcggctcagaggggtaaggtttcttctcagggtaatgaccatgttctaaaattggtgtggtcattgttacacaatgtagatatactaaaagccattcaatagcacactttatattactgaattgtgcaatatatgaatttgatatcaataaagctgtttataaaagaacagtatttaaaaaacacattgtttttcaaggtaatacattgtacttttaaaatcaaaatgcatataacatgctaacactacctttcttaaaagcaaaataaaatgaaatttagaaatgccgaagcaaggaatcattcactattcaaatgagtctttctgaatgcttaataatcataaagaaataagccagaaatacggatttaattaaaatgtttatttccaaatgtttgtagattcttacgcaggtgtaagaaataacacagaaagattccatgcaccctttatctagtttcccccatgatcataccttacaaaacaatagcaggatgtcaaaaccaggatagtgacactgacgctaagaggcagaacatttctattgccacagtattcttcatccttcccgcgcacagctaaaaccgctttcctccctccttaccccttctttaacctcctggcacaactaattagttcctcatttctataattttgtcatttcaagaatgctct

SEQ ID NO: 393637 - DNA, 420 bp, Homo sapiens
ctttgcttggcggtgcctgctggccatagtggaactgttaccacagtgctagttagcaccagtcccagcccccagacttctgaatccaactgcccgctcagcatctccactggtttaatgactcatagacacctcaaacctaaacgtgtccaaacagagctatggccttgccatagcctcccaaaccagctctgtgctaagtcttcccttcttacttcataacaactccagcctccagatgcccagccagacaccatggagttagcctccactgcgcccttcctcacatccacagccaggagagcttatcatcctacttgcaaaatagatttggaatctgatcactttcactaccctgaccacagggagagcacccccttctcttgcctggattattgcaaattcatctccagctccccc

SEQ ID NO: 393638 - DNA, 836 bp, Homo sapiens
  misc_feature (405)..(405): n is a, c, g, or t
  misc_feature (407)..(407): n is a, c, g, or t
  misc_feature (433)..(433): n is a, c, g, or t
  misc_feature (442)..(442): n is a, c, g, or t
  misc_feature (454)..(454): n is a, c, g, or t
  misc_feature (487)..(487): n is a, c, g, or t
  misc_feature (521)..(521): n is a, c, g, or t
  misc_feature (530)..(530): n is a, c, g, or t
cgtaagcaccagggccacttcctcctggggactctgagccgctacgctgtgcaggtggctgagggcatgggctacctggagtccaagcgctttattcaccgtgacctggctgcccgcaatctgctgttggctacccgcgacctggtcaagatcggggactttgggctgatgcgagcactacctcagaatgacgaccattacgtcatgcaggaacatcgcaaggtgcccttcgcctggtgtgcccccgagagcctgaagacacgcaccttctcccatgccagcgacacctggatgttcggggtgacactgtgggaaatgttcacctacggccaggagccctggatcggcctcaacggcagtcagatcctgcataagatcgacaaggagggggagcggctgccccgncncgaggactgtccccaggacatctacnacgtcatgntccagtgctggnctcacaagccagaggacagacccacgtttgtgncctgcgggattcctgctggaggcccagcccacanacatgcggnccttcaggactttgaggaaccggacaaagcttgcacatccatgattgaattgatgtcatcaccgtcatcgtagggaagggccgaggaactactggtgggaagtggccacgaacacacggaccgcttgttgtgtggggcccttccctcgcaaacgtggtgacctccggtggccgggactgtcgagccaaggacatcaagcagcccctgcaataacagtttcatccacacagggtatggcgacatgggacccccgcactgtggggctcccggacaggattgcgtacttgttttggaaaccatggaccc

SEQ ID NO: 393639 - DNA, 502 bp, Homo sapiens
atttcagtgattgtaagttcttcggtcatgtcagcccctgtcatcaacttgagttacagtagatggggcagacatggagtgtttgctttgcggaactatctgtctgttttgcttccttgtgctctttttgttctctgttctcctgttaatgaagcttttcctgcccattattaatccaaactcttgggccttgtggttaggaaattcccttaacttccagccatgtggcattatcatgtctctttctctctctcgctctctctcctctcctcctccccccaacattttctgtcaaataagtactgtttactcatttagttgcttatcaaatacttattcttggttttaaaaaaattattggtaactgtacttttcttattttttagcattattcaaatgtttacattttaatactttaaaccactttaaaattttttcatgtttaattgtagttttaagaaaaactattttgaacaaccccaaatatagtgcatctagaaac

SEQ ID NO: 393640 - DNA, 561 bp, Homo sapiens
aaacactccttttgtggaatctacaaagggtgctaagcactctatgggaatcacctcatgcaatcttcacagtgctgtacgcaggtactaaccttgcacccattggccaggtgctgtggctcacggctaaattttgtatttttagtacagatggtgttttcaccatgttggccaggctggtcttgaactcctgacctcaggtaatctaccctcctcggcctcccaaagtgttgggattacagacgtgagccactgcacctgtcctttttctagttttagatacttgagtttgttgttgttgttgtttttcttaataaaaatcagtcacagtattaagtaaggcatttaagtcaggtcaacacaagtttcaaaatattggcttgggagctacttcagtctgtatctttatcttcctgtttaattatagactggaaaaggaagacagcatttcctgcttttacagtttcctaatgatgatatctcagcttgtaatgatttaatccaaaggaagaaggcattctatctacatctacaaaacaaaccaccactattacaaactgg

SEQ ID NO: 393641 - DNA, 257 bp, Homo sapiens
gtactctttcccaaattatacctatcttccaactttactataaagtctttgaggtcaggaatttggtcttgtatattctttctatagcaataaaggaagaggacatgctaggcactccgtacttgttaatcaaggggcttaatctgcttagtacacggaacaaagatgtcagcaatcagaattttaaagagtctacacaatcaatagagaacacaatcaaagagagtaagttatgttgggggcaggggtgttctgaa

SEQ ID NO: 393642 - DNA, 555 bp, Homo sapiens
atgataacagcaatgtggttacattagagaatgtttttaattttgaaaattcatgcttaagtatttaggagtggggagagaagagagatcaagagagcaaggagaaaatgttaaccagttagtctagcaaaggttatttgagtacttattcttctattcctttaggctttctgtggattttaaaatactcaaaatgttggaaacattttaatgtttaacaattattgcatttcaaataagaaaaaggacacattagtcaattaattgtattttggcagctggaaaataaagttcttatgttcctaattgctgtcttaccccaaatgatggaatgttgaatgacaatctaatgaatgactaaagttgacagcactgcctttggaagctattactgccagaaaggagaagtgatattacaggatttgacgggaaggcaaaggaagggaagacaagaagaaggagaagaaagattttataatcatcataataacaatagtacatggtcatgcattgcttaatgagagagatacattctgagaaacatgttataaggtg

SEQ ID NO: 393643 - DNA, 793 bp, Homo sapiens
ctgtgtgagaaaggcacagtaatctgaattttacaatggagacatctaaattgcaaaattttagttgttatgtccctagtcacattactgtcatatatacgactggatctaaatgctggtattcagactaccttaatcatttttaacatcctttaacacagttactccatgtcactaaacaattgccttttaatagtttaactgtctgataaagttatacatatgtgtgtaagtgggtatttatataatgctctcttttattatcgtattcaacataattacattatagtgatattgctgaagaaattatgtgagtgacaagcatagagacccatttatttaaattctcatgagatttttctgcagagtaaggttctttatttccatttaatacagagtcctgctttgagagctggagtactgatgcaaagtgaacactgataaatcaatgtgaatgttatcgacgtcttagccactgacttgaagatgttatttctcagcatgggtgtatctgaataggacagactattaccaatatatttgaaatctctactcttaatattgaagtaaaatggggaaggaaagcatgtaaatttggggtaaagggttaaattatcaacttttccagaaatgtcatggctgactctaaagctggtgtttccagggctaatgaataatacccagcaaggataattcattgattctgatactaattctgtgctcagaaatttctccctttttatttatttaaatcatcagtctcagatccagtcaacaccttgtaactgagaat

SEQ ID NO: 393644 - DNA, 228 bp, Homo sapiens
agtgagtgctgtggtggttttaaaatatgtccacaaatccttcaacattcctccctccaaaagcacccagtctattggctggacataggggcttgtttctaatgaatacatgcagtggaggtgatggtgtgtgactagttcctaaatgcatcatggcttcctccttgattccttttggatgactagccctaggggaagctggctgccatgtcacagggacactaagta

SEQ ID NO: 393645 - DNA, 490 bp, Homo sapiens
atggccgagacgggcacattggctcacgactgtaatcccagcactttgggaggccgaggtgggtggatcacaaggttaagagatcgagaccattctggccaacatggtgaaaccccgtctctactaaaaatataaaaattagccgtgcgtggtggtgggtgcctgtaatcccagctactcaggaggctgaggcagtagacttgcttgaacccaggaggtggaggttgcagtgagccaagattgcatcactgcactccagcctgggtgacacaatgagactccatttcaaaaaaaagaaaaaagggaagtacaatatactatgcacagagctttggaactcctgtccccaggcatgttctgtttctcttgttgcatctggggaaggaaggtaggaaacggtgccctttcatcagggaaagtggtcgcaggcttatattgtccaagccccgtgagtgatgaataacgtatttgcaggcacagttcctaccat

SEQ ID NO: 393646 - DNA, 669 bp, Homo sapiens
gacacctcattttcagagtgcaaaaatagacacttggtcttttgagggaccagagctttgttctgtccctccctctcttatggtggtctttcatattcatgggtccctgaagagcagggtttccccactaccctctcatatgccccaatcctgagtgaatgcttggatgccgcacgttctgtgcaaagccgggagtagatgctgcataacccagggagggcaggtgcaagagcgttgaggggaatgagacccagaacattttattcttaaaggactcctaatctaatgcaatatgcaaaatagagaaggaacagcagaaagtatacacttaagatgcagcatccacctcacataatcagcagcatttgaaccttgtaaattccacagagatgaggcaggacaagaaagagttgctgctggatccgattgcagaggacttcttggaggaggtggcttttgacaagaaaaggatgggttttggagggttctgactattggtcagggttagccgaccctgtcctacccggctcccaggggacactgcaaggcaattgagtggcaaggagaaaagcagccccaaggcttcctcattccccgtgaatatccctgcctcattcccaactaacttgcccaactatctcagttatttccaaatctggaaggaagaga

SEQ ID NO: 393647 - DNA, 580 bp, Homo sapiens
  misc_feature (65)..(65): n is a, c, g, or t
tattactaattttcttgtttggtttactttgatttatttgattgaaccctggaagtattattttnaccagtcccacatttaaagacctagtaatcttgatggaattggtaatggcagatagggtttaatgttgttgacttttcaaattagaaaagtagttttaagtatatactatttatgatagaagaaaaactatggggtgtgtaggtataaatatataaagttataaaattgtattaaaaggcatagaaaaggcatataactaaagacatatacttagtttattataaaaaatagtaattatctttaaattgatctatcacttacagaaattttaatggaaaccctatcagaattcatggaaattaacaagctagttccaaaattagtatgcaagagtaaagagccaagaataaataagaaaacttagaagaagaataaggaaaggagcttgttctcttaaataccaagtcatattataaagctataataattaaagagatacggtattgatatataggtattaagaaaccataagatctggaaacagatctgcatatagatgggaactcagcccatg

SEQ ID NO: 393648 - DNA, 294 bp, Homo sapiens
ctttttggccacagtacaaaacacttcctatatttccatggaggaaaatggggttttaatccccaggaagcatgcttatcccccactggagacggccggtatcctttgttctatgaagcttatgtcactccatgacatgaatcacaggccaacattacagcacccaatagttatgatgttcccctccaaatttcaaataaaaccttgtgtcattaagaaaagtatttattttgcttttctcaactggcctgggactaagacagaatatgtactgctggggaatcaggtttctaa

SEQ ID NO: 393649 - DNA, 599 bp, Homo sapiens
atttagcccaaccttggcaccttctaacaaagagtaataccctcgaagtatacttcatttactactgtttctgctttatattacccctcagcatctcgcgcagaagaaagcaaagggaagcaatggggcatctgattggtctgggagctccagatagccagcaggtacttgaaggctgcaagccagcttgagagcagtggctggaactggaaggggtgtgcacactaccaatagcaagtgagcaagagagacccacaataaactgaaggttattacagtactacagtaggctctaagaaagtcccttctcccactttaagaaacagggctttttttttttttcttttttacttttaaaggaaacaattcatttgctagaaaaacctaaaaaaaaaaaagattatatacaaaatggttgtctgaatgtggattttatactgcagcaaaagcaacccagctctggaactctattcggcttcctcagttatcaggtacatcatgctgctgatgaaggtgaaggcgaagccacccacgccaggatgtaggagtagccatagctgccttctttggtcaggtaatagaaatccgttgtttcatcg

SEQ ID NO: 393650 - DNA, 351 bp, Homo sapiens
gatagagacctcctaaataaagtactgattgtatttcttcactgcaaaacagacagaaaaacatattattaaaaatatgtcatttattacaaaaaaattagtgaggcatggtggtgtgtgcctgtaatctcagctactcgggtggctgagggaagagaatcacttgaacccaggaggcagaggttgcagtaagctgaggttgcgccactgcactccagcctgggtgacagagcgggactcctatctcaaaaaaccaaaaaaatgtcatttgtgattccatcgagatgtgccaaattcaaagagaaggaaagtagaacagtggttgccagaagcttgaggaaagggagaacg

SEQ ID NO: 393651 - DNA, 574 bp, Homo sapiens
tgacccaggaggtgcatgggtggctgttccctcccagcccagtgccacctctgccatcctccctggctgggaaagatgaactgcgcttaaaatgggctcagttttctttttcctttctttccttcctttccttccattccttccctttctttccctttcttttcatccttccttccttttctttctctttctttctctctctctctctctttctttctctttttttaacctagtaattgcttttcacatctgctggtgggctgctatctttcataggataacttccattattgctttaaataaggtggtgtttggcctctgttttgttttcaggtaaagcaaactgcaatcaggaagcctcattacagacagtgaggtcatgacaagaaaagttcattcacactggagagttcaaccccattggaaatgtctttccaaacacagctggtgactttgcaaacccagacattcccagaaactcagtggttccagaaacttgcttggaataattaaggttttagagcagctgttggaatttttagaaaggaaaaaaagaaaaaacgaagtgaggctc

SEQ ID NO: 393652 - DNA, 216 bp, Homo sapiens
agtgaaactccgtctcaaacaaacaaaaaaaagagcatggctctgggaatctgactaaggtgggctctaatcaggctttgatgtctgctttgcccaagctcacttaggcaaattacttaatttcttcattcttagttttctcacttgtaaaactgggataataattgcacccttctcataaggtagttgtgaggattaaattagataatacacata

SEQ ID NO: 393653 - DNA, 1091 bp, Homo sapiens
gacgtctgacgtcaccgaataatcaaaatggtgacaattgcatttagctggtcacagagatagatccctaaggttatgtcaataccactccatgttctcaaagcccccaagaggcaggaatctaagtgaaataaaccagcaagtccttgtctggacttgcaggagagaactgaggggctgcctgaggctctgtgttcagcgcctcacctcggatgatcttaggatggtgagggtcagtgacactgcaagccatgagtcctttggcagtgggtccgtggccctgctgaatggcaggcgcatggccaccttcctgaagattgcaaattggaaacagggcgagtctccacgataacatctaggttacagcattgtaaaatgtccccaattatcttgacaaatggaagttggtgtgaatgacttatgaggacacgatatttttgtagagaagggagagttccagcaataggaacgagctgtgccttgctcttgggaaaccccaccctgttttgggggccttaggttgctatgaaatggcagggtttgattgctgttgatagcaggaaagtctgacccatgactaagggaataaagtagagaaaacgcaataagcagccatcccagaaaaccagtgctcataaaagtgcttgttactggacactgattttggcttcacattgactacaagtggacctaaaccagtcagtaaaatggtgttagctgctttgttgtttcatgtatttattcgatacatatttattgaatgcatattgtgtgaagcgttgttctaaactctggctataacaaagtagaaaaaggaaaatccctgatctcactgagtttgctaaataaatataaattcattttgacctttgcatatttctatgtgagtctagcaagtggtcctgggatggaatgaagtacaacatggatatggcacatcagtttatatcctgcagactcaaggattagagaactctctaaaatatatccggagtaccactgaaagctacacatctgtttttttggtaaattcaaatcaagttacaatactctttatacaatgtgatctcattttgctaacctatatatac

SEQ ID NO: 393654 - DNA, 777 bp, Homo sapiens
gcccttggcaccttgaacttctatggacaggaagcagactgaggaaactacttggcaaacatgggctacattttatggaaaaggaaagaaattcaagaggatggaatcaagagcccaaacgggaaccaaaagctaatcccaggcagtacatgtgggctgggtgcagtggctcactcctgtaatcccagcactttgggaggctgaggcgggtggatcacctgaggtcaggagttcaagaccagcctggccaacatggcgaaagcttgtctctactaaaaatacaaaaattagccaggcatggcggcacgtttctgtaatctcagctactcgggaggctgaggcaggagaattgcttgaaccaggaggcggaggttgcagtgagcggagattgtgccactgccctccagtctgggtgaaagagcgagactccatctcaaaaacaacaaacaagaaacaaaaataatgacaaccttgtgcctcatttgatttcagaattgctatgaaccggtggctactttgttcctctgatttttcccttttttttttttttttttttgaatgggactaactattgcctgccctttgttttacctatgttgtattctaggtatgtgtggacagataacttgtctctttagttgataggtcttcaggtcaggatgaactgcactcaagctgaactcaaggaactgcctcagaggagcttcatctacctttgtacctaactttgatgataagatctttgaacctgaggttctaaatagatgaaacttttgg

SEQ ID NO: 393655 - DNA, 206 bp, Homo sapiens
tcaaactcctgacctcaaatgatccacctgcctcagcctcctaaagtgctgggattacagatgtgagccaccgcgcccagcctgactctcattttcagtccttggccagagatctccaaccctgccctgcaatcttagtacacattccttgtttggggtcttactctccaaagtgactacatcatattccctctctcctcaaatct

SEQ ID NO: 393656 - DNA, 822 bp, Homo sapiens
acaggcaggagctactgtgcccagccagatttgctttttagatccttctacatttgtggggaaactggtgaactctgaattgaccctggtgatcagttaatagtaagggaccagtgttggtttccaccaagctaccctggaaatgtaagatgttaccattaggggaaaccaggttgggggactccctatgatcttcgcagcttttcagtaaatctaaaattattgcagtaaaaaacagtaaaacatctggctggctggcagaaggggaggcagcctctgtcctgcgtggctgtcccagactggctggggtggcactctggctgtccctggtcagtccctaactcaggctgccaaagacggtcgccagtctagggaagaagcggcccaacgcgctccccaaagacgtcgctgcaggcacagggtttaggaagaacttttattttcttccttctgctgctgtgggttttaatttcctgccattttcataattaaaaaaagaagtgctattttagcacgaaacaatgtttctttagccaaagccagagtgagtgggcagcaatggccgcgcgccctgctctgggtggtcccgaccccggggaagtccctgtgcagaacgggggctgcgggggcggcaggaggaagtgggggcgcggcacccaggcctcgctgtcttcccttcgagggacctcgcgctgcaaaatccgaagagccggctggggcggggtcgcggggtgcgcgggaaccggggcctgggacgggcgggcctagccagggcctccacggaagcgaggccaggactggggagtggggggtgggagggtc

SEQ ID NO: 393657 - DNA, 844 bp, Homo sapiens
ccagggtggaaaccatttcattgctgctgggctcctggggcctagatcattgtctgagataaaaataaccgctactttgaagacttactctcaggaccaaataggatcatagctgtgacaagtgttttgtgaccacagacagctccagctctgtgccgttactaggatcctgggctgatgagaaaccatctccagctaagagattgtgattgaccactgagtagctgcccaagttgagacgctctgctcagcccccagcctgacaggacaattggcccacactgccccggaggctgctgggcaggagctggtaattgacagagaactcattatcgaaggacagagcctctgagcatgctgggaattggaactgacagagcccaagggcctgggaatcggatcactgggaagagacagcccaagtgttgtgtgtcctggacgtacagaggaaaataaagtttcagaaattgctcggcactaaaagagagctctggtattgaaagccatctctgatccgctctccatgtggctttgggcatgcaattgacctctgtgagcttcagttttgtcacctccaaaatagagatgacaataaatctttttcgtggagtaagaaataaggatgctgtaactatgacattgatgatcatcattataacaactagcagctatttcacatcctccagatgccagagaccatttgaagagtgctaaaaatgggccaggcacagaggctcacacccgtaatcccagcgttttgggaggcccaggcaggagggtcgcttgagcccaggagtttgagaatagcctgggcaacatagtgataaccctccatcactacaaa

SEQ ID NO: 393658 - DNA, 571 bp, Homo sapiens
ttgagacagagtctcactctgtcacccaggctggagtgcagtggcgcaatctcagctcactgcaacctctgcctcctgggttcaagcgattctcctgtcttagcctcccgagtagctgggactgcaggtgcatgccaccatgcctggctaatttctgtatttttagtagagacagggttttactatatattggccaagctggtctcaaactcctgacttccagtgatgtgcctgcctcggcctccagtccagattttaaaatcactcattatactgccaccacaaagtaagatttaggctgcgaccagaggaatgcataagaactagaaggtaaagtatgtatgtgggtataggtgggagagtatatgtggaaaagggggctgttacatttgagaaacaaagaaggctagggtggctaatgtacagaaaatgagaagtaagatggaatgggatgaggctagaaagatggttcagggccccataggctattaagaattttaaacttttatctgagggggaaaaggaacctgaagaaggcttttaagcagaaaagcaatatgaacagatgcag

SEQ ID NO: 393659 - DNA, 440 bp, Homo sapiens
tcactgcttacgacggctgaccccaaccctgcattgcaaaacacttggccccctctgactatttgaccttccctttggttatttcccagcacaaactcagtatcacagaagaaatctaccgccttgtagctttagtactgcaaccctaaagttacagagtgcggttccgtgtggtcccccggtttcccatgagggcccgtcgggatgcagagggagcccaaaggagtgctgtgccgaccgtgaccctcccaggcccaactcagaggggaatcccctatttgagtgacccccagctccagaccagcctcctgcagggggactgttcctacatacagtgctcacctccttcccagaattccttagcggaatcctgcaactgtaaagtaacgaggaacagcacattatgactagaggattggcgtggtggcacttgaagagcc

SEQ ID NO: 393660 - DNA, 206 bp, Homo sapiens
attaaaatgaaaagacaatattcaaaataatgcaacaaaatgaataaaatcctttgtccaatactgtacacataatgcagaaatcagtgcatttttcttaagcatgttttaaccttcatttagttcatactaaaatataataggctttaaatagctcaaataatattcagcagtttaaactgtaaacagcttgtttaactgttaag

SEQ ID NO: 393661 - DNA, 612 bp, Homo sapiens
  misc_feature (63)..(63): n is a, c, g, or t
tctggactttacagatgccgggatgccttcatgcaaagctcagagctcagtgagcatcagaanattcattctcgaaagaacctctttgaaggcagagggtatgagaaatctgtcattcatagtgggccattcactgaatctcagaagagtcatactataacaagacctcttgaaaatgatgtggccaaattattctctatttttcttccagctcaagtctaacccacttggtatttctttaagcagataaagcgttgttaaagtaaaccatcgcacctcacataggtcagtatattgaaatgatttaggaatctttaaaatatattgatacctgggtctctatgcccagagactgtgatctaatttatctgggaatgccatgaatatcaatgttttaagaattccacagtaaaattttcccagatgatgtgaagcagagcttctaaactgtccgtgataatgacgtaggcatgaattttaactcaggattcattggaacaggcatctctgggtaacttagagtagattttgttcccagagtctgtttctatcagaacccaacttttgtaggctcagaaggcagagctgagcaggaggtggcatcgataaaca

SEQ ID NO: 393662 - DNA, 845 bp, Homo sapiens
atcaatattaatgagacagtttgaccaagtaactcctgctacctaggcaaaaaggaatctagtgacaatgtataatgagaccatgtaagatcctttttctattttgattcagaaaacatctataaaataccatgttcaaattaccctgctaagctatcttcttgttcttttgcttggtatatctgctaaatggaaggcattcttggttcagtccccatgtaatgggctttgtacatcctgtttttaaaaaatggtttttaaaaacaaacacaggtaatctctaggaataaggcattacagtctcatgctagatctttcctggtgccagctttgtcccctccagctatttcacaattagacaagtcaaactctctttcttgccctcagttttctaatcattataataaaatgatgtggccaaattattctctatttttcttccagctcaagtctaacccacttggtatttctttaagcagataaagcgttgttaaagtaaaccatcgcacctcacataggtcagtatattgaaatgatttaggaatctttaaaatatattgatacctgggtctctatgcccagagactgtgatctaatttatctgggaatgccatgaatatcaatgttttaagaattccacagtaaaattttcccagatgatgtgaagcagagcttctaaactgtccgtgataatgacgtaggcatgaattttaactcaggattcattggaacaggcatctctgggtaacttagagtagattttgttcccagagtctgtttctatcagaacccaacttttgtaggctcagaaggcagagctgagcaggaggtggcatcgataaaca

SEQ ID NO: 393663 - DNA, 477 bp, Homo sapiens
gaagcagaagatgagcaaatcatctgcaaataaagagtttccactgcagtgaatgctgcgaagaaaatgaaccttcataggagagctgaaaagagagaggcaatcaaactgggggcctagcacaggtgctctgttgttgtgggggatacccctggcaaaaggtctgggaaactgagtcactaatgtaaggcaaattgctatttgctctgagattggcctggtgggggggcagggaggttaagagggggataagaaaatggagcgagtccatatctttcttcaaaacagggttttgcaaatctgggaaagatgggagaccatttggaatcaatttagcatttagagaagaggcaagtgtgcaaaagaagagtgagttggcctggagtgaagaagcagagaggagatgggaaggaagaatgtgccttggtcctggccagcaaggcctgggagccacgtaacacaggagatgctggtggc

SEQ ID NO: 393664 - DNA, 391 bp, Homo sapiens
tagaaattcatctgatctgtagttggaaaccacctgtaactctggaaggcacatctctgatttagtatgtttgggagtctttgaaaacatgggcctctgtatcagtattgcggttacacggaaattcttaccttattccgtcatgtattgggaacaatattgctgttactacctccctcaagaaaaaggcccgctgcccagatgctcactttatataataatgcctttgcctagaatttgtagtagtaatttaaaacacttgatgaaattgtagtctcagcttttttgagcactttgcatttttaactttatttttgtatatttttgagtgtctcaactttttagctaaaggaaaatgtttttaagtttaaggatataaaaatccttaaaa

SEQ ID NO: 393665 - DNA, 438 bp, Homo sapiens
tttggctccatactttttcttaaaatgtgctttatttgcagagacagtaaaggtcaagagttggcatatatacaaactatcacttaattaagtaatattggttgcagtcagtgattgttggttttgagatagaaataatgtattataatcattgaatctaagagaggactaagcagaatatgaatcaaacacacttctatgtgagcatgccactgccctcagttcaagtggaatctaattggaaatgccaaaactttactgttctattgcatatttacatggtactaatgccatgcattttattctgctcaaggtgccctcagggagataaagaaagcagaaacggtcagagaagcaaatttgtattaaggcacttaaggcatcttgccaccactgggtctgggaggcgctgctcagtctgccgacagcatcttctgg

SEQ ID NO: 393666 - DNA, 599 bp, Homo sapiens
gcctctcctggatttgattagaagataatgtgaagtttttgagggtgaagttctgaatttgttgcctggaaggcatacatgaaggcatacttccaggtttattggaggatggggttatgaatgatgtggttttaaaacctttgcgatagtctggacgtggacaaaggtgtgtctgtgggcacatcttccatcttatgcccatagtgttcttaattttgtctcattatagaaggaactctcccactctgggatttctgtgtttttggagtttaatgggaaaaaaaattagactttctcagatagtgactgaagtgagatgcttaggtgtgatgtataagtgaaaaatttatgtttttgttaattactctcctgattagtgattttatacccttcccctctttttctcattttctttttactgaaatcttttatgtgcaaagtaattaagaccttagtatttagcatcattttatgagaataaaaggaggcgggaaaggtcagaatcaaaatgacatgttgggaaaaaagtccattgtaagttcatttaaaaatgagtattggccgggcgcggtggctcacacctgtaatcccagcacttt

SEQ ID NO: 393667 - DNA, 435 bp, Homo sapiens
atagatgagggctgtgctgcaatgacagatagggttgtatgaaacatacactaatctgaccattctatcctccagactcagggaaggaaataataaaagtaagtaaccataaaaaatagacttttatgcataaataaataaaaatcagctaggagacagttcatccctgtataagtaaaacaggcaaatttatctttcctctgattaataatttaagaaaaaatcccaagcaagctgcctatggaggtgtaggagtagctcctataattagactccaatttgaaccatgagggtgaggatcagaaagctgactcagagcctggtgtcaattatttgcagtttgtacaacgaaaggctaaaaatttgggagatgcaggatgactgaagcccgattctgggggttgttacagcacagttacagggtaagttttttcc

SEQ ID NO: 393668 - DNA, 568 bp, Homo sapiens
ttccattttaattagagagtaactgactcctcagaaatgaatatgctaatgaatggcattgccaccagcacacatttaatcaaagcacccttttagcacagcgtaggcttggttttgtgtcctcactggcactgactggactctgtgggatacacccgggcccctttggaccatgcaggatgtactgcaaaatccctcagcccttatgtagagagcttgcacccgatcgggctggaaactgtcaggacagcgcaggggcattagagagacagggagacggggttctctatcaggagtgtgaaggatgcacacagaagctggtctgatgcaagatgacacaggccgagtggtaagtaatgcaagaagagggtcccttacacacacaccgataattaatgttgtcagtgattgctttcttcagcagcgaggtctgaattaaaaagggcagtggccccaggcagccattatcacagtctcttactgtaagtgttacggtaaattggtattttccagccacaggctaggcgctggtgtctttttttgtggaagtacttaatctgtaatggac

SEQ ID NO: 393669 - DNA, 318 bp, Homo sapiens
cctcggcctccccaagtgttaagtttcttgaagaagctgctttactatttctgaatgtgccctctattcctacatataattttttttggaataatattggtagaactgctaatttttaaggagtaacttgattctttatactgaaagaaatagatacattgaattcagctaggaagttttgcaatttttttattgtaaagaaaacttacttggtaagatggagtgaaagcaactcaggataaaattaggaaagggatcataatggatacatctttgaaccctaaaagtaatgaatcaaatcaaactaagatttgacat

SEQ ID NO: 393670 - DNA, 345 bp, Homo sapiens
gtggggagctcaaggcatcctcccggcaggtcatcctgggctcccattgctccccagaagtggttccagcttttgtccctctacctcccagtctgcccctagccacaagctggcaattcagttcaggatccttcctgcaggaagggctacaagtgtgctgacactacccgccatgtcccagccatgggaggagatgactcaggcgttcccccattaacttcagagggtccccaggtattatttttgcctatcctccagctagaagttaaaatgcaggaccttctagccaatagggaaaacaggtatactggccgggcatggtggctcatgcctgtaatcaccata

SEQ ID NO: 393671 - DNA, 223 bp, Homo sapiens
agaaacccactcttcaaggggtgtgcttgagtgtgtgtgtgtgtgtttgtggtggtggtggagagagatggacacaaaaaggaaaatataagaaaaggtttgaatgaaagcagagcagatcccaccatcttgaagtgaccatgacccagctttcctccacatgcaggagatggttctgtgtagcaaatagttgtagtttgcattttaatctagaaataacttc

SEQ ID NO: 393672 - DNA, 304 bp, Homo sapiens
ccttgggatcttgcccacaaggtactattgcaactcgcatgggctaactgcttttcctgtcacccgttactatgcctcagatggcctaatcacacccaatatgtggccctcccacccaaacactgaggcaactatagctaaaaacaaagttcgctgaattttcagttgatgttgaacggtcaaaagctttgggccactatctattaattcctgacttgagaaacacaagtttaaaaaaaggagccataacaccacagaaccaggagacactctgaaaaggtacccactgtccctgaacagaagc

SEQ ID NO: 393673 - DNA, 487 bp, Homo sapiens
tcataagtcccactttacacaagcataaagtaaacttcagaggaaaatagtatctttcagagcttctcaattattcactgtcatgcaataaaatattttaagatatacaaaaaaaggctgggcgcagtggctcatgcctgtaatcccagcactttgggaggccgagatcgtgccattgcactccagcctgggcaacaagagcgaaactccgtctcaaaaaataaaaaagctgggattacaggcgtgagctaccgcgcctggccagagatatgttctaagaaacgtgtcattagacaatttcattgtacaaatgttatagactgtacctacacagacctggagggtataacctactgcatacttaggctatcaggtatagcctattgctcccagactacaaagctatacagccatgttactgaaaaggatactgtaggcaattgtaacacaatggtacatatttgtgtaaactgattggggatcctct

SEQ ID NO: 393674 - DNA, 347 bp, Homo sapiens
agtgctgtgccgctacatcggctcacagcaagctccgcctcctgggttcaatcgattctcctgcctcagcctcctgagtagctgggattataggcacccaccaccacacctggctgagttttgtatttttagtagaaacagggtttcattatgttggccaggctgttctcaacctcctggcctcagatgatcttcccgcctcagccttccaaaatgctgggattacaggcatgagccaccatgcctggccacatttttaagtatttactttgtcccaagaacttcaggtgcttgatttaggtactttactcatattatctcattttatctttatccagaattaccag

SEQ ID NO: 393675 - DNA, 215 bp, Homo sapiens
ccacacagaattgattggggtaataaaatgacagcaccttgtaatatacggaaggctttttaatttgaaaaccagttctaacctgattcaaagcttgtttaaagctaatttatagcttacataattttcagctggctgaccaaggtaaaggatgatgtatgaaaactgataaagaattaatattcagacattcctcgttaaagttaactggtatt

SEQ ID NO: 393676 - DNA, 275 bp, Homo sapiens
atggtgaatattgcttgatgtctttcatttgaatttggtgttggatatgtctgtgcctaggatgttgaagacaaaagggtggaggaaatgttgtaggttaaaatgggaagatgttttgctaaaacactgtaagaagttggaatataaacaatatgctttggtatcataatcacagtgcattgcacaaagagaaaagtggcattttccatcgttgtactttataactttgatgtgttgcaagctatagtgcatccgtggtggtacctggcaggaat

SEQ ID NO: 393677 - DNA, 368 bp, Homo sapiens
tctgttttcttattacttcgtttgatggttttgtatattctgaatacaagtcatttatcagatatatggtttgtaaatatttttatcctagtatatggcttgcctttcattctctcagcacagacttcttaaataacagtttttcattttgatgaagcccaatttatcttctttcttttatgggtcatgcttttggagttgtagttaagaaatctttaaccccagaatccttgactaactccagatgacaaagatttttctactacattttcttctagatgttttacagtttggagttttacatttgagtctatgacatgtttgagttagtttgttgcaaagagtgagagggaggttcaaactcctgt

SEQ ID NO: 393678 - DNA, 325 bp, Homo sapiens
tggtgggtctttatcttcattcattaatcacattatcagacattccctgtgtgtcctgttctgttatacatgctgaagctacaaatcaaacatccgctttgcctccaacaagattccctgttcctaagtgaaccaaggaatgaggtgttccacgcctgagctcacatcttttttttttttttctgtagcccaggctggagtgcaatggcgcgacctcggctcgccgtggcctccgcctcgcgggttcaagcgattctcctgcctcagcctcccgagcagctgggactacaggcgcccgccaccatgcccagctaattttttgtat

SEQ ID NO: 393679 - DNA, 245 bp, Homo sapiens
aggcactttttcagttagcataatttttgcttagtgtttgtattttataaaaataacctctctttttggaatatgtgtatatgtaaaatatatgggatgtacatatattgtgtgagagtcaagtatttttggttaagtcagcttcctattctgccaaagaaaagatcacaaaagacagttatacttctaatcatttggaccacgtttatctcgtttgttgattaacgaggctcttctatttgtat

SEQ ID NO: 393680 - DNA, 348 bp, Homo sapiens
ttgaatttggtgggcttattatactttttatccctcaaagagcctggcacaagtgttaagcacaggtgatgttcagcagatatgtgttgattcaacacctgccactgcagctatctctgaccctgtgtggagcaatgattggcagaacagactgacacttggttatcaggctgtttccataggcacagaacaaaaacaagaagatagtatccttgaaaagccagtcatagcctcttctctatacttgcagtcctgcacataagggacaacttggtgagcagagtgtgagccgaactccaactccactcaacctttggctggtgttattgctcagtgcacaatctggac

SEQ ID NO: 393681 - DNA, 147 bp, Homo sapiens
actttaaaaattaagtcccattcacttatgtaaaagcattcatttaatttcatctttcagctttaataaaaaatgcgatactacaattgaacaaatatccaaacaactataagcattaacaatgtacattttaggtcggggtcccca

SEQ ID NO: 393682 - DNA, 294 bp, Homo sapiens
ccgactgtggacatgcaccctggacctgtttgtgactgtgaacccatggaggaggaggtggctgttgagggatccatttcctgtccgggctctgatgccgtgatgcgtgtgcgtgcatgacactgtttgaatcagtgtctggtgtgcggtggttgcgaccatgaccctgtggaatatatttgtatatgactgtgttgtgccaggtccctattgaagtctctgctcgtgttgtgtcccagtgaggctccgaggctgggtggtgtttacgtgatgggctgacactttctctatttg

SEQ ID NO: 393683 - DNA, 485 bp, Homo sapiens
cagcctcagtggcccctgacgatcccaatccctaccttaatcctgcctaattggtaatgtgcccatgtacccacagcaggccaaaggagttagcatgcccaggggcaaacaggagcattgtgaaaccctgttgtgtacatgcataggaacacattctggcaaacacaatatgggtacacacgtgtacaaacacaagtctataagccatggatatgaatatccttcagtgtggtgtacatatactatatgtatgtcgtaagccatgtacatgagcatgcctgttccttgaacataggtgcaaatcctctgtgtgtagatatgtaaatcgtctactgaagaatgcccaatctccagtcactcctgtaaagctagagtgtatgtgtataagcatacacctgtgcactatgcctgtccatgtatgtaaacccaccacgtgtttgtaagccatgtacatgagcatgcctaattcccagacatctgtttaa

SEQ ID NO: 393684 - DNA, 494 bp, Homo sapiens
  misc_feature (419)..(419): n is a, c, g, or t
ttaatttttcaattattcctgttgtaagggaactagtaggatcttcatttctagaaagatttatattgctaatttagggtgtcctgcacagtgctattgctggaacccaacatcttttccagcctcagaggagaccaaagtggacagtgttccagttaggggggaaaatggaattcacaagggcatggtggtatagatgatggcagcttcagggtgggggaagtgacaagctggacatgtgggctgggtcctgaggctgcacagccagaaggagcaaaccaaggaatttggactttaccctcagggtcaacaaagccatcagaacctacgaataggcagtggaatcttcatatctggctcttagaaaggttttctggtgacagaatggaaactagattggaggtgaaagatatcaaaanccccaccagcactctggaggctcctgtcgttccagtaccttcctatttgtgctttaagccaagaggcagtaacag

SEQ ID NO: 393685 - DNA, 373 bp, Homo sapiens
cccttgcctgcctcaggccaccagctttgtgcctcttctctccctccagcccttgttcctcagcttcttctgaaaagctttccttgagcaaacccagctccgccttgctctgtctggcgttgaatcattaaatcagcgacgatttggtgacctcgtatatactcagaacatacctggagctgtgaggggaacaggagcaaaccacaggcagctccctagtgaggcgagtgcagtgtcaccaggacgtgctgcttggggccagcctggtgtggccagtgccttgcattgtatgcggagctgcgagagacgagacatctaccaagagtttctgcgttaacatcactgttggctcttcatagctgagcaaagcaat

SEQ ID NO: 393686 - DNA, 858 bp, Homo sapiens
agacaccatcaagggtaccaacatatgcaacataggagtctccaaagtagaagagaaaaggaaagaggcagaaaaaatacagtgttcccccattatcagcagttgtgttttctgcactttcagttacctctgggcaaccacagtccaataatattaaatggaaaattccagaaataattcacaagttttaaattgtgtgtagttctgagtagcatgatgaaatgtcattctgccctgctctgcccacccaggacatgaatgatccctttgtccagcatatccatgcagtatacactatctgcccattaatgtacaggaaaaaacatagtgtatacagggtttggtactatctacagtttcagatacttactgagagtcttggaacgtattccccacagataatgggggagcaggagactactctatttaaagaaataatggctgaaaactttccaaatctaattaaaggaatgaatctacacatccaaggagctcaacgaattccaagcaggctatatgccaaaagatctacgctaagacacattacagttagattgtcaaggcatagacaacgagagaattttgaaggcaggcagagagaagtgactaatcagaatcaagagatccttaataaaattatcaggtgatttctcattagaaactaaggaggctcaaaggcagtggggtgacatatttaaatgccctggaaggtggaaaatacctggcaaccaagagttctatatgggacaaatctatccttccagaataaagcaataactaagacattctcagatagacaaaaattgagagaattctttatcagtagaactaccctaaaagaaatgttaaagaaattat

SEQ ID NO: 393687 - DNA, 792 bp, Homo sapiens
ctctttagaaaatgtgtggactccaggcaaagtgctgggattacaggcgagagccactgcccctagcctacaactttaataagccaattttttttttctgaagagagttattaattggttttattgtattctccaattatcgggtgttacagaattcataatattgataagttagtctgggttgaaacactgtcttccacagtatttattgagtgtgtattgtgagttgggctttcttcttttgatgggagactagagtcttatttgaggaaactgacaagatgatacttttttcttagacctctaggtgaatctgatgttccaattgcttgaaaggagtatcagattcattctaggtatcttgatctcctgagactgaacctgtttggaagattgtaatcttgaaccatttctgacaggtaaatatgcaggttgagcatctcaaatctgaaaattcaaaatctggaatgctccaaaatccgaaactttttgagtgccgacgtgacagtccaaggaaatgctcactggtgcatctcagactgtagatttttggaattcgcatggtcaaccagggtaaatagaatgcaaatattccaaaatccaaaatatgaaacactctggtcccaagcattttggataagggattctcaacttgtactttgattcctagatcatagctcatctgatattaattgtcttgcattttgctgtaatgattttttgggttatttgttttttagagacagggtcagcaccataagacagagtgagaaaacaaaagtaaaaaaaaaa

SEQ ID NO: 393688 - DNA, 367 bp, Homo sapiens
tccagcctgggtgacagaatgagactccgtctcaaaaacaaaaacaaaaaaaacccttaattttcttgttccctaacccctcaatcgccagtcaatggtcaagtccttacaatctttccttggcaatatcacctcagcatttgtatcctctttcctccattctcattgctgatgatgtgttcaggccctcgccctcattatatcttgcctaaaccattgtggaagtctccacatggtcattctgccactctactccatcttactctcttttccagattgcttttaatcatagttttgatcatgtcactatcttttgtaaaaccttctaccattgggaatgtaaaatggtatgatgctatggaaaaca

SEQ ID NO: 393689 - DNA, 410 bp, Homo sapiens
cttctttcctttctcatacagtttttttctcttgacttgtcatagtattggctacttgtcattctatgtgaagaaaaattaaaaattaaaattacagcatgaattcaatttaaaaattaaaaaactaagcagtgaagtttttagcatgaatttactcttcatctttttattatacaatgttgtttttgttgttgttgttgtttgttttgttttgttttgttttttgagacaggatctcactctgtcacccaagctacagcgaggtggtgtggtcacggctcattgcagcttctactttctgggctcaggtgatcctccccctcagcttcccaagtagctggaactacagatgcgtgcctggcaatttttttttgtagagacaggatctcaccatgttgctcaggctggtc

SEQ ID NO: 393690 - DNA, 417 bp, Homo sapiens
ctaaagacccttttcctccttttctggaaaacatctctgttaataaggatggcctgctttagtgtttgggatagttcccaagttgttacgcttggatttgatctgggttggtgttgagtatctgctctcactattctcctatatgccagtatatgtgtcccaatttttcctttaatgtcaggtgtccctttaatctaaatccagttttgtctgacagagctctcccatagtatccttgatactgatatacatccaggacttgttgaaaactgttacaaatcaagctgtgtatcttcagacttgtcaaatctatcccatgattaaataattctgcttgtgagatctgcttggactctgtatgattttcctgatcttgataccctgtgaggaactcattagttacttaagtggtattac

SEQ ID NO: 393691 - DNA, 452 bp, Homo sapiens
aactgttccctctgagatcaccaacattctttaatgctatatcctatgtaaataccttggtccttgacttatctgatctcaaacagaatctatacaaataaccattcctctcagtcaccaagtgcagcccatactcaagggggtggtaggaggtggggggttaagttccacttccttgaggaggggagtgtctgcacaaattatttggaattctgtacaagataaataagtggggacagttatttatttaaccatttattttaatcagtgtggacttagggatatttattttatgctttgggtcataatccaataatgcaatattatttattttattgctcaaattgttccagcttcagtcactgggtgctctttcagttggctcctgtatccctttaccaaccccctgtccttttgcattttgcatattttcttattttctggcactctac

SEQ ID NO: 393692 - DNA, 320 bp, Homo sapiens
ctttacctccctctcattgctacaaagactagattgattttgtggtcccttcccactccaaaattacatgatgccatagagacatgttaaagaagaatctttatcataaaatcattagcttacggctggcacatttaacaagcatggtgctctcatgcaattcctgtagcaaagacaacctctacaagcaaatgagccagccatttctacttgttctcctgaaaccatcctcaaaggtgggggactctcttaggaagtagcagctgagatagcacttgagatagacacagatttaggcaatacaattgtccatctgatta

SEQ ID NO: 393693 - DNA, 433 bp, Homo sapiens
gcacggtatatcacagacactcaagtgaatgccaagtgaatgactgaccgaatgaatgaatataaaaaactaagtaagtgtattttaaaaacagattttagatcaggcatggtggcttgtgcctacaatcacaatgacagagtcagactgtgtcttaaacaaaacaaaacagattttggcagagagaagcgatctcacaccaagggatggtgagaccctggagaagaggccaagccaaactaacagcatgtgactgtgctttttgagagtccctcagaccagtggcagctaccatggcacagctgtcgtacggtgttaaggctctggcttacccactgccaacagaaatgggagaagaaagaggcaggaaggaaatgggtagtgcagtagtgagtacacacagtgagaactggatctagatggaaaagcaatt

SEQ ID NO: 393694 - DNA, 474 bp, Homo sapiens
gcaattctcctgtctcagcctcctgagtacctgggattacaggtgcccgccaccacacctggctaatttttgtatttttttagtagaggtggagtttcaccatcttggccaggctggtttcgaactcctgacctcaggtgatccgcccgcctcggcctcctaaagtgtattcttttttgatttattcccagtctcttggctgaaacatggtagctcaccagcatttctactcccatttgtccaactgacggtatcttttcacatctctagagaccagaaggacttcctcttcttgaatttcctgttcagtattctttcttggcttggttccttggtgagttttgaggagatggtgcatgggtgtgtttttcggctttgttttagtatgactcagggttgccaccatgccttgtacggtctcctagtcatagtattaaagtttccgcttagcaggaaaccagaaacttcctttct

SEQ ID NO: 393695 - DNA, 440 bp, Homo sapiens
tatataattttcccatcataaatgtaagcatcatttcatgtttcatttaaaccccctttttaagaatcacaaagatcctaaggcgtttcatgtcagagacataaggcaggccccacactggggttttttttcggtgatccataacgtgatgctgaaataaaagtggcaaacaatttttaacactgcatatgctcaaagacctctgccaagaagggggaaaaatagtcttggcaccagaagttaaagtgcaacagtttctttgtgatcagtaatgaggaaacaagtggctgtgttctcgatcttgtcaaatcagcatgagagcagcatctgaaccactcaggaggctggacgtgcatttctacagtggattcctaattctgttttctggggtggagaaatatgttcagcttcttcagcagtttgtgaatcatgtgcctgaa

SEQ ID NO: 393696 - DNA, 483 bp, Homo sapiens
ggcaaggctggtcttttgctcttcagtggctttagttagtacttgcctaatacctgaaggtcacagggcatttgtaagcatgtaagagttttaatcatttgtactgtactttgataaagaagggttcagtgacttgccaggcttgcagaataggtttccaaatcctgaatataacagctagagaatctgatttataatatgttaattctccgacttgttttacttacaaattagtttgtaaaatgcctttctaaatgtatcttaaaggaagaattcagaattaggagctaaaactttattcaaagtcaccatgttgtaatcacaatattcacaaagcatatgtggttatttgtaccaaaaactctacctgattatccaaattggtgtagtgaacagttccaactccgctattttatagggcaatactctttgaaagtataaaccaaattcacatcttcaagttctagaatattaaaataagtg

SEQ ID NO: 393697 - DNA, 334 bp, Homo sapiens
aaacacaccagcccctaaaggctgcagtgcacctatccatcaacacccgccaagccagtctggcaggcatccgtcacccagcaagtggtcccagtaacttcccctgcaggccctaggtctgactcttaacctcacactatcatatgtacctagagacatgagcacaattcaactcaatcaatgtttattaagcaagctctttgtgctgaatgctgtattcttttcttttaattcttcagccatagtcctggtcacaccaaatgcagcttggtttagttccccaatcatcccagccattcgggtccctgcactgcagctccatccagtctctcta

SEQ ID NO: 393698 - DNA, 228 bp, Homo sapiens
agtttacagcaggagtcagaatgagctatcttctagaaagaaataagaatggaacagcattcaatagaacacccatgaacaccaaaggaatgagggaaatattgttgcattaacattttccagaaaagagccctttttggtacctaagggagaattacccaactactattttataaaatgaaattattttcttcaatagttagttgttttcaagatgggccccagtgt

SEQ ID NO: 393699 - DNA, 522 bp, Homo sapiens
atcagtgacaaatattgctgattggtcaaaaaatgatgggaactgagaatcaactattagagggcaagtattaaagctatgctatatactgaaggcttttttatatagaatgcaagactatttaggatggtcttgttagtggctgatagagattattggcataagtgttttagtcactctgtactcccaacctatcctttgacactgtcctaagattgtagagagaaaaagtactattgtaatatccccaaagagaacattctactctaatccaagaaaatctcctttatccgaaaggatttacatggaggaagtaaagagccccactcttaaaaaaaatatgacatgagtcttatttagaacagtagttttataatacttagaaaattatagtctatataaaagcacatgtatttacctcttgtccagaacttccatgtttcattcctgacacttttccttttgtactgaacttattccctaaatctaaagtactgttcattaaaatacaatgcaagccac

SEQ ID NO: 393700 - DNA, 169 bp, Homo sapiens
ttcaagcttctaacgatagtacggggacatggctaggataaagcaagtagaagtgctgggattacaggcgagagccaccgcacccggtcggaaatgctattctctattggcacttggaacaaatcatttacaagctcaaaatgtttccataatatattttagaaaagaa

SEQ ID NO: 393701 - DNA, 294 bp, Homo sapiens
ctaggaggcagaggttacagtgagccgagatgttgccactgtactccagcctgggtgacagagtgagactccatcaaaaagaagaagctggttgccaaggagatgtcagattgcaaaaagctgttctttgtgttacaactcagtaaggagccagcataaccatataaagagggaagttcatttattcattctacagttgtttactgagcttctgctaggtaccagacattggtctaggttcttggaatacatcagtgaacaaaacagatataaaaaacccctgctgtcatggag

SEQ ID NO: 393702 - DNA, 592 bp, Homo sapiens
tccaggtaaaaatccagcttcttcacaagtagtaaaaaggaggtaataatgtacatggcatcccaaattattcattttgtcacaccattcccctgcattcgtcaggatttcatttggctcctttttccaaccttagcccagcatgctagcaggtatttatcaatatattaaatgctacttaaacttcctaaaatgatcccagaacagtaaaggggaaaaaagcttctgatttaaagctaaacatacacagctatccattagcatgacaatgtctgcattttacttagacattgccattaataatgaaatgatgtatgatttccactccagcagctcttccttccttgcacaatcaattatacatttaagaaaatacttagtggatagaaagctcctctaattaagcatcacttgagggagcttgtgagattcttaaaactagaaaagatatctcagagaagtaggatggtggagggaaaaaaaatccactcaaaatgtttgagtcttgattagacaaactctcaggcattctgaaccactatgaaaggaaaaactcacacacacatatattttaacccaatagactttgagg

SEQ ID NO: 393703 - DNA, 509 bp, Homo sapiens
cgacgctgctagtgtccatatgcataagtagctgggtatttctgcaactagggaaatttaaaactcaagaaaattgctctgagcactaataacaaatctcttacagttgttcaaccctgcacagctcacaaagtgttttcatgtcccttattagaagcaaaggggtacagtcaaagggcaagaaccttgccacttaagaaattgtgaccctagtcaagtaatttaacatctatgggcctcaattttctcatctctatagtggaaacaatagtacctaccttgcaagttgaaatcatgcccataaagcttgcattctacagcatgtgtgcaataagacatagttggattatgcttattaattgtctttatattggggcgatactgacaaggaccaactctgtgggacatcaacattcactagatcctcctgattaactttcggcctcagaagaaggaacgtgggcaacattgtgatggtcccaagccagcaaatgtcaacatttccaaaa

SEQ ID NO: 393704 - DNA, 578 bp, Homo sapiens
cgggaggtggaggttgcagtgagccaagatcgtgccattgcattgcagcctgggcgacaacagcgaaactctgtctcaaaaaaaaaaaagtcaaccatgtgattagagggctggggctttgagccagcaacaccagcctgagctcctctgggaaggaaattgagttcaatcatgtggccaatgattccatcaatcacacctacataatttaaaaaccctaataaaaattttgaacaccaaaacttggctcaaattcctggtttgtaaacatactgatgcattgggagggtgagcccagaaagaagacatgaaagctctgtatcaggaccctcccatatctaatcctatggatctcctaattatgtcatctacaataaaactgtaatcattaagtatagcactttcctggactctgtgaggtgctctagcaaattactgaatgtaagagggtagtaggaatccttaaatttgtagccagttggtcagaaatgtgggtggcctggggaacccagaacctacaactgggcagttcagacagttcttgttggggactgtgatcttaacctgtggtgtctgtg

SEQ ID NO: 393705 - DNA, 562 bp, Homo sapiens
gtctacactaggaagcaaaatgattcagttgctaatttgaagttactgttagtgggtaagactcttaaggtgttataagagcagaaagcaggtgtatctaatccagttttttgtttttaaagtgtggggatgctttttcgaagaaacaagacctgagcagagctttaaaggatccaagagtgggatgggtggatgagcacttcaagtaaatgcgacggcatttaaaaaaaaaaaaaacaacaaaacaaaaacccagcattttaaaaaaacataagatggtctatagcatcctcaaaagttaagatttgtaaaagaacttcaatgtgattttctaaaaagccctacggaatgcaaatatgcacttgggcacatttcagaggtaaatgtccatccattttgacaagagcgccatgtaatctcagcactttggaaggcgacaggatggctggtagccaggagttcaagaccagcccagtcaacatagagaaaccctatctccttaaaaaaaaaaaaaaagagagagagagatttgaatccccttctccctcccaaatattagaac

SEQ ID NO: 393706 - DNA, 606 bp, Homo sapiens
ttgtgacaatgataagtgctacagacataaagggcacatggtgctaggagagtccatcacagggcaatctgacctagtcatgaaggtcagcaaaggctctccaagtgaccatagaactgagaactacagggtaagcaggattaagtagaagaattggggaggaaaaaatgttcaggaagagagggaagggcacgcacagggcaagataaagttgggaagtaggcctgaccatgcagtgctcttgggcatgctgaagattttgattttgattcttagaggttctaagcaaggagcaggtgacaggatcagatttgtatttttaagagattattttggctgtggttacagaagatggaagcgggggatgggatgagcaccttttcgctgactctgagaaggaggaggaagatattgaggacattgaagaaaatactagacctaaaagaagcagacctacatcgtttgcagatgagctggctgcccgcatcaagggggatgccgtgggtcgagtggacgaggagccgacaagtgagccccagccgcgttgatggggagtacggggggagtagtgcaggggcctctgctgggttcaccaaaggcggattt

SEQ ID NO: 393707 - DNA, 345 bp, Homo sapiens
aagcagttctcctgctcagcctcccgagtagctgggactacaggtgcatgtcacctagcctggctgatttttgtatttttagtagagatagggttgtgccttgttgcccaggctggtcttgaactcctgagctgaggcaatccacctgccttaggctccgaaagtggtaggattacaggtgtcagccacctcatctggcctcaaagatgcgttcttatagttggtctgtgtggattgggatcaaagcacacatattactattggtcattctcccttttaatctcctgttttgtaattataagcccctttccatttttttctcccacaccattgatttctgtagaa

SEQ ID NO: 393708 - DNA, 238 bp, Homo sapiens
actcctaacttcaaggaatccttcccatttggcctccaaaagggctgggattacaggggtgagatactgcacccggccttgttttttaaataacaactaattgcataataccataaatctattaagtagataaattgggagtaattatttacattacttatcataaaaggattcatctcagagctctgctaagtgttgtaatgccacttcttcattcctgcttctcagtctgtatgtg

SEQ ID NO: 393709 - DNA, 374 bp, Homo sapiens
atccattactgactagtccaacacatcatgagggttcaaaccagaggggagccacatccaagcactctgcagaatctcaaaaattcactctcccccatactctcacttttacctagagcctaatcactctatagccactattaaggctctcattgacataattatggcacaaaagccaagcccatcagcatgctaaataaattatgccattgagattttaaaacttgctcagatttttcagtctccttactaaaaatgttctttcttgaaacaaagagtttcttcttatcctttaaggataaggaaaagccagttactcaatacaaaatattatattgaaaattttgaataactttgaaagacaaataaataaa

SEQ ID NO: 393710 - DNA, 491 bp, Homo sapiens
ccaaataaaacccaagaaaaatgttcaagcaagactttcccaatggttacttctaagcaggctgctcatatgccactgccatcctttagcacattgccctaacttcattaaacacttttaggaatatatatgtgtgtatatatatgaaaagtctttatttaataaaaccttatactttaggcattatgttatatttccaagaactttagtcatttttcacattaaagtcttgaacttccctaattaaactgtgaatattaaaataactctgtgtaaatagcaaataactgggagtgagtgacattcagtggacattcataatcagttattgaccaccccttaaatacacacaccacaaatacaatctccacaatgttccctactctatcgttcaatacattttatgcatcgattattacatactaatgggctgtgtaatatcctttccagatttcattgtaggtattttattaaaatgaatagattcaatt

SEQ ID NO: 393711 - DNA, 457 bp, Homo sapiens
tttctgctacttgagcccatcttcccctctgcagttgcaatggaatttccaaatgatttatctgaaattcacagctgacatggtgctcctctgaggctcacagacggaaggaagcccacgacccttagcacagtactgggggctctttctagctgcatcccgcccccttgcacttctgccttgggcacgccctttgcttttcattccctccacacactgccatgctattgtgagactgaggttctgcacgctgtgtcccctgtgcctggaatgcccttccctcacttctgcgctcagtgaatccctgtccttctgcggccctcgcaggcagcccctcctcctgctctcgtgggatgctggcacacttgtgtcctattttccacgtgatattgaatacgtctattcacaggactacatgtaccccgagtcgagggaccaacccttctttacatcgcta

SEQ ID NO: 393712 - DNA, 195 bp, Homo sapiens
aagggagccctgctgaggaactagatcacttttctcgttcaagccgagcccaccctgcagctgccgccctgcccttccctctgccggccactgggcttgaactgccattgcactgggcctgagtttttcaggaaagaccggaaatctttgactaaaagagaaactcaggtggaaagctgtgtgtgtgtgcgtgtg

SEQ ID NO: 393713 - DNA, 431 bp, Homo sapiens
cttaaatacaacacaatttggattcttatccttatttttcacagctatgattacctgctgtatacaaggaatcgtaagaaaaatttaaaaagtcatatatctacctgacaggacatgaaagtaagaatttttcatcaacctaaattctaggccgggtgcagtggctcatacctgtgatcccagcactttgggaggccaaagtggggagatcacttgaggccaggagttcgagaccagcctagccaacatggtgaaatcccatctccactaaaaataaaaaaattagccgagcatggtggtgggcgcctgtagtcccagctactcaggaagctgaggcaggagaatggcatgaacctgggagatggagcttgcagtgagctgagatggcgccactgcactccagcctgggcgacagagcaagactccatcaa

SEQ ID NO: 393714 - DNA, 276 bp, Homo sapiens
atgatgtagtgaggacatgcactgtggcgtgggatgaagagggaccggggagacttgtctaggaggcaccagctgtaggtcacgtgagtcttggtttctgacctagctgatggtagtgccacttgttgagatggggactgagcaaagaggagtgaatgtggtaagcacaatttatttcagacatatgtttgaggtgcgtttggaacatccaggtggggatgtgtaaaggcagatggatagaatagctgagattagttgtctattgctgcatgacag

SEQ ID NO: 393715 - DNA, 369 bp, Homo sapiens
gcaggagtacagcacagaccaagaccacagtcttggtcccgaggagcctgtggagtcacagactgggaccaagactgcctcccacaccctccagtcaggggtggctctagctgatttcctgggcaggcacctatctgtcctgggcacaccctccctagctcagcagaagcaaggccttcctcgtcccagcaagtagctgggctgggggaacgtggcgcctgcccacacagtgtcccatgtcccactccaccgctcacccacccaggcccacaggcacctatgccagggcagggctggggccacgccacaccctggcagccctcacccggtggcctgacaatgccgcttcactcccaggcacaagtcgga

SEQ ID NO: 393716 - DNA, 520 bp, Homo sapiens
gtgcgcatctgtaattccagctactcaggagtctgaggcaggagaatttcttgaacccaggaggcagaggttgcagtcagctaaaatcatgtcactgcacgccagcctgggtgacagagtgagaccttgtctcaaaaaataaaagtaaaaaagggctgggcaggaggccgaggtgggtggatcacctgaggtcaggagtttgagaccagcctagtgaacatggcaaaacccgtctctactaaaaataccaaaattagctgggaaactttcagccacagaccacatgcagcaatatacaacatcaggaagtggctatgaaaactaactgcctgcgtaaagcctttcagcatctttccactcctaagctctccttagacggctctgcactgtctgtctcctacgcacctctccacttcatcccagccctctgtcctttgctgactacgcacctgcctcacgggcatcctctgttcgtgagcatgccaaaattgtctcccacctcacagctgagcacctgatg

SEQ ID NO: 393717 - DNA, 339 bp, Homo sapiens
ctaggatgccagattatccgtttcttttttgtcggattattttcaagtattttttttctcagaaaggatggacaggtggtacgttttctgactccttaaatgaccgaaaatgtctttcttttgcccttaagcttagttggcacttcagctgaacataatattttatgtccatgtatttttgccttggatttttgaaagcatagttctgttatctaaattgagcatacagtaatgctaccaaggagcccatcagtgtgattcttgtttcttcctagataacttgcttgaagcttgtaggattttctctttaggtgcactattgtaaaatctcaacatcat

SEQ ID NO: 393718 - DNA, 328 bp, Homo sapiens
accaaaccaggaacggcagatggatcttacaaacaggatattggttgagctaattggagcaattttaaattgaaatgattgcctttatttgtcttatctttaaactgaatctcaaacttttacctcagttttttacaaataaaatgcaagagggaagttgttttactgttaactgattatagattataatgcctttttcttcatgttcttatttcaatttttcacttttgaaaacgttggacccatttttttaagtgtaactccccaaagaagaaaaaaactctatactaaaatttagaaacctcctaataataactgtcccgttaat

SEQ ID NO: 393719 - DNA, 781 bp, Homo sapiens
atgatatgattacatcccaaaaacccattataaattgaaaatgttaaatcatgaatgcatttaatatacctaacatactgaacatcagcgcttagcctaggctaccttaaatgttctcagaacatttacattaacctacagttgggaaactcatctaacacaaagcctattttatactaaagttttgagtatctcatacaatttattgaacactgtactgaatgtgaaaaacagaattttgtaagggtacacaaagcataatttctactgaattcgtatcatgttcacaccatcataaagtcaaaaaatcctaagttgaagcatcataagtctgggaccatctatatattctatgttttttctgataacaccagtggctactaagtgactaatgggtgggcagtgcatacaccatggatatcctggacaaaggggtgatccacgtatcaggtgggatggagcgggacagcatgagatttcatcattctatcaaatggctctcaatttaaaaacgtatgaattatttctggacttttccacttaatattttccaaccatgattgaccatgggtaacttaaacttcagaaagcaaaaccacaaataaggggagactactgtactggaagttccatccaaggcaattaggcaagaaagaaacattaatccaaattgtgaaggaagaagttaaatcatatctcatcacagataacatgatcttacatgtagaaatctttaaatgggccaagtgtaacgcctcaccctgtaattcaagcactgtgg

SEQ ID NO: 393720 - DNA, 217 bp, Homo sapiens
cctttttcttcatcaaactaacttatggataacggggtttctctcgactcagtgatttgcagtgcatctttgtttcttacaacttggaagtcgcatcatttacgtaatgatcttgaggaagaaagaaaatgcaaagggaagtatgaaatagctataaatttgtttccttttagagtagacaaaaattcgtaaattctaaatgatctttgttattttt

SEQ ID NO: 393721 - DNA, 438 bp, Homo sapiens
cctttcttggcttcaccatgttaattcatcttttgttctttctcaaagatgtcaagcttcctgcctcccttttctctcctactgccacaatctccactttacgtgtatgaccacaaacttaaatgggccctcagcactatcaaaagactcattcgtaatctcaaatcaacccactctccaaaataactaattcactgcttcttctataatacctccaaactcatgctcagctcattcccttgtttcttacttcagtgagcaaatacaagctatcagaataaaacttcatcttcccactccaaaatctacccatatactttgctttcaatattgttaaaatgaatgcacactccctgctcctgttaaaggtcactctctccacttgtggactgcattccatgatttcccacttatttgaaattttgctcctagaattat

SEQ ID NO: 393722 - DNA, 138 bp, Homo sapiens
gcattggttgatgactccagctctcctttcctgaatcatgtcatctcctgagccctgaaatacccagaatggccaggttagagatcatgtaacaacacagcactgggccaagaggaggcccaagttcgatctcacttt

SEQ ID NO: 393723 - DNA, 287 bp, Homo sapiens
aaatgtctactgcaatgcatagcataggcactgaacaactggtaattctctctaagggatcaaaggtcattcactggggagatgcctctaggaatcattatttcctagtaaccatcttcattcacattctggaaagattgttgtctaggaagagaaggcatttttatttaaagaaattttttttctgaaggtatatcagcaaagaaggcatttttaagaaatagttattttagtgactggtttcttttccaaaggaaagttacatgatgcttatgataaatgtttag

SEQ ID NO: 393724 - DNA, 201 bp, Homo sapiens
tactgctccatgttatggacaagaaaactggggctcagagaggggaagtgaccagctcaaggccacccagcaggacagtgacagagcttggctcacatgggaacccaggtttcctggctgtagaggaaggagaagttactgacgtgtgtgagctccatgctccacagtttgcagggggcggtcacccatcttttccccagt

SEQ ID NO: 393725 - DNA, 412 bp, Homo sapiens
ttttcacaggtaacaggcacgggtctggtatggttagcaagctgccgtagttcacagccaggggcccagttctttttaggagagcacctttgcttgcaggtaactccactgtggagtttgcccgaggtgcagctgggcagtaagtgtggccccttcccttccacatctcggctgttccaacaccgagaagctgctttcgtttctccaccaagccccctctcccgggcacttgtccctcctggaccctgctgcctggggttgtcttgcccaccaggtaagacatgtcctagcacagaggaggagagagtacaggtgcccacgtggctagaggtggtgctggctccctcacgggcattcaggccaatgcccactggatgcagacatgagcgagtgagttctcctgtcctttccc

SEQ ID NO: 393726 - DNA, 402 bp, Homo sapiens
tcgctgtgctactccacaaacagtgcccccgtctagagtgtacactgttgtggagaattctgggagtcctcccgcctggagtggacactgttggggaggagtctaggggtgctcccgtctggagtggacactcactgaggagtctgagagtgctcccatctggagtggacactcactgaggagtctgagagtgctcccatctggagtggacacttggggaggagtctgggggtgctcccgtctggagtggacactgttgttgaggattctgggagtgttcccgtctggagtggacactcactgaggagtctgggagtgctcccgtctggagtggacactgttcttggattcgtagccacacctgatgtccttgggctcttacctgcttgcttcaccttctcc

SEQ ID NO: 393727 - DNA, 414 bp, Homo sapiens
agtgaccagggaattcaggtagatcgtgcttttctgtttgctaggttgagagaaatttgacactgggcaaatggaaatttgagaattaccccgtggtttcaattacccatctctgtatattcccatttataagagctggagatttgactgacaggtgtagttagtccaaaatttagaaaggggggcaagggactaaataaaaacttaaggcagccacctaaactgcaagagcaggcatttccgcagaagggatatttgtgtgtgagacttctaggagatgggcatgaggtttttaccaggccgacgcgtgtgtcaatatttcatcggtagtatttctcaggatccacgtctttacagtactcttttcctaattctgagggctgcttctgcccctgctgtattaacaaattcctc

SEQ ID NO: 393728 - DNA, 270 bp, Homo sapiens
ttctaactgccttagtttacaagagccaataaaattcttttttagttaagccagtttgagttgggcttctgacacttaaatagaaatatcccaaacttttacacagactaaatactgtccacgaatgtttgagaagatgcactgcactgaggataaagtattctcaaaatgacttaacagttaaaagtatgtattatttgaagacttagatcatttcttctgtaacatagctttccatccttccctctcctaattaaagagcacaaaaag

SEQ ID NO: 393729 - DNA, 2297 bp, Homo sapiens
cactttcactcccaaagacatcctttggtgatacttactgtgggattcagagtggggtgcagaggacgaccctgcaaaggcacggactataagagagatctgtgcagctgcgcctcagggggtgtcctgggcccctgggcatgacaggagggggaccacttgcagttctactggaaaatttaccacccttccagaatcctctgaagatatacaggtcgcaactagagtgagacccgagtactgccttgggtcagaatggctagagaaccgagaaaaaacgcagccctggacgcccagtctgcagaagaccagacggggctcctgaccgtgaaggtggagaaggaggaagcctccgccttgacggcggaggtgagagcaccctgcagccctgctcggggccccgaacgctcccgccagcgcttccgaggcttccgctacccggaggctgcgggcccccgcgaggcgttgagccggctccgagaactctgcggacaatggctgcagcctgagatgcacagcaaggagcagatcctggagctgctggtgctggagcagttcctgaccatcctgccggggaatctgcagagctgggtgcgggagcagcatccagagagcggggaggaggtggtggtgctattggagtatttggagaggcagctggatgagccggcgccgcaggttcccgttggtgaccaggggcaagaactgctctgttgcaagatggcactattgacacaaactcaagggtctcaaagtagccagtgccagccaatgaaggctctgttcaagcatgaatctctgggatcccagcccttacacgatagagttctccaggttcctgggcttgcccagggagggtgctgcagagaagatgcaatggtagcttccaggctcactccagggtcccagggtttgctgaaaatggaagatgtggccctgaccctcactcctgggtggacacagctggattcatctcaggtgaacctctacagagatgaaaagcaggagaaccatagcagcctggtctcccttggtggtgaaatacagactaagagcagggacttgcctccagtcaagaagcttccagaaaaggagcatgggaagatatgccacctgagggaagacattgcccagattcctacacatgcagaagctggtgaacaggagggcaggttacaaagaaagcagaaaaatgccatagggagtaggcgacattattgccatgaatgtggaaagagttttgctcaaagttcaggcctgactaaacacaggagaatccacactggtgagaaaccctatgaatgtgaagactgtggaaagaccttcattgggagctctgcccttgtcattcatcagagagtccacactggtgagaagccatatgagtgtgaagaatgtggtaaggtcttcagtcacagctcaaaccttatcaaacaccagagaacccacactggggagaagccctatgagtgtgatgactgtgggaagaccttcagccagagctgcagcctccttgaacatcacaaaattcatactggggagaagccataccagtgcaatatgtgtggcaaagcctttaggcggaattcacatctcctgagacatcagaggattcatggtgataaaaatgttcagaatcctgagcacggggagtcctgggaaagtcagggtaggacggaaagccagtgggaaaatactgaggctcccgtgtcttataaatgtaatgagtgtgagagaagtttcacacggaatagaagtcttattgaacatcagaaaatccacactggtgagaaaccctatcagtgtgacacatgtggaaaaggtttcactcgaacttcataccttgttcaacatcagagaagccatgtagggaaaaaaactctttcacagtgacccatggtattcatgccaacattggtgctcatttgtcactgaactgaagccaccctggagcccttaatggttacagaaattgtggaccagggctttatttaccactatacatcatcgggtattagaaaatgtagtctggctgagatgatgagttatcttctacattctagaaagtgattggaagaagtcatttgataagaggccatgggagagtggtctggaagttgtaggacctaaaatagtttgttctcacccagtgtatttaaatggccttctggacttgttaattgccctcagccagcactttaggacatctggttggatggctctgatgtggggggctgctgctctgaccattcattttgcctctaatgaatctttcacaaattggtcagatccatgag

SEQ ID NO: 393730 - DNA, 2293 bp, Homo sapiens
cactttcactcccaaagacatcctttggtgatacttactgtgggattcagagtggggtgcagaggacgaccctgcaaaggcacggactataagagagatctgtgcagctgcgcctcagggggtgtcctgggcccctgggcatgacaggagggggaccacttgcagttctactggaaaatttaccacccttccagaatcctctgaagatatacaggtcgcaactagagtgagacccgagtactgccttgggtcagaatggctagagaaccgagaaaaaacgcagccctggacgcccagtctgcagaagaccagacggggctcctgaccgtgaaggtggagaaggaggaagcctccgccttgacggcggaggtgagagcaccctgcagccctgctcggggccccgaacgctcccgccagcgcttccgaggcttccgctacccggaggctgcgggcccccgcgaggcgttgagccggctccgagaactctgcggacaatggctgcagcctgagatgcacagcaaggagcagatcctggagctgctggtgctggagcagttcctgaccatcctgccggggaatctgcagagctgggtgcgggagcagcatccagagagcggggaggaggtggtggtgctattggagtatttggagaggcagctggatgagccggcgccgcaggtagaaagaacaggtttagtatctgagcgctgtggtctgtttcctcctgaaatcccagatcggagcgaggggcattcctttaaggtccaggagttcttcatctctttttgtactgtgaacctccttggcagtaagggtttgctgaaaatggaagatgtggccctgaccctcactcctgggtggacacagctggattcatctcaggtgaacctctacagagatgaaaagcaggagaaccatagcagcctggtctcccttggtggtgaaatacagactaagagcagggacttgcctccagtcaagaagcttccagaaaaggagcatgggaagatatgccacctgagggaagacattgcccagattcctacacatgcagaagctggtgaacaggagggcaggttacaaagaaagcagaaaaatgccatagggagtaggcgacattattgccatgaatgtggaaagagttttgctcaaagttcaggcctgactaaacacaggagaatccacactggtgagaaaccctatgaatgtgaagactgtggaaagaccttcattgggagctctgcccttgtcattcatcagagagtccacactggtgagaagccatatgagtgtgaagaatgtggtaaggtcttcagtcacagctcaaaccttatcaaacaccagagaacccacactggggagaagccctatgagtgtgatgactgtgggaagaccttcagccagagctgcagcctccttgaacatcacaaaattcatactggggagaagccataccagtgcaatatgtgtggcaaagcctttaggcggaattcacatctcctgagacatcagaggattcatggtgataaaaatgttcagaatcctgagcacggggagtcctgggaaagtcagggtaggacggaaagccagtgggaaaatactgaggctcccgtgtcttataaatgtaatgagtgtgagagaagtttcacacggaatagaagtcttattgaacatcagaaaatccacactggtgagaaaccctatcagtgtgacacatgtggaaaaggtttcactcgaacttcataccttgttcaacatcagagaagccatgtagggaaaaaaactctttcacagtgacccatggtattcatgccaacattggtgctcatttgtcactgaactgaagccaccctggagcccttaatggttacagaaattgtggaccagggctttatttaccactatacatcatcgggtattagaaaatgtagtctggctgagatgatgagttatcttctacattctagaaagtgattggaagaagtcatttgataagaggccatgggagagtggtctggaagttgtaggacctaaaatagtttgttctcacccagtgtatttaaatggccttctggacttgttaattgccctcagccagcactttaggacatctggttggatggctctgatgtggggggctgctgctctgaccattcattttgcctctaatgaatctttcacaaattggtcagatccatgaggtcttttactcttctttgtgccttgtatgataggtgctaataaacatttattaaatgtaccagtaaaatggcctttgtaccaaaaatttgat

SEQ ID NO: 393731 - DNA, 376 bp, Homo sapiens
tcaactccacagttggcagggggttgggaatctaacctcccaatagggcctcccctcctgtccagaatcttcttcttttcttcttctcatcctctctgtgggtatcaccacaattcatcactgtcaccaaagcctgggagtcctcccagactccaaatccctaccctctctagtcaccccaaagccccgggcttccctatccctgccccttctatgatcaccagtgtatcaagaggaaaagctggaaatgtacatcagtttcacttagtgccagccaatgaggggcactcgtgacagatgggaaggcagatgaggagaagcccttcctcctctggtgttggtggacatctgcatctgcagacatgaggccagcata

SEQ ID NO: 393732 - DNA, 421 bp, Homo sapiens
gtcagacagctcatcactgggcttgcatttcttccaatcaaccttgggaaagttcctaaacctctctgtacctcagtcttaccatgtgcaaagtgggagtgaggaccatacttctgttatagagctttttaaaagaggaaatgaggttggtaatccatatagaacatttcataaagacatcagcttctagaaagcccttggtaaatgttagccacggctgctatcatcatcttcatcatcatcattaccatcattagtagtaacagtaggagtatttaggatgaatagtggtaggatgaggaagatgttgagccagcagggaaagttgtgcatttttctagaagcatcgtactatgttggcattgcacataagtccatgaaaacctatttcttatggaccagaagcacactgtgaacacca

SEQ ID NO: 393733 - DNA, 186 bp, Homo sapiens
gatcataacaatatgtagcgctcaacggtgaagaaaggccgggcttcgggcgacgctcgttttatttaaagtccgaggtagatatttctgagcaataggaagctctcctttactcagtgatttggaaatcaggcttcttctactttatgtctctatcatccctcgtgccttgctgtgtgaatctca

SEQ ID NO: 393734 - DNA, 345 bp, Homo sapiens
caaggaggttatgtgaacccaggcagtctgattcacgggccccctctctgagctaaagatttctttcagaactacctgtgatactaaagcagtgacataccagggcacccttgggcggaaggaagcaccaaaggacagggaccatctagttgctcaaaagcagaagagcaacttgcattgagggtgagctggtatgaaaacacaatcacacattgctcaggacggtttcttctcctccctattcctacctcggccctggcctcagggcagaagttctgcatcagacctcaggaggaagcgtgcgggcccttaagacacaaactcccattctcagaagaaagttgg

SEQ ID NO: 393735 - DNA, 261 bp, Homo sapiens
cccctgggcaactgtgtatagtctatcacacactgttatgcagcaaggcactggactcctttagagaagtggatgaaaatgctcctggtggtgggattcctggctgagtgtctgtacacaggcacagaagagaaagcagaattcatgttatgtatagaagatgaaggtttgttcattgcccctctccatggtgtctgtccatggtgtctgtctggccatcctctgccacaactcccagtgaggcaggatctgatgtagaat

SEQ ID NO: 393736 - DNA, 504 bp, Homo sapiens
gtgtgatccaagggtggcctaaaggaaaataaaattacgtttcttaaaaacaaacaatgccctgtagtttaaactgttttttgccagtggatgctaggggtgtaggagcctgtatgcctttatttctagcttctttgcagctcggaaagccactcatgggcctatatgagcaagtgcaggcttccccttcctcaagccttccttccccacggcaccccaactttaacttaacagaaggaaaatccaatctaaataaataagtgatttaaatataatggggtaagtgctgtcatggtaataaaatatgggaagctcttcaggtcttactcagaaggggggtcagaagaggctggtgtagaccttcaccaggccagtgctggtggtgagtgttttaagcagaaggcatatcccagagacaggaaaggacctgaaagtagttcagaatggctggcacgtggaatatgtaggtggagagtcatgagaaaaaggatattttttacttga

SEQ ID NO: 393737 - DNA, 464 bp, Homo sapiens
gggccaagttccctcatttttagaaataatattactctcatctactgcattttattgatttttatttgtttgtttgtttttgcttaaaaccagctatgtggtctgtcaggaaatgccattagaaattaaaatgtggtatttctttgataaaacacactgatttctatagcaaactattaccttaacttgatttttagtgtatttgagatttcaaaaggtcatcccctttaagttttttaacctaccattaagaagctaattaattgtaactttgaatattgctgtttgcaggtatagtgtgaggaactcataaattgtgccatttataagaattatacacttggaggtggaactaaatttggtgaatatcaaggtttattttggtaactttactaataaatgcataaagacagatcagataaagctacataaatacttttttactcttcctgtactagtttgca

SEQ ID NO: 393738 - DNA, 480 bp, Homo sapiens
gcacagttaggtgcccagtgcaaggggagggaggcccaggggctgcttcctgtctgcttctgctcagaccccttccacgggtgtctccagggggcagtcctcagccgggctctgactgaggctgggggagattcgaggctgtggagaggtaggaaccagtcctctgggtatgtccatttctggaggtggcacagagcccaggcccctccacagccaggtaatctgtttccacctccttggggtcctctttcatagagtcttgccaagcttgtactttgcacctgcacagagctaatagagacagagatgcatgaggactggctggtatccgaaggggctcccttcctagttgcagggtacagggacagctctagaaagctctgcctgtgggtagatatgagacatgtggtatgtgctggagcacaggcctgccaggcaggtgagggggtgcttcatgcagataagagtcacccctggctc

SEQ ID NO: 393739 - DNA, 547 bp, Homo sapiens
ataaaaacattctgcaggactctttcaggagtccaatacaagaatcctgttgtttgaatcagttagaaaatctgggctctaacagtccaagatttccttcttcaaataactgtggtcaaagcccttcatgtaccttgacctcagctttctcatctacagtaaggctaccaccctctgccatacctaatttgcataattgtcctaaggctcaaattgcataatgcttaaaaataccatgtaattacaccaggttacaagaaggtaaagtagcagctgtattttttatcattatcatagaaaatgacaaccacttatttcagctttattctattccttgatgatgatctacattctgcaaaattaaaattactaaatgtgttacaccacttaaaaaacagagctataactgaagctgtatcactaaagcaatatagtaaatgttcagtaaatgctgtttggattaatgaatcagtgtttacttctatgcccagcactatgttaacataacagaagttggaaaataaatgatgtgttccctaaaaaaaaa

SEQ ID NO: 393740 - DNA, 515 bp, Homo sapiens
ctctctgtcccctgcaacaaatatagcctagctaatacttacctctttcccccatctccctgatcactccttagttatcattgcaccccatgaggcttgtccaatgctttgtacatattaggcacacaataaatgtttgctaaagtgagttgatctgaatggtattcagagtcttattctagatagaaatggggtcttaaaagagaaaggccttggccgtgtccttgaaaagcccacaaaaagtcactgcacaaagatgtaaaaggcaaacctaactgttgacaacaaaattctgtcaccagttctcttctcctccacgaagtgggttttaagagcaacatagagagttttcatcacgtccttaaatgtggttttgctttacttcccaagccctagaaaacactctcatctcctgggcctcttctgttttcaagtccagactgaaaaaaaaaaaaaaagagcatgtagaaaaatcctataattaccagatctgattttcatttgaacttttcctc

SEQ ID NO: 393741 - DNA, 314 bp, Homo sapiens
cgacagagccagactccatctcaaaaaaaaacaaaaacccaaaaacaacaacaacaacaaaaaaacactttagatgccaattctttaaatagattaagggttaaaatattaagaatccatattcttaatatgttttaaatgtctatttacctattgaaaaggcagtaccattaaaggctctgagaagggtttgtaaaactttattgtgagtgatgctatcggtcatcaaactaataatagagattagacgttcttgttctgggatgttaaaaataacttaatctttccagattcttacaaatgtaaaagctatt

SEQ ID NO: 393742 - DNA, 343 bp, Homo sapiens
cgaattcttcaatattgaattttttaaatgaaacatttgtttcagctggtaaacagtgtacatgtttaatgccatttcttacggtttgtacaaacaattttggagatttggttcgtttcttgtcaacttcagagtttttcgatttttcagcttctgggacattagcactaaaatctcctttcacgtgatcagttaactgtgatttcttgttttgtgtccacttctccacctcgatgcctgtcatgctgtcttcatttttagttacattttcaacagtatgtgggttcaattccaatttttgttcttccccatgaccacatctactgtagtccatggattctga

SEQ ID NO: 393743 - DNA, 349 bp, Homo sapiens
cattccctcttgagaaaaataattacctcttgaagccacttgctatgtggactctagactaactgacaccaagctgccataaaataccataaaccctatagttcaacaaggtatagccaatcacgaaccaatgttccttctgcaaatcaatgataattcctgacgaacaattttataaccacctcctttcttaattagcttggtttaatttttttttttctgtcgagacaaggttttgctctgccgcctaagctggggtacagtggtgcaatcacagctcgctgcagcctcaacctcctggacacaagcaatcctcccacctcagcctcccgagtagttgggactacaa

SEQ ID NO: 393744 - DNA, 363 bp, Homo sapiens
aggagagacagggtttcaccatattggccaggctattctcaaactcctgacctcaggtgatccgccctcttgggcctcccaaaatgctgggattacagacaggagccaccatacctggcctggcactttctataaatgccacacaacatgttctgtgcagccgcgtctcccaccgttgtgtcagcggataagttgccgtgttccgagacaccaacctcacatggccgcacggaaagggagcacccatttgcggcttgtgcctgctgagtgcctgcctgggtcaggtcctgggagagctgggcctggcccggcctggtggcaccaagcagcactcgagataagagtgggggaacagtgacggat

SEQ ID NO: 393745 - DNA, 294 bp, Homo sapiens
ttagctgggcatggtggtgcacgcccagctattcaggagggtgagctgggaggatcccccaaacccaggaggcaaaggctgcagtgagctgagatcccgaccctacactccagcctgggggaccgggcaagactctgtttgtttttttaaaaaaaaaaaaaaaaaaaaaaaaaagaatggaataggtagatgaataatatgcttcatccatataacagaatacttgaggcattattcgaagaatatgtaatgcctcaggaaatacttagaatgtgctattaaataaagaatgca

SEQ ID NO: 393746 - DNA, 428 bp, Homo sapiens
ctttcttctccttctccttttttcttgagatagggtctagctctgtcacccaggatggggtacagtgccacaatcatagctcactacagcctcaacctcccagtctcaagcagtctgcctgcttccgccccccaagagctgagaccacaggtgcccaccaccatgcctggctaattttttaatttttttgtagcgacagcggtctcactatgttgctcaggctggtctcaaactcctaggctaaagcgatcctcctgcctctgcctcccaaagtcctgggattacaggcgtgagccaccacacccggcctgcagtacttcttgttccccatctcttgctacatttgagggccaccctggcagccccaggtgcccacacttttctgaacatggcaaatcgtggcagcaccaattgtagagctcaactgt

SEQ ID NO: 393747 - DNA, 117 bp, Homo sapiens
cccccaccctaccacacattcgaagaacccgtatacataaaatctagacaaaaaaggaaggaatcgaaccccccaaagctggtttcaagccaaccccatggcctccatgactttttc

SEQ ID NO: 393748 - DNA, 457 bp, Homo sapiens
cacatgctatttccattccttcatctctttcacttgtccatccattccactttttcttctacttgcaacatacaaccaaaactactcttatcaaggatgaacgccgcaaatataacaggcatatttcttcactcatcttgctccagtgtttaggggtaaacctggatattggaaattaaagctcctttatccctatttctaatcacactggattagaaatttgagaaaacaaatgttctctcttaataataggtctacagaaaccatcaatagctaaagaaagacaaagaatgcctcaagtggaccagcagtcagtgtatcatcagttttgaaaatacttcatgtgcattgaggaaatcagtttcaaaatatcctataactaataaatgaaccatatttaaacctaacaaaacaatgcaagggcagttaagtaagggaagtcaatgaccaaaattga

SEQ ID NO: 393749 - DNA, 164 bp, Homo sapiens
taatttattccaaaagatggcagagagccaggtatgatggcttatgcttgtagtctcagctactctgaaggctgtggcagggggattgcttgagccaaagaatttgaaacaagcctgagcaatatggcaagaccccatctcaaaaaaaaaaaaaaaaaaaaagg

SEQ ID NO: 393750 - DNA, 508 bp, Homo sapiens
ggtagaattccagctttttcctgtgcaagaccaatatctgaagcttgtgccttttgctgctttttccttcaaataacaggatcttatgaattagtgctttcattatatttgtgtctattaagtcagactacagttttcaaggtgcttttctattctagggagatctgcagggcacttaacctacattagacctaagaggtctgagggttcttcagaagacaaagaatttctagatactttccttgaggaggtgtcaagggcaatacagacaaaagactgatgtctcctttaacagcttgataagtatctcaggatattctgcaggaatcagttctgtttctacaaagtcctgtattcccattcagcatgatatggctgaatatgtgtgtgctacgtgtgacaatggtgaagacttatctttgccctgagggctgagtgctataacactgctcaagcgataggcttgatagaagtgatgatttggagagatgatctgctttaaaaaaaa

SEQ ID NO: 393751 - DNA, 386 bp, Homo sapiens
atacaaaaattagttgagtgtggtggcaggaacctataatcccagctacctggaaggctgaggcaggaaaatcacctgaaccttggaggtggaggttgcagtgaaccgagatcacaccacaccacagccctccagcctgggtgacagagctagactctgtctgaaaaataaagaaatatagccttcaggaaaacaatgatattaataacattggtacccaattagtaaacttaattgatcctcctacgagtctctgaggctgtctccatcttaacaattggagaaacaggttcagtgatgtcacatcaacagcccaatcctcacagacgttgaatggcagggccaggaatctaagcttggctccatctctctccaaaacgtgctct

SEQ ID NO: 393752 - DNA, 787 bp, Homo sapiens
gctcagctgtacaatgttgtataccactagttcttctcatagctgatctgctttaactcaaaagcatcaattggtactaaaattttcacagtatattggcagatggtgaaaatgctcaactacctcttgtcaatagcagcagcaattttgaagaatagcacgttaattctggttctggtgctacctatttgaattagcatgaacaaacattcctagcttcagtttcccatgtgcaaaataacattacatctgcctgccacctcatggattgtagtaactatgaaagaagtggaagtatacaataatacccaaacaaaaggcacacatcctcatacacaggttgcacaggatttttcacaaaggatgtaacatgacaatggacattacttggaagaaacttattttgtttgcataggcaaatttgttcattacatcagtaaataatcagtattttccaaacatggcaaatgttatctatcagactacttctaatttctttgtcttgtcctataacataaatatggaagagtctggtatgttcattttcatctccatcacttcaaaactatggaagactttcaataattaattccaaatgaataaatgagcatctttgagtgcactgtgaaaggtactggaggaggacaaattctgtaaaaggttactataccttctttaaggaaagatgagggaaggggacatacaaagttgacttaggatgctatgtagttgaacaagtaagaaggaggaaatagttgtttcagaaacttctattccttttgtcaca

SEQ ID NO: 393753 - DNA, 227 bp, Homo sapiens
ttcctgctcccactgcaacaggggaaaactttagggtatcctgtctatgatgaagttagaagaagaaacaaaagagatgcagccataaaaaatatataaaaaataggagattgggaagacatagggaagtcccctgaaagaataattcaacactatgggccagctacctgggcacaagatgggtcacggggatactgcactcctatttacatgcttaaccacatcat

SEQ ID NO: 393754 - DNA, 757 bp, Homo sapiens
cagtagaaacaccttcagtagacactgtatgttgtattttgaattttggtctttcccaggctcctgatacatggtatgatgctctcttgtgatgttgggcagtggcagtgagccatagttcccattcagtatactgtgttgccaagtggttttccccgactgtaggctaatctaactgatctgagcatgtttaaggtaggctaggtaagctatgatgttcagtaggttaggtgcatgaaatgttcgtttgagactaggtcttgctctgtcacctacactggagtacagtggtacaatcatggctcactgcagtcttgactttcctgggcttatgcagtcttctcacctgagccacagagtagctggaactacaggcagtgccaccatgcctggctaatttttaaatttttatttttagtagagataaggtcttgctatgttggccaggctgataaatttatctttgatttatattttcaacttacaatgggttgattgggactttattatatgtcggggaacatctgtgtagaacaattttaggattagtgaaatttaaaaatgggttcttcagaatactcccagaattggcagtaatttctgttttttttccttagaatcttttcatgaagcaatttctataaaacttctaatttcaaggtttaacaactttttcctggatttaatcttggctgcagtacaggaaatgatttaataaattaactcatttaaaacatttattgatttaagattatag

SEQ ID NO: 393755 - DNA, 380 bp, Homo sapiens
gccaccgcgcccggcctctgttaggttcttgagatccacccgtgagcaaaactgacaacagtcctgcccccacggagagtatcttccagtggagtgtgacagacaagaaacaacttgtaagatgaatgcacagtgtgttcgagtgatgatgccatggggaaaatggaccaggatgaggagactggagagtgaggggctgggcggtggcagcagtggggggcagctgtcactttacacagaatggccaggaagacctcctggaggaggtggcctttgagtccagaattcaggttgatgatgagggcgtgaggcttgggctgagagaagagtgagcagggagctgtgaatggtccaggcagggaagggagctgaagtgattc

SEQ ID NO: 393756 - DNA, 522 bp, Homo sapiens
tcttcctatgcagcaagtactatcctaagggctttacatttatttatggcacacttactttgaaaaaccctgtgaggtaggaactactattatctctagtttataaatgagaaaatagagtcagagaggttaagtagtttgcccagagacacacagcaaggaagttaaaactgtctattgccattgtgtagatctgagcacaaatgctttgtcatcaatggttaattcagtacttttttgactttaataaagctgagaatcacctggggatcttttagaaacatagcctgtggtgcagtaggtctggagtggggcccttaaaatgtatttctaacaacttcccaagtgacactgatgcttctggtctgaggatcgtatttagagaaggaatatcatcaaccatgtcctcgtcaaattcatagttctgggctgcatcatggtacacgggccatgttattagttgtctcccacttgtgtaagatgtagaggaaataacataagatgcctgtgaggatttgatgt

SEQ ID NO: 393757 - DNA, 685 bp, Homo sapiens
ctgattttcactcttccttggctcagaggatattgtttgaggtatacatttggaactaggaggtgaacaagtgctggtagttggttcacatttaggcatttaggacccatgataattcagggcattgcagaatagtcagggtagattatggagtgagacaggtctgatgtcattcaggaaggctggagtgtcctggatgacgcggctcataagtaaatgcctacttgtgagatcaactgtcccagtttgcctgagattgagggacttcccagaaagtgggtttttcattgctaaacccagggagatcttgagcaaactgggacaagttggtcagcatgtgtgggatgtaaaaatccatggtgtcagcttgagaggacaggttatggggtaacagtgggagtagggtgaacatggagcagctgccattgatggaactgaggggtactcttaagttcaggctttggagattagggtaaagtcacttattgcaaggcctaggcatggtgccttgtgcctgtattactagcactttgggaggccaaggtgggatgatttcttgaggccaggagatcaaaaccagcctaggcagcagaccccgtctccacaaaaaattagccaggcacggtagcgcactcctgtagtcccagctactcaggaggctgaggcaggaggattgcttaagccc

SEQ ID NO: 393758 - DNA, 396 bp, Homo sapiens
agaagtgcagtagtagggtgggagtgacccaattttccaggtgccatctgtcatccctttccttggctaggaaagggaattccctgaccccttgtgcttccccggtgaggcgatgcctcgccctgcttcagctcactcccggtgcaccgctcccactgtcctgcacccactgtccgaaaatccccagtgagatgaacctggtacctcagttggaaatgcagaaatcatccgtcttctgcgtcgctcatgctgagagctgtagactggagctgttcctattcggccatcttggaactgcccctgactttcattctttgtactatttttgtcatagatttttcttctatgtattttaaacactctataataccttgttactatttttgctttaaacta

SEQ ID NO: 393759 - DNA, 793 bp, Homo sapiens
gagaggttgggcaccaggactctttcatggtgcagctgctttttctccctgtgaaagagatgggaatcctagcatctcaacttgttcttttcttacaataggaaaagtgttcatacactgattcatctctaaaacattgatcagaaaatcaggataatcaggccgggcatggtggcttatgcctgtaattccagcactttgggaggctgaggtgggtggatcacgaggtcaggagttcgagacaagcctggccaatatggtgaaacctcgtctctactaaaaatacaaaaattagccaggcgtggtggtgcgtgcctgtaatcccaactactagggaggctgaggcaggagaatcgcttgaacccaggaggcaggggttgcagtgagccgacatcgtgccactgcactacagcctaggcaacagagtgagagtctgtctcaaaaaaaaaaaaaagaaagaaagaaaatcaggataatcaaatcacatgtcttagcccaagtgagaggagttttaaagagttgatcaaggctgggtgcggtggcttatgcctgtaatcccagcatgttgggagaaaccaccatcagagtgaacaggcaaccgaggcaggcagatcacctgaggtcgggagtttgagaccagcctggccaacatggagaaaccacgtctctactaaaaatacaaaattagccaggcgtggtggtgcatgtctataatcccatctactcgggaggctgaggcaggagaataacttgaatccaggaggcggaggttgcagtgagctgagatggtacc

SEQ ID NO: 393760 - DNA, 365 bp, Homo sapiens
tcactgcaacctctgcctcctgggttcaagcgattctcctgcttcagcctcctgagtagctgggattacaggcatgcaccaccacacccggctaattttttttttttgtagttttggtagagacggagtttcgccatgttggccaggctggtcccaaactcctcacctcaggtgatccacccacctcggcctcccaaagtgctggtattacaggcatgagccaccgtgcctggccaagttccggggtccctttttttataagggcactaatcccattcatgagggcagggccctgatcacctctcagggccccacttctctaatgccatcaccttggggttagaacatcaacatagaaatttggg

SEQ ID NO: 393761 - DNA, 398 bp, Homo sapiens
aaagtgtttgtaaatcaaagatctgataaaggatatgtacagactatttaaaaaattcccacaactcaatataagaaaactcaataaaatgtaaaatatattactggtttgaataggcttttcatcgtagaagacagatgaatggctaataagcacttgaaaagatgctcaaatcattagtcaatagggaaacataaattacaataccgtgaaataacactatacatccactacaatggttattgtccaaaagactgacaacacaggtgttggtgaggatgtgaagaaactgtaacctcaaatgttgctggtgggaagataaaatggcacagccactttggaaaacagtttggcagtttcctataaagttgaacacacacttaccatataacttagta

SEQ ID NO: 393762 - DNA, 278 bp, Homo sapiens
cggggcagggggattacataagatttacccatttctctccctatcatgcaatagttacccttggatcttactgtgctccctgatatatgtgaaggttgaaaatgggccagatgggaattttaaaggcaatgaggggctttaattgttttttcaaaatagtgtatgtacagtagttcaaaaagtcagatatgtaaccacaaagcttatactaaaagagctaaatcctatctgtggtgtataaaaccaatagataatatcttctaaaactcaagaagtag

SEQ ID NO: 393763 - DNA, 676 bp, Homo sapiens
ttatgacttcatcctggtaaagaggtcatttacttttggattatgattctactagtcttgcaaaatttacttcctaacctatatctttatgtagtcatgtcatacttgctcagaacttttcagactcccagtttgtgctttcagatgtttacttcctaatgctttcctgtatatgtgccttccttcagctagactactttttggctaatgtatttttctagctggctcattaattttatctacagtggcctctatcctcctgtgtgcctgctgaaatcctgtgcagacatctgatgtgtctccaacaggaggtggtctttacctcaattcaggcattatctacatgtctgcttgtctgacgtcttggaaggaactgggttgcttagatttgttgaatgactatatatgaagtcatcaaatggatttgttatttgttagtgaacagctagctataatagagtgctaaaagaggtagggaaattaactttcaaaatgggtataggtagttgaggtttcaaatgcagtgagcatttttgcattattttcctttaataatctttatgcaaatgcatgtagtaatcacatctccacattgattgaataattttagagacctggattactgtgacatagtctgtagtgggctataattattagatattcagagagttgcagc

SEQ ID NO: 393764 - DNA, 235 bp, Homo sapiens
gttgataccctggggcggtctagtggcaagcaggtttcgaggtgagggatcagcagaggagaggaagagggacaaccccacaggtcgggggacaagcaggtgtggatggtgtcggggaagtccagggaagcaagtgaattaggccagaggcatgatggactgcgtcacgtgctgctgccctgtcaggggacctctggccattagtgtcacccatgggaggcttctgggagagtga

SEQ ID NO: 393765 - DNA, 252 bp, Homo sapiens
ctcctggttcccctattgctgagaccttagaggggacccttggaatagtgccagctgtccctgtagatggatttcctgtgacaagcctagtggcagcacctgttgatgttgagggcagttctgtttgtgaccaagttgtgtggcctttgctggagaatgaggaaggccatgttgttgtttcaagtagagtaaatatttcttgagacacacctggagagaatgagctcctctcatgaggccgtcctgtggtct

SEQ ID NO: 393766 - DNA, 446 bp, Homo sapiens
gacttttcagctatgtgaatcactaaattccttttattttaaaaaattcattagaataagttttccattactggcaattgaaagcttcttgatacacttaagaacagctgaaatgaaaaaagcaaaatgttcgtaattctaaaacaatacattgggaaggcaaacaactgaaaaattattcaacaggagaatgtagtaaggtggcttattataaaatggatttatcaaaatccaatatgaaaacaacattttatgtgcagtaggcacaatccaatggccaactcaaaatatactcccaattcccttctcccactgcctccactagagggactgagaaagctgaatgctctctattccacaatttctcctaactaggagtgccatgtaatacggatctggccaatgagacaggaacagaagtctgctttgagcttctgggaaagttt

SEQ ID NO: 393767 - DNA, 750 bp, Homo sapiens
atccaaaacaccatttgaatgttgcataatattgtattttttttttgtcagggttataaacaatttctctctgatctgctgtcacacagaagggtatatccagactggtccctgagcctgggtaatttgggtttactccaggtgggtaaatgccttcttggtgctcagatctggcaggcaccaggagaggagacacacaacctgtgcaaagagcagatgttcaaagatgcttgttttaactcgtattttaagttcaggggtccccgtggaggtttgttgcatgggtaaactcgtgtcacagaggtttgctgtacagattacttcatcacccaatggttatcttttctgctcctctccctcctcccaccctccaccctcaagtagaccccagtgactgctgttcctctctttgcgccctaaatgagttcttatcatttagctcccactcataagcatgcggtatttggttttttgttcctgcattagtttgctaaagataatggccttcagctccattgatgttcctgcaaaagacatgaccttgttcttttctatggctgcatagtattccatggtgtgtatgtaccaccttttctctatccagtgagctaaaagtagaactgtcattcgacccagcagtcccattactgggtatatacccagaggaacgtagatcattctaccataaagacatgtgtattcggatgtttattgcagcactgttcacaacagcaaagacatggaatcaac

SEQ ID NO: 393768 - DNA, 264 bp, Homo sapiens
ccatagtaaagttaaaaaattgtaagtcaaaccatcataaattggggactatctgtattctatcagataggtagtattttgagcttaagcaaacatggtgtagattgttttaagaaattctgtgttattctcaagggaaatctatcagaaataagcaatctaattttggatttgtttggggcaatagaatttgttgaaaataccaaatgcaatgattaaattagttctagatgaaaaggcagatattgctgaaaagtttaatgt

SEQ ID NO: 393769 - DNA, 361 bp, Homo sapiens
tctaacacccctgccccaggcggctgctcagaaccgcactgaggactggtccacagaaacccgattctgtctcaggtctgtagtcctggaagcaggggctggacatgtctgtccttcatttctatacagtcagaccctgattgctggtcccatcctgtgtccacaaaccagctcacgtgctatgggttcacctgcagccatcggccagcgtcatggcagggagccggtggccatggctgaggtcacagttgggactgagaggagatttgagctccagacttgattccacctcgtcagacttctatggccttgggctagctccttcgccccatcccaaactgagcctcactttccccatctg

SEQ ID NO: 393770 - DNA, 456 bp, Homo sapiens
gacataggcttttggggttctgacttggccctggctaggattccttcattcggaagctgagccaggaaaactcaattataattcttcccacaaagagcgactctcttggccattcctccttctggggacctctgtcgtgcctctgccaatgggctgggtccctctcccccatcagcccacgcgccaggcagccacagcccttgtgtctgcattgcatccctgcgttgctctttcccccactcactggtcacctcttctgcattcagggggcttctgtttccccgttagggaccccagggctttagttctctgtccccagggagatgatgactctaaattctttcccttgggataatttccttttgggaacacatatgaaaggctgtctctcccctcaccactcacccctattgctaccccaattttggtttagtgttgagccatcctgtttcgaag

SEQ ID NO: 393771 - DNA, 279 bp, Homo sapiens
tgtaccatactctattgtgttttgcacacactccttaatttattcttaccttagtctgtaacaaagtaccatagaccggtggctgaaaccacaaacatttattgctcacagttctggaggctggaagtctgagaagagggtaccagcatggtcaggttctgatgagggcccttttccaggttggagactgtcaccatcttgctgtgtcctctcacggaggacatgtgtgtgcttggaggctctttggcagagctctaggaggtgtgtgtgcttggaggc

SEQ ID NO: 393772 - DNA, 354 bp, Homo sapiens
aaatgtggaaagccgggtccagtgttgccagatgttcagaatcttcaagagataaatatgtattaaagattttatttaggccaggtgcagtggttcacgcctgtaattccgacactttgggaggccgaggtgggcggatcacctgaggttaggagttcgagagcagcctggccaacctggtgaaacgctgtctctactaaagataccaaaattagccgggtgtggtggtgggcgcctgtattcccagctgctcaggaggctgaggcaggggaatcacttgaacccaggaggcagaggttgcagtgaactgagattgcaccattgcactccagcctgggcaacagagcgagactc

SEQ ID NO: 393773 - DNA, 402 bp, Homo sapiens
ccaacatggtgaaaccccatctttactaaaaatacaaaaaattagctgggtgtggtggtgggcacctgtaatcccagctactcagaagcctgaggcaggagaattgcttgaacccaggaggtggaggttgcggtgagctaagatcatgccattgcactccagcctgggcaacaagagtgaaactccatctcaaaaataaaataaaataaaattatgtttcatcttaagcctgcattctctcagatgattttcaaaaatgtttaaagcagcagaatcatacctttcaaacaaaatcttattgaaaactcaaatgtataaaatgtataaaacagataacatggagagttctgcctgctcacttttcttttctcattgacttggagtggaaaataatggatctaa

SEQ ID NO: 393774 - DNA, 168 bp, Homo sapiens
tcgagctccggtacccgacatgcacagaggaggtggacagcctgtggaggggtgtgactccctgggatgcagctctgtgccctgactccagtgtgccatgcttggctgatctctcaatgattaactgtgtgaccttggacacaccgtgttgcctcctctgcgcctgtc

SEQ ID NO: 393775 - DNA, 192 bp, Homo sapiens
tgtcacctgggcctttcctccaggagcctccaaggaaggtggaggtgtgacatcagagtgttgggatgtggaggggtgtgactccctgggatgcagctctgtgccctgactccagtgtgccatgcttggctgatctctcaatgattaactgtgtgaccttggacacaccgtgttgcctcctctgcgcctgtc

SEQ ID NO: 393776 - DNA, 362 bp, Homo sapiens
cccagtgtagacatcaccatttctggatcacagtggtgattactttatacatgctatctctgtgtagagaaattagtagctttccttatggtttaacaaaaagctctaggctgagtcacgttttcagaacttccaggcagccaggaactagaacaaacaggtgtccaagatgaagataatgtctgtgacagtaattttagcagactgtatcattcaaatatattatgaaggtatgggacaatgtgcatgtgtgtgcatgtgtatgttttggggatggtgagctgaagcaagaagaaggaaaatatattccagaaagaggataaacactgaaagtcccaaaaaggaacagtaacttcaatctg

SEQ ID NO: 393777 - DNA, 266 bp, Homo sapiens
ggattgcaggcacctggcaccatgcctggctaattttttttatttttagtagggacagggtttcaccatgttggccaggctggtcttgaactcctgacctcaggtgatgcaccagccttggcctcccaaagtgctgggattacaggtgtgagccaccgcacctggcctgaatggcgttttcattactttagggtatacttaatcactttttcctgctttattttcctatgctttttctgttgcctttctcagaaaagcattactgt

SEQ ID NO: 393778 - DNA, 413 bp, Homo sapiens
tttctccaggaccaaatcaactgccaatttggatatcatcgaggcacctgaaaccttatcatgagcctgatgctgaggaatagattctgggaggatcccgaggatcccctggttgcagccatgttgagactgacgctgagggggaccccaactgtcacgagcaacacccatcgaacgcagccacctacctggggacagatcaagaagctgtcacagatggcagaagaaaacctaagattggagaggatgaaggccctgaggtccaagaacatggaaacctgacagtggacgccaacagctgtggagagaagccgggcgacagctgtggagagaagccgggcgatatgctcacgcttccgtgtgcccagcaatcctgctttatctttttaaataaaggtgattcctgataacac

SEQ ID NO: 393779 - DNA, 200 bp, Homo sapiens
agaccatcagggttgtcggttaaaggaccaaagtccggacaggaggaagaggttttgacatctagcgcacagcagggtgaccagagtcaatgagagtgtgttgcattttgcaaaacaactgagagagtccgtatcaaatgtctctctgcatttagattggagaggatgaaggccctgaggtccaagaacatggaaacctg

SEQ ID NO: 393780 - DNA, 199 bp, Homo sapiens
atgtctaaccaaagtttcatagttttctccaactataaaaacaaaatatgcacataaaacatttcacgtgagtctttctccctccccagatcccagtctggccctcaggtaatcccctcagttaagtaacttccagacgatattcatgcatatactttttttttttttttgagatggacagtctcactctgttgcccag

SEQ ID NO: 393781 - DNA, 172 bp, Homo sapiens
acaaaccctcctgagaggacaccgcccaggccttggcatccccggacatcactgctgtcccagcagaacttgcacccgggacattcacagacggtgcagccagcgtggcccgttccacaccctgcagatgcctgtagcaccttcaacagattgtgtggtctgtaactgcgtg

SEQ ID NO: 393782 - DNA, 421 bp, Homo sapiens
atgttctttttgtcatacaaacaaaatttggttctggatggtcatggaagtaggtaagctaaagcatatagaatttaaaagctgaagagactggaaaattagagctgtcttcctgaaactgagtaagttcagttgatttttgaggaagtcatgaaatttggggagggttactggggtgatttcgaggagacccagagaaaaggtttaaacacatttttataacttaaagaaaataatcaaagtatgtttaatactgtatctaaaagtgtaacattgaagccagacaagagtgaattcaaaacccagcttccagggttgcttctcatttcttatctcatttattattgcacatgccaatttaatggcaattgcacatgccaatttaatggcaattgcacatgccaatttaatggcatgtgca

SEQ ID NO: 393783 - DNA, 412 bp, Homo sapiens
cttaaactcttttgggatctatattaggtgccagatggtcataagaaaattatgtgagatactggtgaataaacaagcaaaccagaagctaggttttcagaatagatgctagccagtagttcacaggcattatccagcaactggtggggatctacttggccagcccgtgaccactgagatgtgaacttccctggaccttggcagtcaagagggagagaggcagagaaagctccattatcatcactaattcccttttgaccacacgtgacagcatgacctgcttcaaagaaataagataaatggtggttaggtgcccccacaggcccacagtagcccattcaacaaagagcaaaagtaaaactattcctgatggatttagcaacatcatagttcacttgtgaggcaacaggct

SEQ ID NO: 393784 - DNA, 495 bp, Homo sapiens
agcctccgcctcccaggttcacgcgattctcctgcctcagcctcccaagtagctgggactacaaacgtgtgccacgacgcctggctaatttttgtatttttctttagcagagatggggttttgccatgttggccaggttggtcttgaaatcctggccttaagtgatccacccgccttggcctcccaaagtgctgggattacaggcgtgagcggccgtgcccggcctggattaactttttagcatcagttgctacttgagtagcattttctgaaagaagagtggctccaagtatttccagctcttgggtactttggattgtgtgtggaactaggaattttgagcacagtgattgatcatggtaatagaacctcactttctttcttcgtgtttcctgtggaggaggtaggattttcttacataggaggtttgctctgaaggaggctgcattgtttttcatgtctctgtgacagttcagagggctggcccttttccct

SEQ ID NO: 393785 - DNA, 414 bp, Homo sapiens
tatgagtggggtcggtctgcaggcaatggattagatgagctcccagaagggccggccttgccacagaaccatcctcctagaaaagcccatgctcatttacatctttttctttttttaaagagacaaggtctccctctattacccaggctacagtgcagtggcacaatcacagctcactgcagcctcaaactcctggactcaagtgatccccccacctcagcctcccaagtagcttggactataggtgtgagccactgcccctggccccaattccaccttcatgagaatgggaagcccctgtttaggagcaaggatggtaaaggaacatcttgtaggaagtaactgcaaccagccagccagtctattgctcttctgagttctctgggcagattccaagatgaactgaccagatga

SEQ ID NO: 393786 - DNA, 280 bp, Homo sapiens
ttgcctttgatttgtgtttgttgtcaatactttgtgcattggtgtagatctaggttttttaaaccaatctgttggaacattcgtgttccactgttgtaaggtagagtggaggtcacataagtattatacttaggtggcctaacaatggtggcaaactctgggttaaacgtagataaattgctttctttgtaggttttcccaaggcctttactatgctaatgtgcaataagtagttctcaaagagtgggatctactacgtacaattcctaacttaatttag

SEQ ID NO: 393787 - DNA, 334 bp, Homo sapiens
acttcttggaactttcagtcttcctttctgtaacaggctacttaactttttacaaaatttgtttctaatcaattgccataggctaggagaccccacctcctgttagaactatctgaattaggagtaaatgagatctgagtcttttctgtgaataaatgcttcctggaagcatttttgctttgtggttgaactagaaatggctagctatattggataaacattaggtaaagatcttcaggatagaccgcgcacagtggttcacgcctgtaatcccagcactttgggaagccaaggcgggcggatcacctgaggtcagaagtgcgggaccagcctg

SEQ ID NO: 393788 - DNA, 476 bp, Homo sapiens
ccccagctgtaagtaaatgtgagttctgtggtgtgtttcatacagggctccacctaagtaagaatgtgacatggggaccctggccccaagtcatttggtgccctgccaaggtaggatgctaacctcagctgcagccaaatacctcagattccctcctcaggcagcttcccagggacttaaaagaggtagcaggcaccatgaaggacattactgagcaccccccaagcgtgagatgaagcctgccacgaggcactgtgcacccaggcgctgcgcccagcaggcctgcagaaaaccacaaggccaggtacccttaagacgacagcaaagtgcaggcgcactgccagctgtgggctgggacccagccacagtcttaccacatcaactagcacattctgactctttctaaagccaacgccccttccgagtcaggaccaacagtgtttccaccatcatgtgaaaagaggaaaaactgaagc

SEQ ID NO: 393789 - DNA, 199 bp, Homo sapiens
ctttggagcagaaactagatgatggtgggtcaaggagtgtagatgggtgaaaagtagagacaactcctttgaaaaatatggctgtgagaacgagttgagaaatgggactagctggagaggaatgcatggactagaacatatattctgctaatgaaaatagcataaacagaaaaggagagagatgactcagaagaaaggg

SEQ ID NO: 393790 - DNA, 327 bp, Homo sapiens
gacctctgaccatcaggcttctgggaaccataggctatacccacaccacagagcatcgataaactattttgatgtttctcttgctttcagaaagacagcttccaagattcaagcccaggtggtgccggtctttttttggaggtgctaattaataatttaacttcatctaatgataattttatcttgttgcagtttgtggatttatgattatctcatccatccggtgcctagtgttgggcatagagtgtgtctctgctgtctgccagaatctgctactgggagaatttccccactgggagagggacccaggaaatggcatggtcttag

SEQ ID NO: 393791 - DNA, 1013 bp, Homo sapiens
ctcgaactcctgacctcaggtaatctgtccacctcggcctctcaaagtgctgagattacaggcgtgagccaccacgcccggccagaagtcctggttttgatctgactgtgtgcttctgctcctcccgccaggtcaggctttctgacagcaggaggtgggcagcctctgcactgctctcaccctttggcccttcattcctcctggtacactcagaggcctcacacttgcctccctctgtgggagttggtcaatcattaacccttgatgctgggaagagcttggtctcagtctcttgggctgtgaaggaagcaggtggtgttgagggagagtggcgtgggctggctctggccaggacttctcagggcagagtctaggaaggcgagaaatcaaatcattccagctgaggcaggagaattgcttgaacctgggaggcagacgggttgcaagtgaagccaagaatcgtgccaattggcaactccagacctgggcgacagtaaccaagactgcggtctccaaaaaaaacaacaagcaaaaaaagggcgactcgcagcaaccataattcacacctcgaaggggcccaaaaccaaagcaaactacacaagtatcttgaacaaatccgggccccctacaatgacacacaataacacggcatcggacctcggccggccctctcacccacctctggcactggcgcaaactccgcaacattaggacacccggtaacatggaaaaccatactcagtgaatggacacaaccagtcacaaaaaaacaaacaaaacataacacataaagcgaagcataaaccacacacggaattacctatcacaaacagactagtacccgcgcaccagaacacaatccgcatcaggagttcaatcagaccacaaccacagcaatcaaaaaaaacaaaacaacaccaaagataaaccagagaacatagaaacactaaataataagcacaagcacaaactaatagcaacacaagatacataacaacacacacaaacaaaga

SEQ ID NO: 393792 - DNA, 238 bp, Homo sapiens
aattcaaagcttgaaaccaaatagccaccgggttcgagcctatcttattctggtggtccactattaacaaaaatgtagactggataaattatatatactacaatcaggagcaatttgtcaattataccagagatgccataaaaggaatagctgaacagttagacccaacgagccagatggcctgggaaactagaatagcccttgacatgatgttagctgaaaagggcagactttgtgt

SEQ ID NO: 393793 - DNA, 474 bp, Homo sapiens
actcttccaagacaagtaaaaatgactgccaaagaaatggggaaaaaagattcagagagtgaaaacaattaatatactaacaagagagcaaaaagcaaagggggaggagaaactaggaaaatcatatatgggctctcacctatttccaaagctgggctaatgtccttttgcttgtgtctgaataaggcaccaattttaagctgctaatgaaaaaaaaagaaaaagagaaagaagcaggcccaggctgggcgcagtggctcatgcctgtaatcccagcactttgggaggccgaggcgggtggatcacccaaggtcaggagttctagaccagcctggtcaacatggtgaaacaccatctctactaaaaatacaaaaaattagccaagcatggtggcgcatgcctgtaaatccagctactaaggaagctgaggcaggagaattgcttgaacctggaaggcagagaatgtggtgacct

SEQ ID NO: 393794 - DNA, 892 bp, Homo sapiens
gtagaagaaagggctttattcggctgggagcttcagcaagactcacgtctccaacaaccgacctccccaaatgagcaattcctgtcccttttaagggctcacaactctaagggggtccgcgtgagaggatcgtgatcgactgagcaagctgagggttcatgactgggggctgcatgcactggtagttagaacggagaagaacaggacagggattttcacagtgcttttccatacaatatctgtaatctatagttaacctgaccgattaggtcaggggtcgatctttaactaccaggcccagggtgtggcactgggctgtctgcctgtggatttcatttctgccttttagtttttacttcttatttctttggaggcagaaattgcgcataagacgatatgagtagtggtctcctcccttagctaaggactctgactcctccttctgtggggctccatgtattctttctcattggcaacactgggaatagcagggcccagttgagtttggagagtgttgcttagtgctctttagttgcaaccatctgaaaataacatgaaaagaaaggggaatttcctgaaaaatgttggtggtagcaatgagagcaaggctcaaagaataaactggaagctgagaaactaggcttgaaaatagaaatcaaagggactggggaagcaaggaccctgcattcgtctctgggcaggaagggttcgctcagcgcactggtgctgcgataaatatcatgtgcctctgctgttctctcatcacggatcaagagtccaagcctggagggagagcgactgacagccatggtctggtcacacgcctgcctgagagctgcacgggagccggcgaggaaaagcccttgctgcttccagtgtaaggcaggtgtct

SEQ ID NO: 393795 - DNA, 498 bp, Homo sapiens
accacatctgctggaaggcattggaaagtaccaagataagcaggactccagggattaagatcccagaggggaaagtacaaaaagtaatacgaacagtctgagctgctttgtccttgaagcatttaccaatttgtaagtgacacaggtggagaagcagaacagaaattggctggctagagaccaagaagctaagcagagctattggcagtctcagggtgctggggaaatacaaattggagtgcaggaccaaccaaaatgacaaggctctggtaaaggacttgcctttaggctggaacttctgaaggactacactctaggagtaagggtagaccaatatagactagttttacaaagactaaatccagcttcaaattagctcaatccctaaagtgaaacaactatattgtaattaccagcttaaagaaatcttttccagaagaaaataccttcatccaagctgctgtagtttgtcatacacaatgtctgtcattcaataaa

SEQ ID NO: 393796 - DNA, 319 bp, Homo sapiens
gctactcgggaggctgaggcaggagggtcgttgaacccaggagattgaggctgcagttagctgagatggtgccgctgccctccagcctgggcaacagcgagacctcaactctgaaaaaaacaaaagaaggagatgaaatttacataacttaaaattagccattttgaacggtacagtgaagtggttttcggtgcattcaccgacttgtgcaaccatcactgctgtccagtcccagaacattccatcaccccaaagaaggaagccccatctccatccatcggccatcaccccctgccctcccccggagcctcctcggcaa

SEQ ID NO: 393797 - DNA, 122 bp, Homo sapiens
agggatggctttctgggagaatcaaaacttgaggggaaccttgaaggatggggaatagtcaataaatcaggagaaaatagtgatggtgcagggcatttcaggatggcttctccaagattcat

SEQ ID NO: 393798 - DNA, 437 bp, Homo sapiens
cttagaaagacagagagatccattcagcttccaggaaaaggagacattttggagagcctgccaggtacagtaagcagtatttatgttacactgagggagaagagcattcttaacttggtccagcttgttcagatgtttagggtcaaaagagcctggcgtattctgagtattacaagtagttttgaggcttgtaaatcatggggaaacttccagtgagctgtgcactggtggctcatggctgtgaggtgttggactttgccctgagggtgttggggagccagactgcttccctgtcctggctgcctccctggtggaatatcctcccagctgtggagggtaaatgcgaatgggcgaggggaggctggagagtagagagaggcccagagtcccgtggaatgagtgaagtctgagcaagattcatggggatggagtacgga

SEQ ID NO: 393799 - DNA, 353 bp, Homo sapiens
agtcgacggagactctctgtcttcgtctcgtctctctcgtctcgtcgtctcgtctctcctcgtctctctggtctgtctctctgtctctgtctttctgtgtctctctcaacgtctctctctgtctctctctgtctctgtctctctctgtgtctctgtgtctctctgtctgtctctgtctctctgtctctgtctctctgtctctctgtctctctgtgtctctctgtctctgtctctctgtctctctctccccccacggccctgtgcccctcagcaaagcttcttcagaacagctctttggacagcagctctcagggcatctgtagctggtgccagcctacaccccccatgcagct

SEQ ID NO: 393800 - DNA, 574 bp, Homo sapiens
ccccacagctggcatccccaaggctggcatccccaaggtcagcatccccaaggctggcattcccaaggctggcatccctatgtgctttctacattctggacactgtgttgagtgcttcacacacattagcacacagactcttcacagccaccctgagaggttatttactatggctaccttcattgtacagattaggaaattgagacaaggagaagttaaacaccttccccagaccacacagccaggactcaaatccaggcggcctgagagcccacacacttagccgtggtatgcaaacccaaaagtcactcctccaggaagtcctctctggcctttctcagagagcccacagtgccctgtgctctgtgatattatgctccatcagagcactgtgatattatgaggtagatagatcagatgatagatagatagatagatagatagatagatagatagatagataatggatggacagatggatggatggatggacggatggatggatgaatagatagataaacagaatagaatgatagagagagagagagagagagagagagagagagagagagag

SEQ ID NO: 393801 - DNA, 157 bp, Homo sapiens
tctcttgactgtgggtagatgtatcactgcctggttgtgtgcccaggtaagtcactttccctctctgctgacttctctagaaggccgactctccctaggtagactttactaaagcccttactgtgggcttcaaccttcttggatacatctgctactt

SEQ ID NO: 393802 - DNA, 261 bp, Homo sapiens
ctcaacagttctagagactgggaagtccaagatcaagacactggcagattccatatctggggagggcccacttccaggttcacagacaacgatcttctctctgtatctttacatcatggaaggggtcaggggtctcttttataagggcatgaatcccattcattatcttatgatctaatcacctcccaagggccccaacctcctaaaacctcgtcatgggagttaggatttctacatagaattttgggggaacacaagcat

SEQ ID NO: 393803 - DNA, 577 bp, Homo sapiens
tcacctaatttttcctatatatatactgagcttttcttaagaaatatatttcattatctcccacatgaacgccttctttctatgacatctcaacctatacgggggagggggagagacatggaatctgagtattagtatcttttcagcaacacagatgcacttcaaaaagacataacatacaattggaaagacttcagaaaagacatctaaatatttataggaatcgaagtccagactaaataaaagggacttcttcctagaaaaacaaaagctgagagagatggttaggtctataaaattaagtcaaatatcaagacaaatgaggtgaacgcaatcttgtctgccagaacctagaagactaagaagttgaagttcaagagttttttaaaaaattaccctaaaaacatatatattattggaagtgttaatagaagtgaaaatatagattcaagagaagtttcaattcatgatggttagattcatgaatgattaatgaaagatgttcatttctggtacacataggatgtaattacaacaatttttcacaaaacataccctggtaccatgctgggccaga

SEQ ID NO: 393804 - DNA, 248 bp, Homo sapiens
taaaagcaaataactccttatcttaaaaataaacagagatgagatagaagggtcagtgtcaaaaaatcatcagcagcagatgaaggacgggggtcagacacgaggagctttttttttttttttttttttttgagatggtgtctcgctctgtcgccgggttgttttgcagggcaaaaatttgggcccattgaaactttaacttctgggcctaaagggatcttcttgcctgggcctccaagggttttagg

SEQ ID NO: 393805 - DNA, 349 bp, Homo sapiens
gattgggttcccaccctcaagagctcacattcaagtgtggtgacatgaggtgggcaatggtagcaaatgctcattttgagggatatgttgtaatttccaaaatgctttctagataatattactcaggcctcagaacaacccagtgaaaaagtagacattattatccccattttacagataagaaaactgaggccctgggagagaaatgactcagtcataatgactgccatttatgaaggaccaattaagtgaagaggaatcaggctaaacattctacacatattgtctcatttaattcctttaacagctccatgaagtaagacttattgtggtgtcacctgaggaaact

SEQ ID NO: 393806 - DNA, 673 bp, Homo sapiens
aagggaagtgggcatggcccccggaagaggacgcacatggatccgccctctgctggaatttgtgcatgtttggtgaaaacccctcactggggctttggagggagggcaggtcccagggctcaggggttggggtcatttccaaaaacaaggctgcttacactttcccaaagcacccacatggcagaggagagtcaacctgtgccctggcaggactgaggacacagctaaaagctgtgaaaaaagcttaagtctcatttccttttgaatctcaaaaattcatgccaattctgcattctgctccaaaatagtacctttttattttatgatgcaagtaccctactctgatccccagggcaatctcacacactggtatgagaagctcaaatataaaaattaagcatgaaacctcaagagtggataagctgaccttgagggcgtaggtggagaaaggccctagcctcccagaacaacacagctggaaccggcggggggagggttatggatcaaaatacacaatagccctgactgcaggccggatactctgccaggggctcacatccattcactcattcattttcctcttaccctctttaaaatcgtgtgcctactacgtgttagcactgttctcgacagatatagcaggaaacaaaacagacaaaatccttgcctttgg

SEQ ID NO: 393807 - DNA, 500 bp, Homo sapiens
cttttaagctatttgcttaattataagctatggttcatctgattccaattccatttttgtaagattgcatattaaatatttctttaaattatttaactttatttcctttgttcactttaaaatcaggctgatttgagagtttatgcctctgtacaatgaaaaattggaattgatcttggtgttacagcaattaattgtgaaatcacagctgaacctaattatcgtaaatattttataattaaagaaattttacccatccagcatgttataaatagtaagtggtcttcaaacatagctattccctctattccctcttctctttttatttttatttatttatttttttttggagacagagtctcgctgtgtcgcccaggctggagtgcagtggcgcgatctcagctcactgcagcctccgcctcccaggttcaagcgattctcctgccttagccttcagagtagctgagattacaggcacccgccaccacgcccagctaatt

SEQ ID NO: 393808 - DNA, 279 bp, Homo sapiens
tcctgcagcaaaggctcttgaatgggattgagtcatttctgtggtcccagaggacttaggacagtatatgacagtcatgactccttaaggatttgggggattaaagaaggaatgaagaggcaaaaaggcaattggctgtctttctccaacactccagggcctggtctactaggatgtgagaccctgaaacaccagttcctgggaagtcattgctgtgagggggttgagaagaccagttactctcctgctgcctttcccaccccaccccttttaatgatg

SEQ ID NO: 393809 - DNA, 642 bp, Homo sapiens
gtcttccttcccttgcttcccatttggttcagaagacacatgttttgtataattgagagtagcgatagaggggtgtgttctgaaattctggttaatttccctcagggaacaaaggacagcagagagcatggcttctactcaccagaatagactgcattgctttcgtagatatgtgaactggccttgatgtctagggttatggtgtagtattcatcaaaggtgaagcaggtgctactgtaccttataaaggtggcagaagaaagctgcagactgaggcacagaaacatccccagtggctgcagcagcatgtcatggaagactgccatggtctcagtctgtttggaaagtgctaggcctggaattgggtgaaactgacaactcacctcttgtttatatgccagggcttctgggtgaagtcatacatgcagatcttctccctgccccttctgaatatacattggattctggaatttggcccaagacatcaccaggaatgaatcaccagtcaccattacctgtcaccgatgattttgcaaattgcagttttgctcaagaaagggaatgtcctgaatatggttttcttttacgcctgtcatttcagcatctgctgtttgaagaaagccattgagaagatgtgaatac

SEQ ID NO: 393810 - DNA, 197 bp, Homo sapiens
agccttctgaaaatggtgttttgtaagatatctctcctctatttttaccccgagttctcctcccttagttttcacaaggtataccctcatcacctgtgatcataaaatctccactccattaccaacaaaatttgattctcaaatgggttttaagttgtacccttatatgtcaggaagcctaagattttgatatgcaa

SEQ ID NO: 393811 - DNA, 509 bp, Homo sapiens
gtgtgtgtgtgtgtgtgtgtgtgtttaattcaaattatacacaaggagtttgtgcaggctttctttagaggcagaagccagttaggcaggtcaagaataatataaaatcacaaatgaagagaataatgtgtttatttttcatttgtcatttaggactgtctgggggagactgtcctctcttgggtgggggcgtgaaaaggaaagaaccatagaaaaggtgaagcgtagaaagattaggcagggggccatttaaggcagtgcttctgaagtacctgaggattttgttagaatgaagcttctgatttccgaagtctgggttggagctcaaggttctgcatttctaatatgccttacatgttcccagatgaagctgacagattttgctttgaaaagcaaggttttaaagcatagttggataccaacctgttttaccgggttctagctagtttttggaagtatagactgtgggaatcattctcagccataaatgttagggaaccctagagatt

SEQ ID NO: 393812 - DNA, 426 bp, Homo sapiens
taactgggataacaggcatgtgccaccatgcctggctaatttttgtatttttgatagagatggggtttcgccatgttagccagtctggtcttgaactcctggcttcaagtgatccacccaccttggcctcccaaagtgctgggattacaggggtgagccactgcacctggccattactgcattattaatagaactggaaaactaaggtaccagtggagggactgtcagaaaaaagcttaaaggatgataaagatcatctcttcctctacaggcaaggagtctttgctttaatcagaacatctgagatgttctcacaaatacattccgctccttctggttcatgggatctatggctctgaccagcctaaagtggccactcacctttaaagcatgaaaatctcagctttcctctaagtctaccttgcc

SEQ ID NO: 393813 - DNA, 384 bp, Homo sapiens
tactgcccaggtctctcttgctcttttgattattccttgttagcctactatgctgataactttccccatgtgccccatgaacactagtatttcccaccattacatccaagctttcatctgtcaattcattcaatgaacaatcaccacctacttcattccaggaggacaactttgtcagatccccatttgtcaatggttttgcatgtgaaccaatgctccaaatcacttgcatcaaagaaacaaatgctgccttgccgcggtggctcacacctgtaatcccagcacttaaggaggccgaggtgagtggaccacctgaggtcaggagttcgagacccagtcagaccaacatggcaaaactccatctctactaaaaatacaaaaatc

SEQ ID NO: 393814 - DNA, 334 bp, Homo sapiens
cccgcgtctactaaaaatatcaaattagctgggcatggtggcaggtgcctgtaatcccagctattagggaggctgaggcaggagcattgcttgaacccaggaggcggaggttgcagtgagccaagatggcaccatgcataggttttatgccaatactacaccattttatatcaaagccttgaatatccaaggattttggtatctatgggaggtcctggaactaatcccccacagataccaaaggatgagtatacaccttttcttactttcgaattttgaaccagacagatacgctgcaattcaacaaattaaaataactgaacctacaatcaag

SEQ ID NO: 393815 - DNA, 410 bp, Homo sapiens
agaagtggagagagctttagaagcatggcacaaataaaaggaaagaggcaaacaccgtcattctacatctgtttattttgttattaacaaaaggcaaggcgattttcattaaagttttgctggggttggggttgagggtgtagagagcaaaagtgtgagttgtacaccatgactggaatcgcttggacatactcttcagcagacatcgtgtgactgtggaagaaatgagtttcatgaagatgactgatagaaggaagccactgaaccagtcctctatcacctcttccaaggctaaagtttggagccacttgcagaaggctctcctcaaacccctgtgttctttgcctacccctgctgttgccacatcatcttggagagctggctgcttccctcctcaactagaagttcct

SEQ ID NO: 393816 - DNA, 504 bp, Homo sapiens
taggcactgcctccttggaaggctttcccacggccaagccaggtctcccttctctggtttgctgggtcctatgcttttccccatcacaacataggctcctgtgttgaaatagtctttttactcctggctttggaagaattacccaggttgcaaactctctgagggcagaagtgcatctctccatgctcccactgtttcctccgggcttggtgcagagcaggcactccgaatatttgctgaatgaataaaggaatgaggacgggtgcctcctacccacttcctccctctcagatggctgccaggacccccaggtatgatgatgggcccaagttgatgagttgatgagacagcagaaccctttcagggagtgatggatggtgaggctggcactcagcacttccagctggtgcatgagttttaagaacggatgtttgtgacaattctgattacgttctagtttttgaaatgagtcatgttggtggtggccatcctgcccattgggac

SEQ ID NO: 393817 - DNA, 588 bp, Homo sapiens
ataaacctagaaagaacacagagcaattctaagtgaatgagtgtgttttatagctgggccggtattatggccaaacttaggctgggtgagaagtagaacagatcatgatacctagcagagcaaactcggcaggcggaatagaattcctagaaggagttattttgtttgtgaccagggctgttgaggattcctcaagatagggcctcaggcatgaactagaatactggaagggaaccaggggttgggggaaaggggtttgggcagagccgggacaggtaattagttaaagtcacacataattgcagaggttgtgtgtgctgctagaatcacagccgtcacaaagaaggtgtggtgccaaggtgctggccgaggactcctgtgtgtcccctggtttggattagcgctgaccaaaagtgcccgagtcagctttcacgtttccaagtgggtgaggcaggatggtgaggggtatttgcttggtaccgcgaactctgtccagacactgaaaacatctacaacagaagatgaggaactctacaagtttcctggaatttttgctggttagaaaaggaatatgtgtttggttatgtc

SEQ ID NO: 393818 - DNA, 691 bp, Homo sapiens
gccaggtcatcttcatcttttcttagctaactgaggaggacagtcatccaagctggggtctcctctcctgtgtgtctctcctagggatggagttgccaggctttgtgcttgttttacttcttctccagcctttccttcccctccctttcctgttccctaggttggtcatagcagaggttgtgttggagggtggtactggcttttgggaaaaagaggacaatccccatgttcttcaacacggctgccgcaaacactacccagaaacaggctgggaatggggacttgaatgccagctgtggggtgcctgccttgcagccagctctgccaaagcttgtggttatgattgtctcctttcttctgcttcacagccagtcataaatgccatcttccttggatgtctgagtcccttggaaactgggctctgaactcgattccactggggttaaccatgggctatgctatcagaatttccacctaggcctccagtttccttagagcaaaaggaaaacaaattgtgaaaggggagtagcagagtgggaaggtggtctaaggacagctgttctgacctgagtaatattacatccctgatgggaggcagcaagtgcagcaccttccacacctgaaaccatcacttaaatagcgcttcatggtttggggactgtgacagtttcctagggggctataacagagt

SEQ ID NO: 393819 - DNA, 186 bp, Homo sapiens
agcttccagctctaatcagatgaaaagccagagagaaactttgtcctctcatggtggtccattagtgtgattaataataaatattcccagacacttgatactggcaaaatgccttatcagccctgtttatgattacccacctgctatctcgaaccattagtctgaccactaaggtgcgggggtgat

SEQ ID NO: 393820 - DNA, 243 bp, Homo sapiens
ctgtgattatgattgtccagcagagcccacctttaaacaagatacaatccttacaaatgccaagactgaggaggggttttcccaaaggatccactttgctacagtattgtgtgtttgtttggccatcagagaatcagaggagggaggtgtccagccagacacaagccatgaacactcgtgcctgcttccaagggctctggccacaaggtggcaccatgcagcaacgcgtgtccctccagttgt

SEQ ID NO: 393821 - DNA, 829 bp, Homo sapiens
atttctaaaaatcgtactgacctggagtgtttttaagaggggctaggaaagaatagggtagtgatgcctttttttgggggggaaatatgacttttattataatgttaaaggaagaaaggtagcagagttagaaaagaaatagcaaaatgggccaggcgtggtggctcatgtctgtaatcccagcactttgggaggccgaggcgggtggatcacctgaggtcaggagttcaagaccagcctggccaacatggtgaaaacctgtctctaataaaaatacaaaaattagccggccgtcgtgttgcatgcctataatcccagctactcaggaggctgaggcaggagaattgcttgagccaaggaggcggaggttgcagtgagccaagattgtaccactgtaccccagcctgagtgacagaatgagactccgtctcaaaaaaaaaggaatagcaaaatggagatacacatacatagatgtatgtatgtgacaattctgaattagaagactaagttaaagtatttttacttgttcacctcttctactggtacacattgagtgagcttacattatttgtagattgtctttgacaggtttcagagatgggtaagaataataatctttggcaaggaacagaaacccttagggcagggggatttggggtgggggaaggaaaaaaaaagaagaagaagaatcttggctgggtatggtggctcactcctataatcccagcactttgggagtttgaggcaggaggatcacttgaggccaggagtttgagactagcctgggcaacatagggagaccccatttttataaaaaaatttaaaatta

SEQ ID NO: 393822 - DNA, 477 bp, Homo sapiens
gacccatcacctttttgagcactctggggtaatagactttatagtcctcttaggttgccaaatgctttcctaactcagaaattggaatatcgcatctgtgtgagagtgaaagctgtgacagttgctcactgccctgtttggccctccagagttagaacaggaggagggagccaagacagggagggagcagagatctcagccctccataggaattgtcctgtcggccgcccttcctgggctcagccagggctttgttctcattctctcatggggtactttcaggaatctttgaggccccctctgtctccccacttcttgtccccggctcagggccttcccatgtaccttgaccaaggcagctcctgggatgtgctaatgctgtcgcctcccaccacaacttcctcctttgcagctcgtaggaagccagtgatagctccagcttctttctactgagccctgtccacacccctaggtggc

SEQ ID NO: 393823 - DNA, 369 bp, Homo sapiens
gaggtgaggtgtggcaggtgggaggatgagtgtgatataaagaaccagggctttttgcagccagcactcctgagtgcattcttgtctgcagctgtgagcttctgtcttcccatgtgcaaaatgagaggataaggagacagtaatgcaccagaatagcttgctcactgctgggtgaggtggctgatgcctgtaatcctggcactttgggggaccggggtgggcagatcgcctgaggtcaggagtttgagaccagcctggccaacagggcaaaatcccatctgtactaaaaatacaaaaattagccgggcttggtggtgtgtgcctgtaaccacagctacttgggaggctgaggcagaagaatcacttgaa

SEQ ID NO: 393824 - DNA, 317 bp, Homo sapiens
tgtgcccaaaaccaagttggtattgggcgccctgcagagctaaaggaagctatcaaacctaaagaaatactagaacctccggagattgatttggatgccagcatgaggaaactggtcatagtgagagcaggatgccctattcgtctctttgctatagtgagaggacgaccagcccctaaagtcacttggcgaaaagttggcattgataatgtggtcagaaaaggacaagttgatctggttgacactatggccttccttgtcatccccaattctacccgtgatgactcaggaaaatattccttaacacttgtgaaccc

SEQ ID NO: 393825 - DNA, 294 bp, Homo sapiens
cagggaatatcactccaccatccatttaacagtataataagggaatcttgtcaacaactttatgtttataaatatgacaacataggccaggtgtggtggctcatgcctgttattccaacactttgggaggccaaggtgggtgtatcacctgaggtcaagagttcgtgaccaccctggccaacatggtgaaactccgtctctactaaaaatacaaaaattagtctggtgtggtggtgcacgcctgtagtcccagctactcaggaggctgaggtaggagaatggcttgaacccagg

SEQ ID NO: 393826 - DNA, 281 bp, Homo sapiens
accctgtaagctgctaaaccgacatggactccaagccaaagctgcataggcctctaggcttttaaacatgtggctcctgccgccctgcgggtggtattcgaaatatttatcaggtgcatgtatacacgtgtggacaggctgagcatcagcaattgctgcctgccctcaccaacttgcccctcaaactcttacccagcttttaggacccaggacaaaagtcactccctctaggaagccttccgggatcctctccctcctctgtctgcgccatgctctgcccc

SEQ ID NO: 393827 - DNA, 263 bp, Homo sapiens
gacatcatgcttggctaatttttaatttttttgtgtgtggacacaaaaaccgactaggtttcccaggctggtctagaactcttggcctcaagtgttcttcctgccttgacccccaccctctccaaccaagcactgggattacaggtgtaatgacagggagtcatcacatctggcctcccctagcatttagatattaaactgttggaaaaatgagtaaaaaataaatgtaagtagcattttgagtattttcttcccatacaccc

SEQ ID NO: 393828 - DNA, 137 bp, Homo sapiens
cttttttaaaataaactgtatgatgcttaaaaaaccaacttttactttatagaatattcccttttcccatccagtcccaactcttcaagaagtattttttcttctcaaatcatctgaactttaaaatttttttttgt

SEQ ID NO: 393829 - DNA, 222 bp, Homo sapiens
ttgaaatgtatgacatgagggcaaattctttccatgtttgtttactcccttgtacttcaaggtatggaccatcttttacctatttgttggggtatccaagtttgttgtataaatctagatgtatagattctagatacaacatcgtaacttcccaattacttggtttttttaattgttactataaatactcttctaaaggttctaagttttgttttgtttttg

SEQ ID NO: 393830 - DNA, 545 bp, Homo sapiens
  misc_feature (338)..(338): n is a, c, g, or t
  misc_feature (481)..(481): n is a, c, g, or t
gtgggaggatgacatgaggccaggaacttgagaccaacctgaacagcagagcgagaccctgtctctacaataaaataattttaaaaattagctgggtgtggtggtgcacagctgtagttgcagctacttgggaggccaaggtggaaggactgcttaagcccgggaggttggggccaccatgagctgtgatgataccattgcactctattctgggcaacagagtgagacccctgtttcttaaaaaaaaaaaaaaaatttttttaaacccaactttacaacttttttaaaaaggtttttaaaacagaaagaaacaattcttaaaatgcaaaaaagcaacnaatctcacatcagcacaccgtcacattcctctgaagtcagctatactaaagctagagaatagattatccacatgaaagtgactaaatacgggcattggctgtgtaagtacaattagtgctgtctataaatgccgttttcaaanttaatttatcttcatagcagttcagcaggcaagtgtcactgacgctatggctgtatgacgtgca

SEQ ID NO: 393831 - DNA, 206 bp, Homo sapiens
cccaaagctctgggaggacatagtattcattcctccctcagcagaagcggtgaggcaagaagctctggggagcacccagccttggacttttagcatagtgtgtcaggtcttcatagtttgggcccagggcacagagaagtcacagctctctggcatcctgtgacctttaccctctttgccaagggaaaatgtggcccaccaaagca

SEQ ID NO: 393832 - DNA, 160 bp, Homo sapiens
aggcccaaagggaaaatcgggggaatttctgatattcacagagatgtgataagtggatgtttttgtttgtgggagaagacacgaaggcttgtgttacatgttttgtaatttaattgcataatttgcacaaaatttaaaactcacacaaaacaggaccaaa

SEQ ID NO: 393833 - DNA, 523 bp, Homo sapiens
gttctctcttgcttctgctcctgccatttgaaatgcttgctccccctttgccttccaccattattggaagcttcctgaagcttccccagaagcagaagcttctatgctttctgtacagcctgcagaacagtgagtcaattagacctattttttaaaaattacccactctcaggtgtttctttataccagtgtgagaatggattaatacaacctacactttagactaaatggttacccatttagtctaagacatatatagaacattccatccaacaacagcagaatacatgttcctcccaaaatgctgggattacaggcatgagccacagcacttggcctatatcccctttcttttggctgatttctccctttggaatgggagtatttaccaaatgcctatattttcattgtatcttggaggtaactaacttgtttttgattttacaggtccataggcaaagggactaaccttgtctcagaagagactttggacttggacttttgaattaatgctagaatgagt

SEQ ID NO: 393834 - DNA, 437 bp, Homo sapiens
tctcacgcagccatcacctcaagctgctgccccctctcattccgctcttcccgtttgccttgtgatttaatggttaatgttcatgaaccaaagattagactcctacctccctgggagaatcaggaagtgagaggaagcagattatacaggagagagttttttaggatacatttgggtacacctcaggaagaaagagggaagtaggaaacacagtttgggtaaagaatgccatgggctttgttttattttgtctcatcaagtctgaataggacaagtggagatgcactctgataggagtttcttgcaatcaaggactgggctcagtgtttgtctctgtgcctggcatagagtagcaataactgcacttactattctcgacacttcaatcaaagcacttagcatattaattaattacactcacagcaagaccccaaaag

SEQ ID NO: 393835 - DNA, 477 bp, Homo sapiens
cttacacctcagtagtacaagggctttaataagaatttgccccttttttgggactataaggatcggtgagtgttaactctgccctaatgatgacttaggaatgatgccagcggttccataatctcatgcctagaagtatcaacagagggtgttgcaggggtgggggtgaaggattgaccactccggcaggtgccatacgaacgcaggccctcccccgaaagcacagtcatacaaagacacaaaagtttgaggatgtttaggggtaggaaataggctattcctgagttcttaggaatgagtagtaataaagctcaaatcacttgaacaaagccagcttaagaattcagatttcccgactgtgcctagcactcattccactaaaccatactgaaaggcaagacagaacacagagacaaacagctagagtgcctggcttggcagtctgagaacacagtactactgagttaagggaaccag

SEQ ID NO: 393836 - DNA, 305 bp, Homo sapiens
gttagctttttactactcattcctaagaacgcaggccctcccccgaaagcacagtcatacaaagacacaaaagtttgaggatgtttaggggtaggaaataggctattcctgagttcttaggaatgagtagtaataaagctcaaatcacttgaacaaagccagcttaagaattcagatttcccgactgtgcctagcactcattccactaaaccatactgaaaggcaagacagaacacagagacaaacagctagagtgcctggcttggcagtctgagaacacagtactactgagttaagggaaccag

SEQ ID NO: 393837 - DNA, 766 bp, Homo sapiens
gcagctaaataagttaactgagaattacttcaaatttgttttccaagattagagataaaatgctttcatttttaaattaaagtttgctgaatgatatatggagtctcgttgagataaaccttacctttagaaattatgcaaagagcataggagtaatttggtaaaagatttctggggaaatgaaaagctttggaattgatcttaatggaaacagatgaatggatctgaagttatggaatacattggataaaaaaaagcagtttgaaatttgttccaaaaatttttcttgaagccagtgaacagatttagagcaaagtgatggaacagcaggaaagacatgtgctttcattaaagcatctagatttaatagggcaggcaaacaggtaagaatctgaaaggaactcgacattatggctgaaccagtagggatatttttcgaaaggagtttttaaagccaggttagaatagtttgtttaaaaaaatgtcgagagggagatgggtctttatttcattaagtattatgagacagcttctatgtgccaggtactaaggatgaaaaataagactctttgatacctatgaacaaatatgtatgcaaataagaaacttaaatacttataaaataattgctttaatagggggtatgtgcaaagtggggagaactttaaatatgcttaagggagtcagggaaggcttcacaaagcagattatatttgatattaaatatgaaggaaaagttttctaggtggacaatagaggaaggaca

SEQ ID NO: 393838 - DNA, 271 bp, Homo sapiens
ctacgtgtgtggtctttgggaaaaggctgcgtttgaggctcctaaaggtggagatgcccaggagtctgcagacctgacttcttccgggagcaggaacacaattcgggagaggaaggtgatgcgaggttgatggaagctggcgagtaccagtccctgccaccaccaccattttatcatgaacaattgtaagcacacagaaaagttgaaagaattcacagtgaacacccattcacctgctgtctaacgttcccagtgatgatttttatgcgct

SEQ ID NO: 393839 - DNA, 755 bp, Homo sapiens
ggctaagagaatattttcagtcctgagcgtcagaagacagtggagcttagtggagtggagcttggctctgagtcaaacagacccagattcaagttgatgctttgtgtcatggtctgtgattttagagactggcgtttatcctctcaccaactccattttgtcatccatataatcaagctaatacgataatactacctctttcatgaggcttttgtgaggattaaatgagatagtatatagaaagcaatcagtgggccaggcgcagtggctcatgcctgtaatcccagcactttgggaggccgaggtaggcagatcacctgtggtcaggagtccaagaccagcctggccaacatggtgaaaccccatctctactaagaaaaattagccaggcttggtggcagtcacctgtaatcccagctactcaagaggctgaggcaggagaatcgcttgaacctgggaggtggaggttgcagtaagccaagatcgtgccactgcacttcagcccggaagacagtgagactgtgtctccaacagaaaaaaaaaaaagaaaagaaaagaaagaggaaaaaaaagaaagaaagaagaaaaagaaagcactcagtgctaggccatgtctttatttcatgactatccacgtagcttatgtgagtaaacagctatatttgggaaaagctactagtgacactgatattgacaggaatttgatttgacatttaataagtgcctggtatgtacaatgaagagtgaaagatcct

SEQ ID NO: 393840 - DNA, 644 bp, Homo sapiens
tctaaagattttagagcatggaattgagtgcattgctttgacttactcgttaggcaatatagaagcattcataccttcaatggagtattgttccttctaacaatatcgacccactgctgaattcttctaatgatgttgctattatttggcatatcatgggagtagcttttttacttaaatacgtttagcactttctttttagcaactatttgattgggaggattaatatgatattgtttccagtagcttgtagatagttctaatatgaagaatcagatttggtgatcatcctgaataatataataaacaccagttgggctagtatataagaaaattgggctaggtaatataaccaaaagaaaaaaaaaaaaaaaaaaaaaaaaatttttggggggcttgggccctcggaagaagtttctctaagacccatcccgtgttggggcgcgcgggggcgcccccatagtgggtagtctgtggacaccttggcgtcatcagcggggtgtccccaaaggagaaaatccgtggtacgaagacaacgcgcgtgggggttctccaccaattaaaaaaccgccgggggggaagccggcgcgtccccagaacaatctcaaaaatgggcagtcccgagggcaccacgggcgttacag

SEQ ID NO: 393841 - DNA, 439 bp, Homo sapiens
tattccacagcagcaataggacactaatacaatgtgttacctgcagaaacatcagatgcactaatggtggatcagaatcgcccaggtggcttattgagtacaggtccccaagcaccactcccagatattaggattcattagatccaagtccagccttcgagcccgcattcttaacaccctttcttttccaattatctagcctgtaccgatgtagaaaggcttagtaatactcatgtaagaagatgaaatccagaaagatctgttgtttttcaaaagctgggtgaaggtttatggaatatgtttggcagaagtactaactaaatcataaataaattttttacaaaatcctagactattagagtggaacagaccttccaggatgatctagttcaatgcttgcattttacagctgcaggaactgatgcacaaggaagtccag

SEQ ID NO: 393842 - DNA, 430 bp, Homo sapiens
aatgcacagaaggaaagggatagcaaggggatactgtgccttggtaagcgtggtgccaccgcagactaaaagcagatataagtcaagtgctactgacttaagtttggcaaaatcactcctcacagcccgctctgttttagaaatgtttatatttctgatatcacttttgttaatttgaagaacttttaaaataccatcattgtttcaaaacaaaatgtggaaggtgtggatcaccttcctgaatttacagaaaagtttttgggtacatttctttgcggaagattggctgagatgtggttcacggcagggtggtgcccgtgccttgcggatcacgttgtctgtacactgactgacataccaacttagagtctttgaaaatgcccattggtaagtcaacattgttttccctgaaagtcctgagacagaaaaa

SEQ ID NO: 393843 - DNA, 476 bp, Homo sapiens
aacccggcatttcgctacctggcatttcggtacctgtcatttcgttacctgtcatttcgttactctggcacctcgatctttggctgaaaagtccaggcctgcccacacttggcctcggagtggccttagcccagcctttgaggcctattgtgtggtttttctcatcttcttattaaggaaatagcagaatccctggagctcacccggaaaatgtaaaccacagcgggaaattatgcaccacagtggatgcccagacagggggcacattctgaagcctggcggcctcaggcccagccttcgggaaaagctcactcctgtctcatgtgaaaatgctgttttgctggtgttcattggtcaccagtgatggtcactttcatgtcttcctttcagtttctcttctgccggatgaggcataaattctgatggaccccacctgctgtaagatctttcagaaaagactttgggtcagtctcctt

SEQ ID NO: 393844 - DNA, 630 bp, Homo sapiens
cataaatcaaatcatgtcactcatttgctcacaactctcaaatgagttctcatttcccctggagttgaagtcaaagtccttacaatgttctataagctttattcgatctgataatctctcaacttcatccattttttccttttgttcgctctgctccatgcactccctggcatacatcaaacaagctgatttcagtgtcttcgtatttgctattctttctgtctgaaatgttcttccctcagtttcctgcatggctcaaacctctactcaactgtcatcttacagtgaagttttaaatgcccaccttatttacagtaacagcctcacctcactactgatccccaactccaacccacattcttcattattttcctggtctccctctctacaaccaaatgtcagcttcatgaaggcagggatctttttttcactgccaaattcctcagcctctaaaacagtatatggcacataacaaggattcatacttcggtgactgattttctgctaatatatgactaatgacccctttgtaaatgccacataaaatctccaagttctgcatttacaacctaagcaacattgatcagcttcacacaaacttctgatctgaactggataaaaattactgag

SEQ ID NO: 393845 - DNA, 300 bp, Homo sapiens
acttttttttcgttgttgttgttgttgagacagggcctttttttgtcacccaggctggaatgcggtagcacaatcatgactcattgcagcctcaaactccctgactcaagcaatctttccacctccgcctcctgagtagctgggcccacagatgcacaccaccatgcctggctaattattttattttacttttgtagagatggtgcctccttacattgcccaagctggtctcaagcaatcctacttcctcagccttccaaagtgctgggttttcaggtgtgatccactgtgcccagctct

SEQ ID NO: 393846 - DNA, 669 bp, Homo sapiens
tcagcaaatttgtacaaatatacattttctcctgtgcgaatttcaaaaagctatattcattttgaagaggaaaataatatggcattaaatgctttgtattttccccttagttagcccttatggcaaaaatagttgctaatcactgatacaaagcaaaacgttatgggtactgataacaaagttccaaaagccaaaatgggatgaatcacaaacttactgtttttcactaaaacatgtaattggcctattacatcaatagttttaagtgggtaatgttcttgaacaatattagagccataaaattgaagccagtagcttgaacaatatggaggccttcttactgtagggaagaggtgtctagcttagaaggatcacatttgatctagatgagattacccatagcagggaaaatgaatcatcacctaccaaagactgtacggaaaggtgtgttattttcaaaattgcattttagtttgcacacatgtaaatgattattctatgttaatctaattgacaattcagttagctccgcatcctaagacttaaaactagcaattcctatgcaaatcatctgcttaactgaactacaaacgtttttcattaattcattctttgatgacatattccatgttatataataattcaaaataaagttaatatactacccca

SEQ ID NO: 393847 - DNA, 169 bp, Homo sapiens
caagggaaaaaagctccagaaagtcaatcacacaaatttctctatcctatattaaagacagaaattccccctcttccattctgaggcctttgcctctcatctcgctggcactttgttctgcttattttgcatatgtcatatgtatctctttttcatacatcttcaaaca

SEQ ID NO: 393848 - DNA, 244 bp, Homo sapiens
acccacctcagcctcccgagttgctgggattacaggtgtgagccatcgcgtccggcaagccaagctattattatttggcaggacattttaggtgctaatacagttttgtataaatattgtaagtatcagggtatgtgtttgttttacaaaacttaaggaaaacaaccctgtctcttagaactgtgtgtgttttcaagagtataatatttcttgccagtagataagatgcatgataggagggggg

SEQ ID NO: 393849 - DNA, 459 bp, Homo sapiens
atcaagagaaacgcatgaggtgatccaatcattgccagggtgggttatagaaaaaggaatccaaggatcaggtgtgggatgtgtgaggagagtgatttgtgaactgagatccacaacaccgggccacagtaggacttagcttctaattagagccttgtgtctgttgtcggggcatgaagactccttctagattcagctggtggctggagagattttgcacagtcctaaggggaagtcctaaggcatactcatccatctacccactcattgatttattcacgtattcaacagctagatgtggcgtattcattactcaacacctattaaggggtcccctacgcaccaggcactgtgtcaatgtcgagactgtgcaaggtcacgtaaagtttcatctttatcctaaaagcaaatggaagccactgaatgcttttacgaagagatgtaacacaatcagatggc

SEQ ID NO: 393850 - DNA, 322 bp, Homo sapiens
ataaacttgctgaatacttgaattctagagcggtaggcgctgttgttatgctctcccttttagatgagaaaacagcatctcagagaggcagatcatttccagagctagtggatgcccagtgtttatagcattcaccccatgccaggcgtgtgacagggcttttgtacatgtgatctcacttaagtctcaaaacatacctgtggttaggcctattttatggagagctacgagctagttagaagtgtgataccattttacagatgaggaatcatttcactcactgtgaagtgcaaagatttcccagaggtctcatagctgaagt

SEQ ID NO: 393851 - DNA, 747 bp, Homo sapiens
gaaatggactcttgagtgattcagtgagatcatacaataaatggcaacctggtggtagaaggaaataatcttagttatttcctttccaagtgaaaggaaaagatctcaaataattaagcttttatgaaacaatacaaaggagttgattattagcatggggatttgtccttagactaataggattaaaatttaagaataaaatggaacatgaagccaaagaaccaagtgtatgttgctttcaaatattttgcaaaaaatttgaataaagagtctattaaatagaaaagaagactaagattttatccaactacttattccttataagaagtaagaatatttagagaatgaagaggaataaaagctgaatgtcttagcaaaacttcactgctcattttaatcttatatatgaagtttgttatatgcttgcctttaaatgaatgacctttcagtgccagtgaagtcaaatatcaagcagtaaagccttaagtaacaagaaaatgccagaagtgagttgatctggctcaactctagtagaattctagaataaacttagtttgaatagaactttcttttgttgctgaaaagccattgaacatgtattcattttcttcccttagaaataactgagcctcggctgggtgaggtggctcatgcctgtaatctcagcactttgggaggccgaggtgggcagatcacttgaggtcaggagttccagaccagcctggccaacatggtgaaaccccatct

SEQ ID NO: 393852 - DNA, 543 bp, Homo sapiens
gagagagagcgagagagagagagagcgagagagagagggagagagagagagagagaattgtgtccaaagaccttgggagcacagctaagagcaatgatttgttcccggaaagctgaggagagccgtagagtgggaatatagttggagcagaggcttacaggatgcacgttccccaggaagttgacaggtaggggattagctgaggtagggtgtgcccagggaaacagtcagacatcggtgtgtggagagagacagccggagagaacctggagagggaaacttgtaggaagggtattggatactcacccagcgggcaatgaggtgcctcaaatagtgtgaacaaaggaaggtccctccatttcctgtgggccaagtgcaggacaggggtgtccatgacaagagagcttcgggatggagttttagctgaacttggaaagaaaggagaggagaagtacagaggccagagagaagagtgagtgcctgtggggtggcagggaaccgtgcgtgcggaagaactgtgcaggagcagcaactctcatggga

SEQ ID NO: 393853 - DNA, 403 bp, Homo sapiens
caggtgcatggatgcctggtggaatgaggaagggatgcagccaggtagagaaatgccctgccatcacttgcatcagcatctgtgaagagctggccaggcttttgctcacagtggttgacacagtcaaggagcaagggccccgtaggagaggggagtcaagggctccgggtgggaatggagctgggggctgatgctggcttctggagcactgtaatgtgactgagaaaggtgaaggagccgttctgaaaaagaagaaggcaggagctcgcacagctcttgactcatcttgacttctttttcctgcttcatccaagcaggtcgactctctcgtgatctcagagacagagtgaagtcatgagtgggaggggagcacagaaaataagaccttgattcccagcattgg

SEQ ID NO: 393854 - DNA, 621 bp, Homo sapiens
atataacacagtctaatagcagagctaataactgtcatagtttcaaaatagcagttgagtttaaggccaggcacagtggctcatacctgtaatcagagcacttagggaggctgaggcgggtggatcacttgaggtcaggagttcaagaccaacctgaccaacatggtaaaaccccgtctctactaaaaatacaaaattagccaggtgtgggggcatgtgcctgtaatcccagctacttgggagtctgaggcaggagaatcgcttgaacccgggaggtggaggttgcagtgagccgagatcgtgtcactgcactccagcctgggcaacaagagtgaaactccgtctcaaaaaaaaaaaaaaaaagaaaaagaaaaaatggcagtgagtttaaaccataccctgaattaatctgcaacaagtgtgatgtgatgggaaaaaaaatccatgtgatctctgttggtgtgaaattcaagggggttgttaatacctctgtaatttctactaacttcataatagaaggaaatgctaaatatcagaagttcatgaaaaaactggtttcctcccatccaagttcacaggatgaaccccagatccccatggccccagaataagagcccacac

SEQ ID NO: 393855 - DNA, 503 bp, Homo sapiens
ctagatcctgaatgtatcatatctgtttcacaatggattgctgctgtgctccattttccatgtcatctttcattaactctcccaattatcagttttattaaaagcataacatgggacaaatactcttgtagaaaatttatgcaagaagtttatgccagagaaaacacctagactgaacacttcatgtgagaactgcactgtaggatctggcaaattctgggcaatttcagcctgcaaagttcattcatttatcccacaaccactgacacttttccccttttcctaaatgaatgtgaaatcttggggcgcatgggcctctgtgtttgtcctcagcctggaacttcattcatatctagaatgtaaagttgccccagaatttgtcctttggttatatcaagccatggtttcttgtcctttcagatctgtgaaagccactggcttggccctggcttttgctagtcacccaaaggcacgaagttggttcaagagtcccaggacacctc

SEQ ID NO: 393856 - DNA, 127 bp, Homo sapiens
caaggccatgaaaaacccataattaaaatatcctcccatgaaaagatgctcagcatcactaaccattaaaaaatgcaaatcaaaaccataatgagatactacttctcacccattaggaaagcttatt

SEQ ID NO: 393857 - DNA, 563 bp, Homo sapiens
tgctgggattacaggcatgagccaccgtgccgggctgacagtggtttttaaagggggagggcagatgaaggacgttggtggaccatcctctgggaggagatgtggactgaggaagcaacgctgacctcaggccccacaccaccctttcacctcagcctcactttctcatcagtaaatggaactcattcttgtgtatgtgccatggaggcaatgtagcagaagagaatagggcagactttggaactcagccatctgggagaaaatcctagttatgtgatgaccttgagccaatgactgaatttctctgtctcattttctcttctgtaaaatggggacaattacagtgaattctgtgaattcattcatgtccctgacacatggtgtgagctcagtcattacctttgccagggttgcaaggatgtaatgagatggcagatgtgagcacagctcccagacccgaaggtgctgtatgaatgggagggagcagtgagtgttatttgggaaatattgaagacacaacttccctcccacatttgtctggggtggagcaacagttttactta

SEQ ID NO: 393858 - DNA, 656 bp, Homo sapiens
caatggtggagcaggagagagagagaagggggaggtgccacacacttttaaacaaccagatctcatgagaacaatctcactgtcacaagaacagcatgggaaaaccaccccaatgatccaggtacctcctgccaggtccctccctcaacacgtggggattacaatttgacatgtggtttgggtggggacacagagccaaaccatatcaatggttaagaattataaggtatgatatggcttcccaattgtcaaagaattaaaatgctcattaggagaggagtgactgcttctccctttagtagaaaaacaattcaaactcaggttaccaattacaatacacaaactaaaacagttatgttgagccgggaaaccgtcttcttgtaggctatcttctagcaccaaataatgcccacatgatttctggctgaaggccatcagaatggaattttagcactggaagaatagagttaatgttacttcttaaggagaaacctattacctttgtacattcattgaaaatttaggaagcataaattacatatttctgaacatactgttttgtaagtttttttaaaactttgttgatattcattgacccacacaaaatagattaatgaagaaatagtttgctgacccataccatgtcttcattattg

SEQ ID NO: 393859 - DNA, 310 bp, Homo sapiens
catggaatggctgtcagtataattgattgatgatggattagaatgctgaaaccttgagggtcaaggattacgtattgtgagctgggactctcttggatttgcttcagggaatgggtgtcattgttaccaaaagcctccttgtaagaaggggcaagctcattggcttatctgcactgagtggttttttttgtttttttttttttgttttctttgagagacagagtgtaattctgtcactcaggttggaatgcagtggcgcaatctcggctcactgcaacctctgcctcccaggctcaagcaattctcaacc

SEQ ID NO: 393860 - DNA, 389 bp, Homo sapiens
tcccaacggcagaaggaaaacaacagatactactgctctatcaatcccctctgagctcagatctaaactgtcccaggcagctaagcccaaggttttctgaagacatagtcctcattcgaccttctctgaacaagcttttcattctttcacagccgatagtgtcctatgtacccactacggcaacatggacatcagactttcttaaattaaacaataagactaaacaaaactaaaatgacttctacagttccaggctcacaggcagatgaggcattctagcaaaactagaaaagtcccggagggtccctgcacaaagctgcagttggagcagactgaacttccagaaaaagcactactgtgactggcagaggtcagaaaagcaaagcctg

SEQ ID NO: 393861 - DNA, 148 bp, Homo sapiens
agccaacctttccagtctcatcccttccctgacaacttacatagatccactctgcccagctcatcctttatatcaagtcatggcatgggcacagacaccaatcattttatagaaataggcctgggacaggtgtgtggtttcaggaaca

SEQ ID NO: 393862 - DNA, 360 bp, Homo sapiens
tcccctggatacgctcgggttacacaaacacaaaaagaacttggaggtgaggggataggcagggaaaataaaaagaacttcaaatagtcctgttatatttgtgccaggtgcggtggctcatgcccgttatcccagcacttaggtcttaaaaattcagtatgctggcacatccaatgtacttaacatacacatcaatcacacagatgtagaaactgggtataataccaagttacatgtgggaagacggtgacacagaggtcacacagccaccgccataactatggctacatgacaacctaacttcccatcatggaggacctgggcatatttactgagccagccttaacacgtggctagtga

SEQ ID NO: 393863 - DNA, 594 bp, Homo sapiens
tatgtcctatagacagtaagtagcaaaatcaggacttggggcttcaggcacagaagagtacatggaaagaacatggactgtggggttaagtaacttaggttcagtgtcttgttctgctgctgtgtaacatcaaagtgttgatttagcgtctataatggggggtattgaccatgtccatcagattactgtaaagattaaatgaggaacctgacacatagttggcactcagtaagttcatttggtcaatgtctatccagactgtgctgggtcctgaggatgcggtgatgacaaagataacaaagtcccctgccctagggggacttgccttgtcattggggagacagaggacaaataaacaaatcattacagatggtgcctaggaaggctaggaaggtaatgaagagcatgctagaataaattcatataaggaaacgactgcacacaggagatctagtaaggcctctctgagaaggtgatattgaagctgaaagatgagatgaagccaaccaggaggagaactgggaatcgtgtccaggataaaggacagccagtgcaaaggtgctggggtagagaagagcttggcagactccagga

SEQ ID NO: 393864 - DNA, 432 bp, Homo sapiens
tccttccccatctgcttatcttctaccttattcctagttctctaacaccgatacacattgatctatattctttaaacagatttttcttttcttcatcatctctttaaccagatttattgaattatttcaattcattgctagtgcatatagtttggcagccctgttaagtcctttgtagaaaaaggcaggttatgaataaatgaaaaagaaacataaaacatatagacaattcagatctcctaaattatctcaaatatctcattcattcattcattcattcattcaacaagctcgtgtctactggacacatgccctcagttctgtctattctattccgtaattcagaaagcagctttgagaaaagcatgcaggaaaatgccaggataacagggccaagttgactcatgctcttctctcatgaaggccaagtaa

SEQ ID NO: 393865 - DNA, 226 bp, Homo sapiens
ggcaacagaaccagaccctgtctaaaaaaaaaaaaaaatttccacaatgttctgcagtgcctatgtgtatatgagtctgtttctggggttccttattcaggtacactggtatgtttttctattgcaccaataacattatctagtaccatagctttaaaagagatcttgatgaatgcaaaataaatcctcccactctagttttctttggcaagagtgtctgggctat

SEQ ID NO: 393866 - DNA, 209 bp, Homo sapiens
caagcccttccgcagccccgcgcagccagacgacggcatcgacgaggcggaggccagcaacctgctcttcgacgagcccattcccaggaaaagaaagaattccatgaaggtgatgttcaaatgcctctggaaaaactgtgggaaggtgctgagcactgcagcaggtatccagaaacacatccgaaccatccatctggggtaaggcagct

SEQ ID NO: 393867 - DNA, 174 bp, Homo sapiens
ctcaagcagttctcctgtctcagctccccaaagtgctaggattaaggcctcttatcctttaaaaccataatgcctggctttatgcacaattgtgtccgattcacaattttccacagcatggaaagcagctgtaactgtgtttatattccgtcacccaaacttcttattctacct

SEQ ID NO: 393868 - DNA, 228 bp, Homo sapiens
tgaattttgttgggattagagaaaatgttttgagatggggcgagaattgtcttaaaaagtaaatagagttgcaataagtggtcgttttcctctggaaggaaaagtgttaataataggaacccctatgaaatgtattggattggcctcattaactattttttcccccaagggctcaagataagaaagtaccacgggaaatctccaaattggtacacaaatctaaattat

SEQ ID NO: 393869 - DNA, 735 bp, Homo sapiens
ctccagcttttccccaggccccttcttggccctcctcaccctcctgggctcagtcccaggatcagcctcctgcacagggtgggaataaatcctgtaggcagcctctgcccttgacagtggaagtcagggctgcctagcagggtctaattcattatttctcacactcagctgggggttagggcgggttgcttgagattcttgttaaacattcttggtccaccccgggtccctgaattccagtcagcaggaaccaaggaattaacatttgtgaccatcaaatcatccaaagggactccctttattggcagtttgaggaaaccatgggccagaggttggactctgaagttagacaaacctggctcacgtcctgcccctgatttgtcacatactgtgcagcctgggtgacttaacctctctgagcctcagcttccttatccgcaaaacatggaaatgttaataacagagcctgctttgtagagttactgtgggaaggaaaagaaaataatgattttacatcagtgtccaacatattcattcagcgcatagtcttgagcacctactatgagccagatgctaggctaggtcataggagtagagggtgagtaaggcaggtcccatttctgttcttacagttcaccttctaccagtaggggtatgagttggtaaatcaccttatttaccttacagtgaggcgattgagaatgggaggggttctgtaggccaagagagctctct

SEQ ID NO: 393870 - DNA, 202 bp, Homo sapiens
ctgagattgcaccactgcactctagcctgggcaatagagtgagactctgtcccaaaaccaaacaaaaaaaaaagtcagcattagggagactccctattttaggatgatccaagcagacacaggaaatcataggggagatacttaattttttttctttctcccagtctccctttttttcccagtgattgtgacgaagcaggtg

SEQ ID NO: 393871 - DNA, 453 bp, Homo sapiens
tgcttgtggaaggcctctctgaggtgatacttaaaaagagatatgaaggaaacggagaaagccaagcagaaaaggggtgctagggtaaggaaatggctgcgcccagtctctgagatgagtcttacctttttgaggaacagcaagaaatcccagtgaaccagagaaagaggtgggaaatgaggtaggcgaggtgaggtcatgcaagccagggggaaaatacctggatttattccagctctgaggaggccagaggaggattttaagcagagatgtgacatgatcagatttacatttttaagggatcactctggataatttgtgcagaggtatgagtcaaagcaagaaaaccaggtcaaaggctattgctaacagtcaacatgagccatgattgttatttccattaacagtatcactgaaatggtctgcaatctgaaataaagcctgaagaaacct

SEQ ID NO: 393872 - DNA, 434 bp, Homo sapiens
aggatccccggagggccgacggcaacaggtcacggcgcaagcagaggggtccagaagggagaggtcgggaggacgccccaaccggccgggctgctcccagagtggcacagtgaggggcaggcacccagtgccgtccaggactcaagatggggatggagatggcgtgagacttggaaaggacagggcaggtgagctcaggggaggaatgttacaataaacatgggaatagcttaagttggagaaatgtctgatgcctctttgagggtcatatctagcaggccgattcataggaaggttcactcccagtagactgcattaagtcatctgctcagattctctcttgtccattctatactcagaaagcagagatattccttaaagtgagattttcctatcttttataggtaggtattgatttttttctttacctttgt

SEQ ID NO: 393873 - DNA, 377 bp, Homo sapiens
gttcattgaaattctctagcctgaattagaagatgatcttatagataactacaagattcttcttggcattcatccaggttccaatctgatcctgttccctggagcagagctgagtggagcctcccaggatggctttgagggtgctcctggtggaaagccatcttaaacacactgctgcaaacagtgctattagccacaatagccacaatgctgcccccgttccagggtaaaagcattcagaagaaaatctggatactcagtactttcatcttgaaagagagtagttgctttcagcctaggtgcattcactatggaatagagtgagataaaggattctgcaggcaaatggaaggagagggccctgctgggtccctaga

SEQ ID NO: 393874 - DNA, 779 bp, Homo sapiens
tgtatgctataaaagaatacctgaggctgggtaattgtaaagaaaggaggtttatttggcttataattctgcaggctgaaacactgggtatctggtgaaagccttggactactttcattcatggaggaaggcaaaagggagctggcatatgcagagctcacaggtgcccagagatgctctccgcagcacactgctgctgcttgggaggtgtaggtggtgtcagcaattcagaaatgttttatctatttcttcagtgcttctttcagctatatgaagttaaaaacagccacttcgcttcttgaagacttcgctgcttagaaaatttttccaccagatgccctaggtcatcacttttaaggttggtcttccacagagccctcagtggatcacaattcagctcatcactttgctaactctaatcctttggtgccttgagacctattgtggtgaagtccgttctaaagtaacgactacagactgaatctattcacttcaagggtgattttccctggtggaaagaggcagaagagaaggcaagatcaccttcaggaacaagcaatttaagtactataatggagatgggtcttacagaagctatattggtgaaaggaataatattctctgagtaatctccagttaaattgtataatgagaatatttagtcctgaatatctaggtatataaatattcaggatacagattttggtccgaaatggaatacccttttacggaaggaacatgaaatgtcttaaaaaaaaaaaatagaaaatactaagaat

SEQ ID NO: 393875 - DNA, 296 bp, Homo sapiens
gtagagacggcgtttcaccattttgcccagaatggtctcaattcctgagctcaagcgatcctcccaccttggcctcccaaagttctaggattacaggcatcagacactgcacctggcctggatttctcaacatagttttaatggtagtttttaggtttcaatgtcttattcatgttgtttattcacaatacatttatgaatatatattttttctgaaatttttttaccttgtctcacttgttttaagtcttgaccactttaaaaaaatctttctttggatggattcagtataatag

SEQ ID NO: 393876 - DNA, 422 bp, Homo sapiens
atgatttgaaacgagttacaagtgctgagtctcagttttttccatcttcattggtgagctaatattacatactcagaaggtatgctaaggattaaatcatgcctagtttgatttaaagcacattgtggatgtcaagagaatttatcctgctttccttccatccatctaccctggctcttactgatagatatgaagaaagtccacatcacccttacacttgggctcttggtaggataagaaaaaatcatccacagtatgtagtgacttttttaggggaggtgtcaacacagaaaattgtagaactgctctgatactataaatatgtaagaacttcatttatgtgaaagccacttctcttccctactagtcactcacccagccttgctacttctaccatatacatatcattgctgcactttttt

SEQ ID NO: 393877 - DNA, 301 bp, Homo sapiens
gaaactgtaggtcactttgggtaatatggaccttttaaaaatattaattcttccagtctataaacatgggatatcttttcatttgtcatcaatgttttatagttttcagtgtagagatctttcactttattggttaaatgtagtcctaaatattttgattttttgatgctattataaataggattgttttcttatttctttttcagacactttgctgttagtgtgtagacataccactgatttttgtaagttgatttatgtatcctgtaactttactgaatttgtttttcagttctagtag

SEQ ID NO: 393878 - DNA, 226 bp, Homo sapiens
caagagctgcccttgttcctcccttgacactttcctaagtgtccctccttgtgctgttccctgtttgtttacactgactgaatattcttcagggaccttggttcccagtgtctcatcctctatctgattggaacagactagacatcacctctgtcccaaagcagagtattcctggcaatttctagctcactggcattctcatcaatctccttgtcaggggagaaga

SEQ ID NO: 393879 - DNA, 256 bp, Homo sapiens
tttacatggaaaagaataattgcaaggagagcaaaaagacactctgaaaaacactgagtggataaaataatgagtgggaaaaataaagcgaagagttatccttaaccactctaattaaaattaaaaataataaaataaacagaaagaaaaagagcattccagaaacaggtacaacagactgagatggaaaagtttatcacagtaaagaaagtgagataaagactgaaataaactatgatccatctgaagtataacg

SEQ ID NO: 393880 - DNA, 592 bp, Homo sapiens
tgattctcctgcctcagcctcccgagtagctgggattacagacgtctgctaccgtgcctggctaagttttgtatttttagtagagatgggatttcaccatcttggccaggctggtctcgaactcctgacctcgtgatccaccctcctcggcctcccaaagtgctgggattacaggcttgagccatcgtgtctggccctttgtgaacttttaatgaaaacagtcactgttttaaattccaacttttgtggaatttattggttgaactttgtgacaaactctcttgaaatttatccagagaaaaattactgagttgctagctcagttttatttattgtcagtatggttatattcttccctcagatttctgattgatactcttatttttcattaacttttcagtcacggaagataattacacagaaagaattgttactcatggatttttgcactcaattcacattatcctagccattttgtggttttcgtttccgttttgggggacacatttgtgaagtatttaaatgagatgacacattcgggaatactgaatccctaatagtggggtaccaagtggttgaagttggtaatgta

SEQ ID NO: 393881 - DNA, 187 bp, Homo sapiens
ggaggtggaggttgcagttagccgagattgcaccactgcactctagcctgagcaacagagagatactccgttcccgccgccgccacccccctccccccgccaaaaaaaagaaaggagggatggagggagggaaacttctttaccagtaaatgatggaagacaggaaaaacaaaagtccataacacat

SEQ ID NO: 393882 - DNA, 596 bp, Homo sapiens
tattaaattctttgcagtaatttttttaaaagctgcttcccgatgttgtgagggtcaattcagttaaaactgaataattcctaagtctacctaactggggaaacataaaccacagtgaatcatggtgtgctgtaagtaaaacccattgtttgtgggacttccactctttccctgggtttctgtatgaatccttacattaatcttagtaaaacttattttttaaaactaaacaaatctattcttccttcaccccaaaggatcatcttggagaagcttatatttagactttcgggaagagcttgacatttaaacaagtctcatacatttggcaaatataacaggtacttacaaaggtttttaggaacagcaaaggaagaattcatatcctacttgtggttctgtcactaactgtatgtctttggacaagttacttctgtgaacctcagctctcatccataaaatggtctgcaggatggatagttcacaatgagcgaattttgttgtaggcagagagaacacttacccagttatctagagcgtgagtgtatgtgaggagagatgggaagggaggctagagctaggttttgaaaggattt

SEQ ID NO: 393883 - DNA, 305 bp, Homo sapiens
ctcctgcctcagcctcctgagtagctgggattacaggcgcccaccaccaagtctggctaatttttgtgtttttagtagagatggggtttcaccttgttggccaggctggtctcgaactccttacctcaggtgatccacccacctcggcctcccaaagtgctaggattataggcttgagccaccgcacctggcccttcagagacctttggagccagaggtgacatatcgatctacatttaaccctctgggaaccaaggaatgaaggattagaggaaacggggccagaagtggagagaaggggagtg

SEQ ID NO: 393884 - DNA, 143 bp, Homo sapiens
cctcccaagtagctgggactacagtgcaagccaccacacctggctaatttttaaattttttgtagagatgggggtctcactatcttgcccaagcaccaaagcctgtatttttgaccccaacattgaatgaggatgggatctgg

SEQ ID NO: 393885 - DNA, 461 bp, Homo sapiens
ctggaggcatatgcagaggtgggactggggaccaggtctccaaagaccaagaatcagccgaggcactaaggggcagattgcagaggtgaacagtcccgccagtgagaacccggccctgttattccacggccttctctgccttctgcgagaaaacgaatttcccagaccccagcgcaggcctttctcacatctcagcagcagggaccgtggctccaactgcggctcaggatgaaggccccaggcgctgaagagagtgaagccgaacccctcctcaatcccaaaacactggggaccacggtgagacagcgacgccctggatgctgcctggtcaaggtcaggctgtgatcggcctgtcaggcgtgtggcagaaccagcttcagaggcagcggtgtccacgtaatgagctcaaatgatgccccaggaagaacatagatggcttctttctttaattcctcagcatg

SEQ ID NO: 393886 - DNA, 368 bp, Homo sapiens
tacaaatgatggatcaatgaccaccgtgggagagtgatgttcttagggaacatgtgagagagccagccaatgaaatgtataatgcaaaattaaggatgctggtccttgttcacctcattaaccatctaaactcttagtatgtgtgaggcatgttgtggtatgtgacagcatttaattcatccattcattaattccttttccattcagtgtttgtggtctgtccataggtgttgggaatatggggcaaataagacaaatagttccaggtctggtggcgcttacagcctgggaggagctacacaatgaaacaattacaagagcatttgatttgacgagcctgcagcctgggctgtggagttgaaggtggc

SEQ ID NO: 393887 - DNA, 411 bp, Homo sapiens
tttgagtcctccttcagccactgactcactagaggattaggcaagtcactcccactcactgacaatatctgccctgcctacgtctcagggcagtggagagggacacgtggaaaacgcgtaccaaaggcatactccacctggaaacaagcacaggcagattttcatcaacagaagcccttcacacccttctttcttcatcacccaaaacacagcgtaatttgccttagaggcataaccaatgggcatttcaggatgtccctgtcctaaatctccccagcaactcccgaaacggctctaacagaaacagtcttgccttctcttccctgctgtgtcagtatgtgaaggctgagaggatcacacaaggaagctgccacctccccagccacgtttgggaactacggtgctagaaca

SEQ ID NO: 393888 - DNA, 251 bp, Homo sapiens
caggcaccgttgaaggctgtcaacagtgactgaacaaggcaagaaatgtccgtgtcctcattgagtttatgttacagtgggtaagatagacaaataagtaaacaagtaagtaatatactaccacatctcttaagcaatgtgttggttaaatgaactcaccaactattccccaaacaagactgtatccttctgcctggctgttctttccacacagaggactacctgttccatcttcacatattaaaatccta

SEQ ID NO: 393889 - DNA, 244 bp, Homo sapiens
acaggcatgagccaccgcgcccggccgggaagttaatttttagtttttaaaagttctatggtatttattgaagtttatgtattatgactataacagcaaaaaatgcacattacatttctttaaaatgctagattgagtatcatttaaaaaaagagaagggatacttaatactatcatactaagggggaaagagattggaaagaagaggactcagtagaaaacaaagatgtgaagtaggaggaag

SEQ ID NO: 393890 - DNA, 638 bp, Homo sapiens
gagttcacgccgttctcctgcctcagcctccctagtagctgggactacaggcgcccgcctccatgcccggctaatttttttgtatttttagtagagacggggtttcaccgtgttagccaggataatattttgtttgaaatctaatcagcttgctaaagactggcatttgatagattgcctaataaatcttagaaacaatatctacatatgcatggaaggggctatataaggatatacatatgaaagaagatactagtctgcttcatcagataaaatatgataataatattggttaaataagtttgaatacattatgataatggtaattacataataattaacatttatttggaataatcagtatgctaattgcttcatatgcatcattacacttaatacctgtagcaaacctacaagatacttagtattctattcacagtttaataacagcatggcacagcttagagaagttaaactactggtacagagccttacttaaatgaaagaatggactgtggattcaatttcaagattgcttaatttcaatgttcatgttcttaactactacatgaggctggagaaataaggacaaaattcaaaactaagtaaaacagttttaaactaacaatcgtggaagg

SEQ ID NO: 393891 - DNA, 511 bp, Homo sapiens
ttggttgaataagggggtgctctgtggatctcaggggggctctgctccccatatgactggaaccctgtctccaagggctgcatcctatcgggttattgagggtgactgagaaggaccccctcacaagccagtcctcctaactctgcccctggatccccagagtttgccagggataggtgcctatccaccgacaacttactgcatgctccacagcctgtttaatcctaacaggtattagtatcccatctgacagataagaaaagtgagactcaggctaaacacagcggctgccacccaggaagcactcagtgagtgtcacatggctatttagaaacgcagttgtgtggccaggcatggtgatgcgtgcctgcaatcccagctactcaggaggctgaggcaggagaatcacttcaatctgagaggcagaggttgctgtgagccaagatcgcgccactgcattccaacctgggagacacagtgagactccatctcaaagaaaaaaaaaaaaaaa

SEQ ID NO: 393892 - DNA, 305 bp, Homo sapiens
ccaggtagacctaaccaggttaaggtcggcaaacgaatgatcctgtgtcaaatgcaccacgggagtgagggtttccactgcattcatgtgtgtgttccatgtcatgttttctttgactaaggccccactcaccaccacaattttccatcctcatgcaaacgggaagcagacacatggggatttggattgttaggtctacctggaggtagacctaacccaggtgtgagccactgcatccggccatgtactttagtttctaatttcttgggaaggatttgtaagaaggtgaattcatacaatggtta

SEQ ID NO: 393893 - DNA, 280 bp, Homo sapiens
cttcagctgattggaagtaaatgatgacaagaccctaggggataaaagattcacgaaagagaaggaacctgaatccctgaatcaccgtatggaagaaaactgccagccaaccagaaaaatctatcatggactgtcatagaataaagcctaaaattaaggctgaatattacgtgctgctttgacatctggtaaacttggagaacctcgaatgacctagttgcaagctttccttctcactctgctcctgtggataaggtgccatagccaagcaaccgtcctt

SEQ ID NO: 393894 - DNA, 425 bp, Homo sapiens
aaggtatcagtcccttcgcttctcgtttcctgcacccctgcagtgttgcatcctttgggaatgagtagatcaaagtaagagttatgtctactctctaccagcccaggtgctaacgttcacatacattctttcgtggaatccctgtgtgacctcagagatgaggttcagaacagttaagggcctgcccaagacctcagggaagctgggatatgaacgcaggtctttccagctcccagcccactctttccactctgttaggcagttttcaccctaccagcctgctgacacagcatgagacgcttcatccagcttcatcctatttccaacactgcttgaaatcctctccagggctcactctgcccataggttaaaaggacagcctttctgccaggcacagtggctcacgcctgtaatcctagcacttc

SEQ ID NO: 393895 - DNA, 594 bp, Homo sapiens
aaatctgaaaggtatcatcatatagtttaagggacaagagacccaaacgaagagatgtctttgctttcatttctggccactggtttgtgtaagaaatttaactgaaaagctatcttgaacttttttgaggatatggaatatcgctgtatcacatcacactggcctggaaacgaaagcaaattggatccatgtatggtaggtacccagtcataggttctggtgtcctgggaccactctagtggcagcaggcggctcccatgggagaatgagtcccggctatgggcctaagcattttccaactgtgcactgttggaagcttagaagcttagatcagcaaaagctgatttctcactcatacttcatgtctatcatgagttagcagggaggttctgttcatggtgtcacaggaaaagagagctgtggatggtcttgcattgacaatacatatatatcactttcagtcacaacacagtagagagaactagtcatatgattctgacagatcatagggacaaggaggcgcaatccgattaagtgcccagaatgggcgagaactggcaaagtgtactgacttaacacactatttaataaaat

SEQ ID NO: 393896 - DNA, 501 bp, Homo sapiens
agatttagcccttcatttttgcaaaacctctgcccatgtggtgataactgtcaataaactccttattctagaagcagatctaagaagtgaggtacaagccacaatttattgccctgtttagcccaataaacaaagaaccttgtcttctaaaaaaaaaaaaaaaaaaaaaaaaaaaaaaaaaaagagtcgtccagccacaagattccgaacctccccaattgctcctagggataacatcactattgcaaaacctaagattggtgcttaaggtgttttctaggccctgcattctcatgcaccaactggcactacccagaccagtaatctggctcaaccagttctccaatgccacctaggaacacaaggcagcaagaagaacccacttcaaacccctatgatttttatctccaaaccaaccaattagcactccccactccctggtcccctccctgccaaattatccttaaaaaccacagtctccaaattttcagggagactgat

SEQ ID NO: 393897 - DNA, 731 bp, Homo sapiens
agaacctgaaattaagggaatccgtgctctggacatgattccataggaatttagaaatatattctattatgtccaacaccaaatctaacacaaggaagccttcgggtcaatcagtctttctttcatgcagtcaatagcctttgttaaacaccttctaaaggctgggcattattctagaaacagagaaagagggaaagacaaaatgaacaaaagcacttgacaccatgaagctaagtatggagacgacagatcttaacaaatgagtacagatcattaatgaagtacctgcaaataggaaaatgcctcaaaggtaaaagaggcttggaaaccacaagccatcaataagttactcagcagattactacaagccactgtatctcaaaaaaaaaacaaaaaaaaaaaaagaaaaaaaaaaaaaaaaaaaaaaaaaaaaagaaaaaaaaaaagaaacaaaaaacaaaacaaaaaaaagcagaaaagagaaagaaagaaaaaagagaagcaacaaaacagagaagaaagaacgacagaaacaaacaaaaaacaggaaccagcaaaagaaagaagaaacagggggagggagctgacaaggctgcggaagagcggacgcggcgcggaggcgcgagagaagaaacgagacgcgaacgcgacgcggacgtcggtcggtcgcgagagcggccggggaaggaggcaaggagcgaagcgagacaagcacgcgagaaaaggaaaga

SEQ ID NO: 393898 - DNA, 336 bp, Homo sapiens
aggaatgaggggtgttaggtaggcaggtgacatgaacaagtctgcatgttagcaagacctttatcagtagggtatacggaatgaactggaagacagcagatgctaatgccagagcatgttaggagcctactgcaacagtgtgctaagacagcaggagagtatgaactatgggaaaagaagtagggacagatggaggtatttattaagcagaattgttaggccatgaaaattgattagttataaggggtgaggtaatggagggatcctgtttcagtattctgcatatggctagccagttttcccaacacccatttattaaatgggaatcttttcccc

SEQ ID NO: 393899 - DNA, 651 bp, Homo sapiens
ggggcgctagagcgctccgggaggctaggggagctgaattctgcgtcttcctttaggctgcggcgagacaatccccagagccccgcggcccggcctcggggcagccatggactcgcaggaattgaagactttgattaattactattgtcaagagagatatttccatcatgtattactggttgccagtgaaggaattaagaggtatggaagtgatccagtcttcaggttttatcatgcctatggcacattaatggaaggtaaaactcaagaagctcttcgagaatttgaggctattaaaaataaacaagatgtatcactttgttctctacttgcactgatatatgcccataaaatgagtcctaatccaggtatgatatttaaatgcaatgcttaggacattttttcctattcagtttatttttatttttctcagttaccaagtcattcagtctgatcacactatattatgtattttctgtaggtacaatttatacatatgtttatcttcctgacaagggtgtaaattcatcaggcacaagaaatgtgtcttatactattttcgtgttccttatatcctctggcagaggtttcattagtacatagggatttttttagataaaagggaatgtatattagtaattgttacacaaa

SEQ ID NO: 393900 - DNA, 1241 bp, Homo sapiens
ggggcgctagagcgctccgggaggctaggggagctgaattctgcgtcttcctttaggctgcggcgagacaatccccagagccccgcggcccggcctcggggcagccatggactcgcaggaattgaagactttgattaattactattgtcaagagagatatttccatcatgtattactggttgccagtgaaggaattaagaggtatggaagtgatccagtcttcaggttttatcatgcctatggcacattaatggaaggtaaaactcaagaagctcttcgagaatttgaggctattaaaaataaacaagatgtatcactttgttctctacttgcactgatatatgcccataaaatgagtcctaatccagatagagaagctattctggaatcagatgccagagtgaaggaacaacgtaaaggagctggagagaaagccttataccatgcaggcttatttttatggcacattggtcgccatgataaagcaagggaatatattgacagaatgatcaaaatatcagatggtagtaaacagggacacgttttgaaagcatggcttgatattacaagaggaaaagagccttacactaaaaaagcactgaagtattttgaagagggactccaagatgggaatgatacttttgctctgctgggtaaggcacaatgccttgagatgcgccagaattattcaggtgccctggagactgtgaaccagataatcgtgaattttccgagcttccttcctgcttttgttaagaaaatgaaattacaactagccttgcaggattgggaccagacagttgagacagcacaaaggttgctgctccaagatagccaaaatgtggaagcactgagaatgcaggcactctactatgtgtgtagagagggggatatagagaaggcttccaccaagctggaaaacttgggaaatgcattggatgccatggaaccacagaatgctcaacttttctataacattacactcgccttcagcagaacttgtggacgtagtcaacttattcttcaaaaaattcaaacgttacttgagagagcttttagtttaaaccctcagcaatcagaatttgctacagaacttggataccaaatgattttacaaggaagagttaaagaggcactgaagtggtataagaccgccatgacacttgatgagactagtgtgtctgccctagttggatttatccaatgtcagttgatagaagggcaattacaggatgcagatc

SEQ ID NO: 393901 - DNA, 322 bp, Homo sapiens
atagtcaagaatttcctcaaatgttaaatgtcaaaataccatgtgacccagcaattctacgcctaggtaaattcccaagggaactgaaagcattatgtccacacaaatatttgtacgtgaatgtttacagcagcgttattaataataatcaaaaagtgaaaacaatcctaatgtccatcaactgaatcataaaaattacagcttctgatcccaaatcaccatcaacacttaacaaaaataatctttctccttaaaaacaagaagcaagcctgggcgcagtggctcatgcctgtactcccagcactttgggaggccgcggcag

SEQ ID NO: 393902 - DNA, 275 bp, Homo sapiens
ctctggggaagaggggattaagggattaaagtattaaggggcagcgtcaggtcttcccacagaacctccctgcccccagctaggccccaaggacccaagaatcagccaaaagaatgtaaggagatctcatcctgtttgcaatcccctttgtaacttgctcctggggaaaacaagacacaatgctagctccttcccaggcccctgaggcatgatcactcgtgttccgtgttccggggagagcttaagaaatcacagtggccagaagcccagcccag

SEQ ID NO: 393903 - DNA, 536 bp, Homo sapiens
cttccggctgctgcctttcaatgggcccactggcgtctcccctgctgcacaaaccaactagggatttgaacaaaatttctgttcagaggttgagatttgctccttcttcagttcccctctttccagaattcttctcctaactttcttaacttttgctctgctctgcccaccccatttctgtccttgacatctcaagccactgaagatgcagctttctgccacccctaaccttctgaagaatgaggactgccttcaggcaaaaggtgcaaacttgtacatcttgaagttctcttcttttaggggaagacgaccctccagtttatgcttttggttactcttcaggccttcaactagctttttgtttgtttaactttttgttcattcacacttcatgattgttaacctggagggaattagtctgaaaaaggaaaaaaaaaatccactattactagaaactagaattttactatagttactttgaaactccaaatcagtggttctcaaacttaactgaacactggaatcacctagaaagc

SEQ ID NO: 393904 - DNA, 402 bp, Homo sapiens
atgatgtgcaaaattggatgactctcctatctcgtgcttagatatgactcgtggcagaaaatatgaaatttgacattctggattcttgatttgtgacctgatcagtctcttaaagtattattccattacatttgtctattttagggtatatttgttaatttctgaatctgcctgaacatccctagagcaggaagggagagtagggagtccagcacctgctgattaagaattgctgtggatggctggtgcgaagatagtgagttattgcgattgtttggttacagatcaaatgccttgttctactttattcccccttactactgcacttgactagtctaaaaattatttatttatttatttttagactagtcaagtgcagtagtaagggggaataaagtagaa

SEQ ID NO: 393905 - DNA, 142 bp, Homo sapiens
tcctcaaattaatatgcataggaattatctgagtctcttgttaaaatgcactttctgacttagtaggtctcgtgtgagtttgagattctgcatttttagtaatctcccagggattgtcaagaccgctggcctacagcacatg

SEQ ID NO: 393906 - DNA, 315 bp, Homo sapiens
actcccccaccctttcccctgccggactggggctcttggccggagcggaaaccttgaagttcctgagttgcatcttggctgcgtctgacctgagagtcagaacccagggcccccaggtacggacgaactcatcctggggccagtgtaggcccccgttcccagcaacacagtccaaatcctgctcatctgggccctcgcgtttccctgttcagaagcacagttcctacttttgcagatggaaaaactgaggcccagatggtgcttagcacagtggctggcatgtagtaggtgctcaataaatatttgttgttgaat

SEQ ID NO: 393907 - DNA, 320 bp, Homo sapiens
aactctatgggtattccttttctgcttcttttatggtgaacacaacatttatagacttctgctcttctatgggcaaatattactcaaattatcatctacctgagagagtgtaaaatgaacattttgtattctataccagttttaccctaggttcaatatacttcaacacataatagcttccattctcatctgtcagcatatggtgttgatcatacggtgcacagtaagacagacacaaggtttccaaatgccatgaagtattttagaggcccgaattttacaaaataaaaagtcacattagagccctgttgctaggcaag

SEQ ID NO: 393908 - DNA, 589 bp, Homo sapiens
gcttttatagttggctttctaaaacttgtttgctacaagcctagacttaaaaaatcatgaaacccttcccaaagtttgctgatttttacaaaatcagacctcttgcctgctaacatttccagaccctgtctgattctcatcacatctcttctcttctactggatctatgaaaccccattgagtcctaatcgtactataacctacctcccagtacgacacttaacattctctttatctctgagtgtgctcatttgccaaaggcaggaaagtctataaattccaccctgcaagagcccctagtaaagacttctctatgcaggtctgattcatagaaagattcattttggttgcttaggaaatcaaagctccactaacaattatggtatcaaaaaaaaattacaccagtgactctccttaattgaaaataagacttcttctactaaaaatacccacaaattaagttattggtgtcataggtccagtacagaaagtcatttttctcctttactattgtggaagctttaaaacatggccacaaactctgacataccttccattgagaggtgaggtctatgtcccctctaccttg

SEQ ID NO: 393909 - DNA, 746 bp, Homo sapiens
agagaagatagcatatggtgttctaaaagttaatatgactatagaacccattttcctatggaggaaatttatcaaggaacatgactttggacgtgccgctttatgagaaaatatattaagcctttttgcactaacttttctactaagttgggcttttgtgctagaatttaggagatgctgaagatgttagttttattactgtctgattcatatgtataaatattatttacattgagtaattaagctgtattctaacagagaccagtgaactttctgttttactttttgttaaaacagacttctgattacaattaccagaattctaaagtatatctgtgcattttgaaatacagatgttaagatgctttaattagctctttatataattaatctaatgcttcctaatgaagaatagagtgacatcagaaatctcagatgtagaacagtcaccaaatcagtaataatatatttgatcctaaaatatggccgggtgctgtggctcgtgtctgtaatcccagcactttgggaggctgaggcgggcagatttcctgatctcaggagttcaagaccagcctgggcaacatggtaaaacccatctctacaaaaaatacaaaaattagctggacgtggtggtgcacacctgtagtcccagctacttagggggctgaggtgggaggattgcttgagcccaggctgtagggagctgtgttcgcgtcactgcgctccagtctgggtgacagagtgag

SEQ ID NO: 393910 - DNA, 323 bp, Homo sapiens
ccgcccggagaagatagctgactttcctaaggttgcacagggaaaggatgaagaactgcatagttaggatcaacatctgattcctggtccaggcttctgcccacaccttccctcccttccccacatcctggctgcctgaggcacagggctggtccagggaagaattgggagataacttagtgagtaatatcagcaagggacccggccctcccttcagtgccatccccttggggttctggcctccgacatttactgaggttctggcctctgacatttactgagccaggtactgttccgagcccctcaccatgccatctcattgg

SEQ ID NO: 393911 - DNA, 442 bp, Homo sapiens
aactccagagcctgggcctgaacagggaggtggtctctcaggcttgatgctcaggcctatatctctccatttttgccctatctcttaaatatatgtaatgtcataaaatgcttttgaatctttttaaaaagtgtcaagctcatgaaagacagcctaagaaactattacagattggaggaaactaaggaaaaataaaactgaatgcagtgtgtatcctagatcagagaaagaacattagtggagaaagaacattagtgaaatgtgaataatttgagctaataatattgtaccagtagccggatatggtggtgggtgcctataatcccagctacttggaaggctgaggcaggagaagctcttgaaccggggagataaaggttacagtgagccgagacctcaccattgcactccagcctggacaacaagagcaaaactccgtctc

SEQ ID NO: 393912 - DNA, 884 bp, Homo sapiens
  misc_feature (548)..(548): n is a, c, g, or t
ctggctcctggggggctcccagcttaaagttcagatactgtattaggtccgagacttgccctagtatctgggcgttttacacaaactctggttagacacttaaatgcattatctcttttaatcctaacaataacctttttattatttctcttacagatcaggaaattgaaggccagaagggtaaagtggtttgcccaaggccatggggctggtgtgtggctgagttgtggcttgagctaagggcttgtaagagttgacagtcagtattccgagagggagatgtaggtggagacaggagatgaagctgaaagatgagagacagtcagccagagagaatggaaggaaagaacaggaaagcagagagaggagtgtctgccagtcccaggataccacggctatatcagctttctattactacctaacaaatgatcacaaactttgatactcaaagtcacacacatttatcattttttagtttctgtacgtcagaagtcaaggacctctctcaatgccattggttccttggaccgtatcactggtccatctcntgagcccctcaatcctatcacagtttactgacttttcccattcagctgtgagtgtccaaccctatcccagagaccttgatgcttggcctcccaatcttgccctaggatacccagatgccaaccagacacctccttcttcctagccaggctatctggcctgagacaacaaatgggtccctcagtctggcaatgggactctgagaactcctcattccctgactcttagccccagactcttcattcagtggcccacattttccttaggaaaaacatgagcatccccagccacaactgccagctctctgattccccaaatctgcatccttttcaaaacct

SEQ ID NO: 393913 - DNA, 282 bp, Homo sapiens
catgagatcaatgcacagggcagactctcgcctaccaattacaccagttaagcctcctgtgagcacagtaatgacaaggacaaatgcaattgttttggtaggcaataaacctcacgttccagaaccctaaatagctactaggtttatttgtcctaaaggcaggtccctgattttccaagtcagtgcttataactaaagcttagggttttttttgttggtttgtttttttgagatggagtctcactctgtcgcccaggctggagtgcagtggcacgatctcgg

SEQ ID NO: 393914 - DNA, 418 bp, Homo sapiens
acctttactcaggtaaaagaccaatcactcatcaattgccaaaacgccttgacagtttaaggtctcaatcctcagagtcagcaaagctgaagtgtctatgtccttttaaaaggagtctgcatctctactttagaaaccatcttctcactgcgcttggtggcttacgcctgtgatcccagcactttgggaggccgaggcaggcggatcacctgggtcgaaaccagcctgaccaaaatggcgaaaccccatctctactaaaaatacaaaaactagccgggcatggtggtgggtgcctgtaatcgcaactacctggaggctgaggcaggagaaccgctcgaacccgggaggtggaggttgcaatgagccgagattgcgctactgcactccagcctgggcgacagaacaagactctgtgtca

SEQ ID NO: 393915 - DNA, 328 bp, Homo sapiens
ctcttttgggttgtagattgctgttgtctctttgtattctcatgtggtggaaggaggctgagagagctgtgtccagtcttttttatgaggacactaatcccattcaagagtattccactctcatgacctaaattaccccctaaaggccctacctccttataccataacattgggggttaggattttaacatatgaattttgtgggagctgggagggtaaacattcattctgtagcaattccctcatagcacttaccacagagattatatttatttatttattggattatctgtttctttacccccactacactataaaccctatggtg

SEQ ID NO: 393916 - DNA, 299 bp, Homo sapiens
gtccctgcaagggtagggaaagcgtgtcatgggatggccctccactttctccctctttgcagctagctcctcaaggattctctttctgaagttaaccaggctcctctggagcagtggtcatagccctagggagagcccagggcctggcacacagtgcacagtaagcctttgctaggagttgttgatgagcaaaccagcttggtagccacaggaagatgctctaagagaagcagggtaaatgaaccctccccagcaaccaaacagagatgtgctgcaaaagacctgattactgaaaggtt

SEQ ID NO: 393917 - DNA, 204 bp, Homo sapiens
gtccttggacacatcagaatgctctaggcctaaattcttttttcttttcagtgaatatgttgtcctaggtaatccttagatctttttcagctctaatatcctgtgatttcacacttttagattgagaatgggcaaactttggaagactgtgtgcagtttatcttcataccactgacttcatttctgctgggagctaatatagag

SEQ ID NO: 393918 - DNA, 454 bp, Homo sapiens
tactaacaattcaattgcatggcagacccctctcttagcctagttacctggcaagttcttctcagtgaatacaatgtaagatttaacacaagccagaacttccttgctagagtctggatgctcgccctgacatatccacagtcctttctcaatcgtccacgtacagattatctgctgcaaatattttagtctcagggttgcttgccaagatgtttgagtccacaaccttctgacagcagctgttcgagggaatgcagatgaattttaatattagcctctgccaaatataattaggcgggtaaatctgctgccagtaaaaagagaaagatatcatatgtgcattccaggccaaatggtttcttgcagtatctgtatcaggctctccttagggaatgagggtcctagcgatcccacctctgtttgtaaacacagccacatactgtggtgggctgca

SEQ ID NO: 393919 - DNA, 766 bp, Homo sapiens
ggagtttaaggtgacacgtggagagcgcggcggacgtccttacctccagaggaagtggggattttgatagttcgggctgacctacgcgggttttggtatcaggatgatgctggcctcataaaatgagttagggagaagttcctccttttcagttgcttggaagagtttcagaagaaatggtaccaactcctctttgtacctctgatagaattcagctgtaaatctgtcaagtcctgggatttttttggtagcaagctggataaagaatcaagacccattggtgtgctgtattcaagagacccatctcatgtgcaaagacacacataggctcaaaataaaggaatggaggaaaatttaccaagaaaatggaaagcagaaaaaagcaggggttgcaattccagtttctgataaaatagactttaaaccaacaaagatcaaaaaaagataaggaagggcattacataatggtaaagggatcaattcaacatgaagagctaagtgtcctaaatatatattcatgcaatacaagagcaatcagatttataaaacaagttcttagagacctacaatgagacttagtctcccacacgatgataatggtagactttaacaccccactgtcaacattagatagatcattgagatggaaaattaacaaatatattcaggacttgaactcagctctggatcaagtggacctgatatatatctacagaactctccacctgaaaacaagagaatgtacattcttctcagcgccacatgg

SEQ ID NO: 393920 - DNA, 171 bp, Homo sapiens
ggagtttaaggtgacacgtggagagcgcggcggacgtccttacctccagaggaagtggggattttgatagttcgggctgacctacgcgggtaggacttcgagggcccaggagcgatttaaggattttagaatagttacccatactggctctgcaactcctcgatattcaag

SEQ ID NO: 393921 - DNA, 346 bp, Homo sapiens
ttttgaaatgggcacagaaatttctctcgcaaggagtctgacacctttttaagtctgattaaaaatcatttaccatctattctccctgaagcctgctacctggaggtttcatctgcatagtaagaaccttgggctccacaaccccttatattaacccagatactcctttctgtttattccagatctttagataataacttaactccttcaaccaattgacagtcaaaaagctctgaatctatgacccggaatcccttgcttcattgtcctacctttccaaactaaaccagtgtacaccttacatgtattgattgatgtctgcttataatttctgtgcccatttcaa

SEQ ID NO: 393922 - DNA, 559 bp, Homo sapiens
tctcttccctctcttttcttctttactcatttctttttaatttctgtttaatgcatataactatggacttccattaaagaagaaaagagcactttctgatagcaaaaggtgacagtatttttatatgcatcgagagtgaggttgttaacagcagtgtcactggaaatgctgccaatatttttcttgctggagtgtttctccaatatgagggtgagtaatcatagaattacattgaaaattctaatatttaaacaattaactggctagaaaagcaatttaagtttttcttcaacttccaaaatggcaatttagcactttggatacaaagctccaagctttactatttatgggatatgtctagttcatattcagtgcttccattgcaaattattgtgacttttaccaaatttggtattgaaatgggtatttatatggactcagacgtttgagagtatttcttttatttgcagttatggtgttcatgagcaaaaacaaataaaccaaatcatacaaaacattattattcacagtgattgaaaacaaaataatgatccagtaa

SEQ ID NO: 393923 - DNA, 461 bp, Homo sapiens
ctgaatatgtagctcactctcatatctcaggatcatcacttacggggtataacaactatgaaaagcctttatgtttgggcacatcttagtgactgatggagatcgaccttaatttagcccacaccggtctggtaggaccagaaccttcttcggggaccaaaaccagtggaattccatttctcatacagtttatgagttgtaaggaatctaattggtgaatagaggtaaaactacatgttttatttatttattttagaaatagggtcttactctgtcgcccatttcaaaaataaaaacaaaaataaaaagtggggcagggcacggtggctcacacctataatcctagcactttgggaggccgaggcaggagaatcacttgaacccgggaggcagaggttgtagtgagccgagatcgcaccattgcactccagcctgggcaacaagagtgaaactccaactga

SEQ ID NO: 393924 - DNA, 401 bp, Homo sapiens
tttctatctctatgtttttgtgtatattaaaatctatctaaatacaaggtttaaaagaggttaagtatcatttttcatttcttttgacccaataatcccacttttgggtgtcagtcctctagctcataaagacagatgagcaaggatgttaaatatagcactatttggactggaaaggaacataacttgaaaacagtctgacagctgtacttccattactaatggaattgttggataaattatagtgtgtccatacaatattatatagcaatcaaaaagaatggattgagttatatgctatattctggagggatgtccaagatgtatttttaggtgttgagtaatgcataaaatgtaatttcattttaataaaaagaagctatgaatattgcaaaaagctg

SEQ ID NO: 393925 - DNA, 406 bp, Homo sapiens
ctgtcctcctttccataaaaatctttttcagactttcttcacattacacttccagctgtatacacttattatctcacaaatagaaaatggtgaaggatccaaaaatcaaccacaattggccttggaggaaacctatatttaatgttctaggaaatcctgtgaaagtcaaaaggatctctccagtttccccatcacaattatctgcttaattcctctccattctactcttgaaatatggtttatctcttagactaatataaagcagagttacattaaatctcccttggagcagttagggcagttaagcatttaggtttcaaaggaatgcagccagtaagcaaaattaacatcaaaagagaaagccagatgtcaaaatactgagtaaaatggtgctgtcaataatgaa

SEQ ID NO: 393926 - DNA, 354 bp, Homo sapiens
tggagggagcctcttgagtccccagactcagtctgggcactgtctgcagctaacaatgtcaaaaggaggcatggggccagtgtggtggctcacgcctgtaatcccagcactttgggaggccgaggcgggtggatcacaaggtcaggagttcaagaccagcctggccaacatggtaaaaccccatctctactaaaaatacaaaaattagccgggtgtggtggtgcacacctgtaatcctagctactcaggaggcttaggcaggagaatcacttgaaccttggaggcgaaggttgcagtgagccgagattgtgccactgcactccagcctgggtgacagagcaagactctgtctca

SEQ ID NO: 393927 - DNA, 575 bp, Homo sapiens
atgagcaaaaattttagagacctccatcctggaaaacagtgttctggagaacagtgtgagtcttgtggcttgtgggagtacttttttatttacatgatttcaaattattgcattagctgctaaaaaaataaactagggcttctcaagttggatgagcatcaggatcacctgcagaagtctgttaaaatttgacggtctttgcacagccctagatctgctaaatcaattccagtatctccatgaaacccagcatccatgcaaacatgataagaagtgacttaaacccttagcagttaataagctagctactaattattgtctttacaaatttaacaaatataggtaggagtatttaggaagatttccagaacagaggaaagagatacagatagaaatgtagaaagaaaaggttatatttctagtagcatttttctagaacaatctctggcctttgtatttatctttatatataactttagactctgtactgtaaaaaattaacaccttatttcttttttgcccctatgctatggattttcaaatattggagaattagaaaatgctatgaattatcg

SEQ ID NO: 393928 - DNA, 386 bp, Homo sapiens
cagatggtagcaaacgctctcacctggcttggcaacacttcttcacctcttctttctaccaccacagcgactgtctccctccagcccatcctactgccaaattcatcttctattaagcatagcttcaatcacatcatttctttatcaaaacacttctacagaggagttccaaatgctttagccgggccgtccagggcctccacaggatgaccccagcccatctagttttctaccactctttatgtgtttcctaagtaccattcattattttaggacttggtatttgctgatgaatttacttacttacttgagagtgtggcaaaagcacatcctaaactttcagttaaaaggagtttgattgacctgctctgagtttaaggcacgtg

SEQ ID NO: 393929 - DNA, 571 bp, Homo sapiens
gaaatagacccatttgtagatagggctatcaatctgcagatgagcttcctccctgtccaaatttggaaaaacattcagggccatcaagatattagtattattgactctggcttcagaagatcaaaaactctctgaccaagaaggaaataattctgccccttcatctgctttgctaaacgaacaaagacaagcacttacaattcaatgccccacaaaggccttctgtgcatttattcctgcaaccaacatttattgagcatttaccctgcacaatgaagtctcattgttctttttttactgtacctatctagaaagaatctatcttcaaacttgtctcagaactaaaaacagcagacagttcaagtgtttctatttagctctaaggttttctatattttgggttagagacaagcagaccattcaccaaaagccttgcccatttaaaaatatgaccaatgactgtacatgggttccaacatgcaacacacaaatggaagttttaatgggcatctgtgagattgctggagataagaaaaggatacaggccaggcatgggggctcacacctgtaa

SEQ ID NO: 393930 - DNA, 629 bp, Homo sapiens
gtcaaattgtaatccccaatgctggaagaggggccttgtgggaggtgattagatcatgggggcagatttcttccttgctgttctcgtgatagtgagtgagttctcatgagatctggttgtttagaagtgtgtagctcttcccccttctgtctctctttctcctgctctggccaggtgcctgcttcctgttcaccttccaccatgattgtatgtttcctgaagcttccctagccatgcttcctgtactgcctgcagaaccatgagccaataaaataaaactttttttctttatatattacccagtctcaggtagctctttataacaatgtgaaaatggattaatacaggagtcagtagcaatagtctaaagaaatagttttaaaatagccaagagtgtactttactattcctatggaaagataagacagcaaaatatttgaaagactggagaacaggacattttagatactaaaacatgttataaagcgaaaatatttaaattactatggtactagcatgtaaatagcccaatgaaacacaatagaaatttcagtaaaagttgaaattgtgccatttaaatcaataagggaaaagatcaaatatgcagtgaatcatgttgagatgacagg

SEQ ID NO: 393931 - DNA, 490 bp, Homo sapiens
gatgctctttggttctccagttgtctttcaggaggtgtagcctggttgtggcctggggagtttggctgttctgtgtggtgtgcctccacggtgtggtctccagtgagctgctcagcaggtgtagacccgggcagggcgaagctctctgggctgttgactgtgaggcccctccccaccggtagatttccaagcctcttcagttttgcattcagccacagcagaatccgaatgaatactgagtgctaaagggagatttttaggttgaatgaaaaggatattgaatagaaacttggacttataagagtttcagaaatggagcctgccaggatgaattcttccagcttcattcttcatatgccttctctgcctcaagaaccagtgtcctgctggtcccagtccatccctgctgtcatcccaactcttccattaattggcagaggcagaatggggccctgaggtggtttaaataaaccatttgttcatttatcag

SEQ ID NO: 393932 - DNA, 431 bp, Homo sapiens
aggcagtgcaccgtgcctgcctgctggccgactcctagagtatccccaacgttatataagagcatataggccgctgtaaggaacttaaatttaattctaagaataatgggacatattccagggttttccacagaggagacacctgatttaatttacaatttgaaataggtaacactggttactgtgtgaagaatggactgtagagagtaaaagtgaaggagaaacagctaattatgaggctactgcagaaaaatttaagaatgtgccaggcagggtggctcagcctataatcccagcactttgggaggccgaggcgggtggatcacctgaggtcaggagtttgagaccagcctgaccaacatggtgaaaccttatctctactaaaaatacaaaattagcctgggtggtggcgcacgcgtgtaatcccagcc

SEQ ID NO: 393933 - DNA, 891 bp, Homo sapiens
gagaatgttagatattgataagacactgatggtgtaaagttatgagccaaatctatgtaaaaatgtaccagttaacaaaacctgtggctattatgaaaaacttacttgaataagactttctgcttttgtgttaatgtgtccagaacccacctgtagaagttctttgtgtatgcagtcttttcaccctacagtgctttcattctgatacacttaatcagagatagtagttttctgggttaaatctagtcgcttatcctcctggatatagcagaaagatagtgggatatataggtgtgttgtataacttttctcttttacaccttttcctttttttaataagaaaactgggattgaaatagaataagttgaagttaatggtaaaaattccaaacctggctgggcaccgtgactcatgcctgtacccagcacatgaggccaggagttgaagaccagcctgggcaagatgatgagacccccgtctctacaaaaaaaaaaaaaaggcaaataaattaaccaggcatggtggtgtgtgcctatagtcctagctacttgtgatgctgaggcagaaggatcccttgagcccaggagtttgaggctgcagtgagctgtaatcgcatcactgcactccagcctggatgagaccccgtctttaaaaaataaattaaaaaaaaaaaaaataaatcccaagccttttgctttcagcttccatcttaaaaaaaaaaactgttatgactaaaattaactaaaaaatgatttgggctccaaacccacttttaattttaaatactcttgattataagcccttaaaagctgtagtggttgaacctggtagttccagcagtccaaatacaagtacacagggttgtagagaactgataggctactaagctt

SEQ ID NO: 393934 - DNA, 287 bp, Homo sapiens
ggagctacatgaccaaagcaaaagtgaggcaggaaagtatttcaagcatttaggaataacctgctatttcacgagtccatgggaaatttcaaaagcacttcacaaagagctgttttcagtggagtctgttagtctggtgaatactggcatgctattattgacagcacccagaaaagcgtcttagaaacttaaacaagaatgtccaagggaaatatagataacagaagaccacattttaaagtaaaacttaagtgatgatgctgatattaaaccctaaaaatgagggt

SEQ ID NO: 393935 - DNA, 413 bp, Homo sapiens
cttgctgcttctgctccccacggattccctgtgggcaatgtttcctgacacactccacgcctgtgtcctggcctgccctgctccctgcctaggtctaaggcccagagtcctgctgattagcgcgaggctctaagcagccacccaggtggggtttgctgaccacctactgcgcgctctgtacttcctgccccactctgacccctcccccaactgtgggttataccaactctgactgcaggctgaaccccaaatcccagtttcaggttgtgccctaccctggggccaggcatctcagccagccttgctcttgctttggggagaaactggatgaggagaagaggtcctgtccctctagagaagcccccatcactgagggcgtgctgtgctcacaagaatctctatcacaaagacct

SEQ ID NO: 393936 - DNA, 172 bp, Homo sapiens
tctagagatcccgactaccacctgacgtacccacccccctgtgctaaagaataccacctgtatcagtttcacagtttcctaacactccaattgctaaaaatcatgcaccacagttggcaccatatctgggccctgaccatgttttacagccagctctctgtatccacaggtt

SEQ ID NO: 393937 - DNA, 296 bp, Homo sapiens
cagagcacactgtcatccagttgaattccagccgtccagcacatcccctgttgtcttctaaatacgccatatccctgctgattaagagtgttgccttcatttgtaacctctgaatggatttttgactttgcagctcactgacatcataccttttctacaaggcctcccttcttggttatgctcatagtacaggttgagcaatcctttcttttaactctggtgcttcctatgtctgatacatgttttcttacttaattgcataatgctttatagtcatttaacttctttagttcttg

SEQ ID NO: 393938 - DNA, 424 bp, Homo sapiens
atctctccattccccacacacctctagcctctggcaaccaccattctactgtctctttcagttccattgtttcagattccacattaagtgagattatgtgacatttctgtgcttagctttctgcgtttggcttatttcacttggcataatattctccaattccatccatgttgttgcaaatgacaaaatttcttttgtttttccactgtgtatatataccacattttctttatcaaatcagacccttcgggtgattccgtatcttggctattgtgaacaatgctgcaataaatatgagggtgcagaaatttcttcaataaactgatttcacatctttggggtaaatatctagaagtgagatgactggatctgaatactgtttttaaagtataccttttcccttaatacacactaatttgtttag

SEQ ID NO: 393939 - DNA, 1718 bp, Homo sapiens
  misc_feature (1)..(1): n is a, c, g, or t
  misc_feature (938)..(938): n is a, c, g, or t
ncaaaagatcgcagtggactgtgtgattgacctgacaagagctgagggagaaaatagacctattgccactcttgacttaactttagaacctgtcactccttcccagagggagccaaccagtcttcagacatgtgccagcctctctggcaaagcggtgatggaagggcaggtggacagaagctctcagcctacagcacggagactcattaacagtgatcctgtagatttggacctagtggaagaaaacacctttgtaggtcccccacccgctacatccatcagtggaggctctgtttatccaacagagcctaattgtagctcagccacattcacaggtaacctcagcttcttggcaagtctacagctgtcttcagatgttagctccctctccccaacaagcaataatagtagcagcagcagcagcaatcaaaaagtacccttgccatgcccacagcaagatgtgtctcgcccaccacaagccttgccttgcccactgagagcctcaccttgtccaccacgagccttgtcatgcccatcacaaaccatgcagtgcaaactaccagctctaactcacccacctcaagaagtgccatgccctcggcagaatatcccaagcccacctcaagactcgttatggcatcctcaacactcaccaagcccacctcaagactctctgggcctacctcaagatgtgccaggcccgcctcaaagcatattacatccacaagatgtggcatacctgcaagacatgccacagtcaccaggagatgtgccacggtcaccaggaaccatgccaccatcaccagatgtgccacagtcaacaggagacatgctagggtcaccaggagatgtgccacagtcaccaagttatgtttcaccgtcaccagatgcaccacagtcaccagggggcatgccacacttaccgggagatgtgttanattcacctggagacatgccacactcatcaggggacgtgacacactcacctagagacatccctcacttaccaggagacaggcctgactttacccagaatgatgtacagaaccgtgacatgcctatggatatctcagctgcgtcccctccaagctgctctcccagcccacagtctgaaactcccttagagaaagttccttggctctctgtcatggaaaccccagccagaaaagaaatatcactgtcagagcctgccaaacctgggtctgcccacgtacaatcacgaacaccacaaggtgggttgtacaacagaccatgcctgcatagactgaagtacttcttacgacctccggttcatcatctgttctttcagacgctaataccggataaagacacgagagaacaagggtcaaaaattagaacccatccctcatcgaagactaagaatggtaacaaataccattgaagagaattttcccctggggactgtgcagtttttgatggactttgtgtcaccccagcattacccaccaagagaaatcgtggctcacatcatccagaaaatcttgctcagtggctctgagactgtggatgtcctaaaggaggcctacatgcttctcatgaaaattcaacggctacatccagccaatgccaagacagtggagtgggactggaaactgctcacctatgtcatggaggaagaggtaacaacaattataagattatatcttctgtaggggaagttttaactataaagaaaagtgataccaggtgccatggcg

SEQ ID NO: 393940 - DNA, 279 bp, Homo sapiens
tgagagaagatggtgacatcctggaatagaaccaaagttagaggtcagaggagaaagggaatagggacataaatagtccctgaagtgagaaggcaacaggggagattggaaatgcagcagggtctaagaggtcccagagggtggctgaggatctacttctgaaagccctgcttgtcccccaggttgccccttttttgctggtcctggtgcttgtcaccagaaagaggcagattcctgaagggagccagctgggtcctcagcaaactgaatagcatggga

SEQ ID NO: 393941 - DNA, 265 bp, Homo sapiens
aggaagtgttgaattgaggtgggtgcagtgtggttaataagcacccaattctggctgtgctacttcctggctgagtggcctgccctctctgagcctcagtttccttatctgcaaagtgggtaataaatgacctatccctgagaggagatcatgggagaaaagagcataaatgttcacatctgatgacgtggatccgaagcccagctccaacacttatgagcaggtgtccctgagaacctcacctgcatttattgtgcctcagttt

SEQ ID NO: 393942 - DNA, 462 bp, Homo sapiens
agggattaatgccaaattgcatttctgccaaaaaggtatctattttcacaaatccattcagttttgcaaattaagagctttgggttttctgtgtattgattttgtcgggaggggaaaaaaaacccctctacaaacatcaaaggagaaaaaaacttcctgtagaaatcctttgggttaacagccaagttttaaatatacagcttgattctttgcttgtctggcagggaagggctcacctccatgtgcattttagccacctcccaataaacctgttgactgaaaagtactcactggaaaaaaccactctactaaagcctgctatttttctaatgggccttaaacccaagattcactgacagcaggcaattacatataagctctcattaagagaggaaaatatgatcacttttatactctcaaaataacaagtcaaaaaaaaaataaaatatttttgtctaaagt

SEQ ID NO: 393943 - DNA, 130 bp, Homo sapiens
accaaatggggttttgatctcctgcttctcaggaggtccggtgcccatttgcctactgcctccctccagaaacctggtggtttagtggttgacaactgacaaccacagactgcctctgggctgcagacat

SEQ ID NO: 393944 - DNA, 376 bp, Homo sapiens
tacgctggagtctctgagcttactctggcttgggaggctgcttgattcgtgaattttctttgctcaattaaacactttaaataaatttggctgaagtctttcttttaacagactataccaggagcaacaatgacatggaatcacagctcggtatgtgcatttattttaaaggaaaaggagtagtattgtcctaaagaacggattcttgtgcattttggtctcctggcctctttacactcttaggacttgttgaagactccaaaagagttttcattgtacataggttgtaagtcttgatgtttaccatattggaaattaagactcagaactattttaagcgcttatttactgtttcatttgaagacaacaatgatta

SEQ ID NO: 393945 - DNA, 269 bp, Homo sapiens
ccctttggttgagaagcccaaggccttagtgcatacatgaaaccagagcaaataaaataagggacaaggaggtgccataacctcattgcccggagggcctgggggccccagtactcctcggactaatttattgatcaaactgggacacttctgagagtaaaagggggcactcttaataattcagccaggacaacaagcataaactggactggcccaggcaacctgggatatatgaacccccagccaggtgccttcctggttctgggcca

SEQ ID NO: 393946 - DNA, 479 bp, Homo sapiens
gtattttcacagatgtctcatcttccttattaaattgtaaattctttgagggagagaatggtggctggttcatttttgcatccctagtgtcacattacagattttctttttctttcttttttttaaaatttaacttttaagtttgggggtacatatgcaggatgtgcatgtttgttacataggtaaacatgtgtcatgggggttggttgtacagattatttcatcacccaggtattaagcctggaacgtactagttatagttcctccttctctccctcccaccctccaccctccaataggccccagtgtatactgctaccctctgtgtaagtctgtgtgttctcatcatttagctcccacctagaattcgtggtatttggttttctgttcctgcattagtttgctaaggataatggcccccagctctattcatgtccctgcaaaggacttgatctcattctttttgtggctgcatagta

SEQ ID NO: 393947 - DNA, 297 bp, Homo sapiens
atttgttacatcgctcaggttaaaaatgtgtccacgcgctattgttgaaagagcacgcaggttaggaagtcttcagagcagggtcttgggagcaacccccaccgtcatgacggtcagaagtctccggactctgccaagtgtgttgcgggtggctggaacaagactgctcccaggtgagagcctctgcttcagagcaagacagatccaggtttaaaccccagcacgcaacaggaagaacctcaccagagggctgcaggatgtggcctcatccacccagagttacccagagctccccca

SEQ ID NO: 393948 - DNA, 157 bp, Homo sapiens
ggggagtacgtcaatgctgttaccccccagaagctgaaaaatgaagcaaagagtcaatggttgtttgagaaccttttattaattcaagttgtgggggtctgtgaccgtttttttttcttcatagtaaaatttttcaaatttggcaggaggggacatt

SEQ ID NO: 393949 - DNA, 466 bp, Homo sapiens
ctgtaatcccagctactggggaggctgaggcaggaggattgctcgaacctgggaggtagaggttgcagggagccaagatcgcaccactgcactccagcctgggcaacaaagcaagactccatctcaaaacaaaacaaaacaaaacaaaaagaaatgcattcaattatgtctcaataaactcaccttaaagttgaaaaattgtaagttgagccatcataagtcagggactcaacacggtatgttattattaactacagtcactatgctgaccatctccagaacttattcctcctaactgacatccatacctacacacactacattttccttatccattcatctgtcaatggtcagtttgattgcatactttggccactgtaaatgagtatcaacatgagagtgcaggtatcaactcaacatactgatttaatttccttttgacatatacccagaagtaggattattg

SEQ ID NO: 393950 - DNA, 523 bp, Homo sapiens
agggaatgaattggtaaagagctgttctacaggatgccagtcttttaaggagctgaggaaagcccacagaacaccaaattattacagggtcaggactgtgtcatttatctatttgcaggcacaagagtaattattttctcagcattaggcataagcttttcagaagaatactgccaggatgaaaaaatgcatgaaacagatatatgtgttgaaaactcagtgacaagatttgtgtaaaattcattgcttctgggtttctggtatgaacctaggggaatattggaaaataaccagtagattccttagcttacttatttcagattaccttttaagccttaaagattctgatttctttgtgaatgagacttcccaattgtaataacttcaaaaaaataaacataactttatattttgtaaatatccaaataaatgctcttatttgaaaaaagttttcacaagaaaaaatcttaaagtagaaaaattactcataacccatcacccaataaaattactttcggtttta

SEQ ID NO: 393951 - DNA, 401 bp, Homo sapiens
tcttgaaataccagaagcagcagtagtagcccaccttcctgtttgataacaattggcagggctccaggctggctgcatctgttgggacaggtattctctggtctccacagcctttgctcctacggccagctaacaccctcctctacctgccctctggtcttctgtccctgctgcctgcttctcttccatctagtccatccaagtgttttttggggaagtcacctggtaccttgttagggttaatttgtcttttaaattgggctcccaagggtatctgctagctaccctggctcacaaggctattttgaggctgaggatgtaacaactgtgaaaacagtttggaaactagtgctaagcaattgtttgtcaggaagcagggacttgtgggaactcaaactgtg

SEQ ID NO: 393952 - DNA, 374 bp, Homo sapiens
acgagcgtggagtctgtgtgcctgagtggaacgttgccatctcctctttgccctttgtatgccaggcttgcagatgcatctgcctccgtgggaggctttccattcatcctactcagcattacaggagcctgcgagatctgaaagcgcatctttatgtttttctttgttttcttccctcttattttactttgtggctgttttctctctccggaatcttattagatagagtgtgcctcctcgatggagggtctgtctcctaacttttctctcatgttaatctttttgtcttttgctcccattgggagatggccttgactttttatttcagctttcgattttttttttttttttttgagatggagtctcactctgcc

SEQ ID NO: 393953 - DNA, 260 bp, Homo sapiens
gactcaagtattctgaaaagctgcttttctgcaaagtatatgatcccctaaaacagcctcccagacattctaacccaagacaaaggacatcagggtgtggatctgcactggccctggggagcagggctagtagagactgcaggcattatatcccgccagtccccattctgaggcagggagcacggttccaagctgcccctgccccaggatgtcccatggccagatacgccttttctcagcaggctgcagtatgcttgcag

SEQ ID NO: 393954 - DNA, 499 bp, Homo sapiens
catgttggccaggatggtctcgatctcttgacctcatgatttgcccgcctcagtctcccaaagtgctgggattacaggcatgagccaccgcacctggccccaactatctatttcataaaaactttagacaaactgaagaggtttgtaggttaatatctggttttgtatatattacagagactttaatgttctttgaggccccaatatgtctgtacaattgtgattgtgtttctcctttgctttctgaattgtgaaagttttgcatgtttggggattgaagtaactgtctgcatgagatgtgttccatctctagctgcatgcacacttcatgtgaatttcagaggctcttatctttggaaggcatatttcttgaaatcagttttatgagaatctctatagtgaagatctaatcactttttacattgggcagaattacccatgtagaaaatgttacttgaaagtcaaaattttctcttttcatgagacagctattctgcaa

SEQ ID NO: 393955 - DNA, 600 bp, Homo sapiens
gtcttatactccaaccaaaacacttgtttcctctcaatcaaatcttatctttaggttaatctctcagggaccatccataaatagcagaggcagaatgttatccaatatccatcaggattcacccaaatgtgaaaaagatgaatataacatatattgtcttctgccatcaaggtcatcactgccaaaagctttcctggacaactatgttctgggccccatttctctcactcgtttgttgcaatacaatggttttgagagctactaatttccattaaatgacacatggtaacttccagtccaaatagagaatatttttggaattgcaggctatttaaggcaaatcttattaatctaaatgaagtagagtttacatattgactattaattttccatttttcatttacttctccatatagctttacagcccatgaagaggagtcttaaaatcaacatacctaatttctttctctacttcaagaaagatatgagctacaaatagaaaactttactgagaggaggtagacagttcagcctacttggattatccttagaggagctattacattatttacttctaccatagggtatgaacagagaaag

SEQ ID NO: 393956 - DNA, 179 bp, Homo sapiens
ccacctcagcctaagtagttggaattacaggcatgtgccacagtactcgactgaaatacacacaaactcctgttaagctatcccttcttccttatgcagtttttcttccgtaaaaatatgctaattgagaagtttataaactaaagaataaaagttctgttatccttttcttcccaaat

SEQ ID NO: 393957 - DNA, 300 bp, Homo sapiens
tcagagaaggggctgcagctgctactgtgttctctgggctccttgcattcagagcccggagctaccaagtgggagtcagaccacctgagccctcatgtcgtgaggatgccctagggactgtattagtcatctgtaactgtgtaacaaatgaccacagatttcatggtttaaaaccacacacgtactgtgtcacagtctctatgggccaggattctgaacggggcttagctgggtcttctgtctcctctcaagctggggtttcatctgaaggctcagctggggaaagatctgcttccaagc

SEQ ID NO: 393958 - DNA, 242 bp, Homo sapiens
aatatataattcagttatgttgctggaatcgatttgtgtttattttagatacatcaatcttctgaagctagttggtacatttgaagtatcaagcattcttgtgaaacccttagaatattagttagaagacatcctaaaaagcaattaatttgattttttccttacagttgtacaaacaaaggctatgaaagcttaagtggctttcctaaagttacagctgagattaaaaattattttttttt

SEQ ID NO: 393959 - DNA, 446 bp, Homo sapiens
tatttccacagggaaacattaaggaaaaaataatataaatcctggccaggtgcggtggctcaggcctataatcccagcactttgggaggctgaagtggggggggatcgcttgagcctaggagcttgagaccagcctgggcaacatgttgaaatcccatctctaaaaaaaataaaaaattagccaggcttggtggtgtgcacctgcagtcccagctacttgggaggctggggcaggggaatcgcttgcacccgggctgcagtgagccatgttagtgccactgtactccagcctgggtgacagagatgaaccctgtctcatagtcatcatcattatcatcatcatcaccatcctacatgaactatttcaggaaatataagaggaagaaatacctctcaaccaactttatgaggtaagtattatcctgatagcaaaaacagacaagagc

SEQ ID NO: 393960 - DNA, 626 bp, Homo sapiens
atggcagaaggtgacgggggagccagcacttcacatggctggaagcaggaagaagagtgagaagtggggaggtgctatacacttttaacaaccagactcacaataactcactcactatcgcaagaacagcaccaaggagatggtgctaaaccatttaagagaaaccgctagatgatccaattgcctcccaacacgccccacctccaacagtgggacttatagtttgacttgagatttgggtggggacacagatccaaatgatatcagtgtgttaaaaggaaaaggagataacagtgggaaatggatatttaacttcaatttgtgagtttttattttagagttctaaaattatgtcttatactacctatacaagtgctggaatattttctgtattaagtggtagatatataatatccgaatatcatacttaccttctttgaccttgcagtttaagagggcattttaagaaagtaaacaaacacattgatttttttttaaaggagaaatttttcagtaaacgatataggtacgttaacatgggcgatataggaaagttactgatggagagacaatcctacatagaaacctaaggaagcaattaactcagacacagagattgagaagag

SEQ ID NO: 393961 - DNA, 215 bp, Homo sapiens
ttggggaataaactattctataagttcggttcttttcttactccctcctctctactggaatcaacaaggaatgcaaaagctcaagtgctctgggtaaggctctccttcctccgggcttctacattatcattggcaggagcaaaggaaaggccgcagaactctgcatctcttggcatgttccttagccttccctcttcccctacacttcactacta

SEQ ID NO: 393962 - DNA, 359 bp, Homo sapiens
cctggaattgtctgaattaggtttgatatttctaggtttcatctgtctatactttggagtacttcattcctttaacttggagatgattttcaaaaatggcagtatccactgaagaaaaagccagtgacttaaaagtttctgggcaaccttatttatggttgtcgtaatcatggaaaatctccaaactccagtatttgtagtttttttttcatctgttactatgagagcaacctaggagccctttagaaaggcatcaaagtgctgggattacaggcgtgagccaccgcgccggccgtgttacagttcttaaaggtggcgtgtccggagtttgttccttctgacgttaggatgtgtgcgcg

SEQ ID NO: 393963 - DNA, 229 bp, Homo sapiens
tccagtaccatccccacattgtgcaaaaatgtggcgttaatgacctgttcagcaggtgttacttctctcctttcctaggatggcctgctttcttcctttgtgaaactttggctcaaaaaacatgccactttaggatgtgagggatggtaaaataactatagtcatttcctgcaacaagcttgtaaatgaaaactattaggaatattcaaaaataaatgtattgctatgc

SEQ ID NO: 393964 - DNA, 362 bp, Homo sapiens
ccgggggcgatggctcacgccggtaatccggccgaggcgggcggatcatgaggtcaggagatcgataccatcctggctaacatggtgaaaacccgtctctactaaaaaacacaaaaattagctgggcgtggtggcgggcgcctgtagtcccagctactctggaggctgaggtgggagaatggcgtgaacccgggaggcggagcttgcagtgagccgagatcgtgccactgcactaaagaaaaaggaaaggaaaaaagacttggtcgcagtcagtctgggattcgttgcaggaagcaaccaatcagaggctgaagtgaagttacaatgttacactcctgtgcaaacgtctgattggttgcaga

SEQ ID NO: 393965 - DNA, 428 bp, Homo sapiens
acttgatgtgtaagcagcttggggcggtgccctgcctactttacctgtgtgttctttcccccacctgggatcagagccaggcctagagggtgtgtggaggaagagcaggatgaacgggtcaaccgcaagacccagaccaggtgtgaacctagctctgtacctaccagccttgggtaagtcttgggacccgctccgagggtcctcaacagggctaagaacacaggtttgttgaaaggattaaatgacagaatggcaggcattccactcactatctgctacacaaatactcaatgtgtggtagacaatgacggtgatttgctaagccttctgaaggcagtcaccatgtgatccttcatgttcctccccacccaagttcccagtgtggcgccaggagcacagcaggtccgagactggctgtgatgacattc

SEQ ID NO: 393966 - DNA, 457 bp, Homo sapiens
gggggatgggggagctggataatggaaaaatcttttggctggaaaataagagactggaaatgcaggggatagcctagcaatttttggcattataaaaagccatttcacctctctggacctttgctgcttatttgtaaattgaaggtataagttattctgatatgctgttagtacaaaataatagcttacctccttgggtctccattgctaatgcagggaaatactctgatatctattcaaagctacagtttttatttctggccattgaaactaagagtgaccagttattttccttttccttctatttcttccaaatacatcctgaatcccttgtctcttttgttatgactctactccaagtcatcatcttgtcttgcctggacaatggcattagcttcatgttagtcaacatggctttcattcttaccatacaaaattacattctgtcacagccagc

SEQ ID NO: 393967 - DNA, 222 bp, Homo sapiens
agaagaaggaaggccagactgaggcatgacagtgtgagtcttcaaattttgtacttttatttcgatttcaaaggtctgccactatttttcatttctcaggcttggtcaggctttcatcccttccctgtttgtttgttttcctttctttctttctttctctccttccttccttccttccttccttccttccttccttccttccttccttctttctctttcttt

SEQ ID NO: 393968 - DNA, 208 bp, Homo sapiens
aaaattgtacttcctaacatggaaagattcttacagtatgctactcagtgaaaaagcaggttaaagtaatatgtaataactatattaataatgtatgtaataataagctaaaggtaataaactgtgataaccataaggcaaacatttatccagttcttgctataaccagctacactgctcagggcccttgatatcttttttttttttt

SEQ ID NO: 393969 - DNA, 623 bp, Homo sapiens
aacctactttctcagcttttatctttctgtgacctcccctttcatgcttcaatgtcaccttgggctctatgcaccctgaactttctggcttccaatttcttacactgttaactctacgtggacttgtccctcactgcaatctcatatctaaatcctagatcctatctgacatttatggttttactcagttgtcatattctctataaaagccttttttgtttgtttgtttgtttgttttgagacagtgtcttgctctgtctcccaggctggagtgcagtggcatgatcatagctcactgcagcctcgaccttctgggctcaagtgatcatcctacctctggctcctgagtagctaggactacaggtgtgcaccagcttcctggctaatggttttgtttatttgttttctccatagagatgaggtctctccatgttgcccaggctggtcctgaactcctgaactcaagcaatcctcccacttcagcttcccaaagtgctgggattacaggcgtgagccgctgcacccagacatttttaatctttctacatataaataacatttcttctcaactcttactattttatatgtgcttcctatgtctttcattcattcattcacttatt

SEQ ID NO: 393970 - DNA, 722 bp, Homo sapiens
gcagaataggttggaagcagaacaccaatgcttttccgttcccaagttctgtcatattgatgtcaacatgattttgacatgttggcattatcacccaggccaaaaagcgtgagggaaacagggaccagcacaaccagggtgttccccaataagagccttagacactctagtctgtttactcagcagaccttggccgaagtctgtcacgaatttggccttgcatagcgtgctgggaatgcagaagtcgccccaacacagtctctactcacaccaactcacagcctagacaaggagacagacgtgtgaaaccaaattatagtcactgcgatagggatctaataagagagtgtgtgtgtgtgactgatgagggaccaggggtcaaaaagggcttttccaaggaaggcaattggaattttccagagaacaaggaggaggacagtatagaaaaggggcagagcctgtgcaaaggcagagaggctggacagagtgtggcaagcagagggaaccccatgcatctctcttctccctactatggctagagtcaaggagagggcagcagggcaggttctgaagggcctctgacactttgtcgagggtgatagccatgggaggctgggagtggggatgtggcaaggtctgaactgcatttccggtcattctgacagccagtgtagaggaaagatgctgagggagaaactggaagcccagagacaggaccagtg

SEQ ID NO: 393971 - DNA, 192 bp, Homo sapiens
atacaggacaaattgtttcatccagctgtcaatggaggggcaaccagcacgaccatctcccaggacaaagagcattggaatattctgtttccttgatttatatatctcttcgtatgtttcttcatcaatttctatagtagtcgcggtttcttcctcatctcccaagatcatatttaaatgttgatcataagc

SEQ ID NO: 393972 - DNA, 135 bp, Homo sapiens
gtttcaagtttcatctatgttgaacaatgtatcattctttttattgtctaaaaatgtggtacatccagacaataggctactgagtagaacaggctaagagtggaattgctggattatatggtacttctatactta

SEQ ID NO: 393973 - DNA, 392 bp, Homo sapiens
gttctagagcaaaacaaggaaggcttttgaacttagcacataggaagcactaaacagacaacccgaagcaaacaacgacgacaacaaaaaacgcttaacatttaattaagtttctaccatgcactaagcctggtgcttcccaccttacctacattatttcatgttattatcctcatgttacagacaaaaagactgatgttctgaggtacttaagtaatacctctaagatcatttagctaatttgatagatgaggaaagttttgtgccagaaaggtagagtgattgccccttgatcaggtagctagccagtggcagagaagctgaaattgaacccacactttgtgacacctggtcctctgtcctttgctcccaaatatgctgtttcttgggga

SEQ ID NO: 393974 - DNA, 1486 bp, Homo sapiens
aagaagcacaagaagcacaagtcggacaaacacctctacgaggagtatgtagagaagcccttgaagctggtcctcaaagtaggagggaacgaagtcaccgaactctccacgggcagctcggggcacgactccagcctcttcgaagacaaaaacgatcatgacaaacacaaggacagaaagcggaaaaagagaaagaaaggagagaagcagattccaggggaagaaaaggggagaaaacggagaagagttaaggaggataaaaagaagcgagatcgagaccgggtggagaatgaggcagaaaaagatctccagtgtcacgcccctgtgagattagacttgcctcctgagaagcctctcacaagctctttagccaaacaagaagaagtagaacagacaccccttcaagaagctttgaatcaactgatgagacaattgcagagaaaagatccaagtgctttcttttcatttcctgtgactgattttattgctcctggctactccatgatcattaaacacccaatggattttagtaccatgaaagaaaagatcaagaacaatgactatcagtccatagaagaactaaaggataacttcaaactaatgtgtactaatgccatgatttacaataaaccagagaccatttattataaagctgcaaagaagctgttgcactcaggaatgaaaattcttagccaggaaagaattcagagcctgaagcagagcatagacttcatggctgacttgcagaaaactcgaaagcagaaagatggaacagacacctcacagagtggggaggacggaggctgctggcagagagagagagaggactctggagatgccgaagcacacgccttcaagagtcccagcaaagaaaataaaaagaaagacaaagatatgcttgaagataagtttaaaagcaataatttagagagagagcaggagcagcttgaccgcatcgtgaaggaatctggaggaaagctgaccaggcggcttgtgaacagtcagtgcgaatttgaaagaagaaaaccagatggaacaacgacgttgggacttctccatcctgtggatcccattgtaggagagccaggctactgccctgtgagactgggaatgacaactggaagacttcagtctggagtgaatactttgcaggggttcaaagaggataaaaggaacaaagtcactccagtgttatatttgaattatgggccctacagttcttatgcaccgcattatgactccacatttgcaaattatcagcaaggatgattctgatttaatctattcaacctatggggaagactctgatcttccaagtgatttcagcatccatgagttttgggccacgtgccaagattatccgtatgtcatgggcagatagtttactggatgtttaacaaaaggagggcattccaggaccctacaagagatggagatgtcattgcctgaagatgaaggccatactaagacacttgacacagcaaaa

SEQ ID NO: 393975 - DNA, 534 bp, Homo sapiens
aagaagcacaagaagcacaagtcggacaaacacctctacgaggagtatgtagagaagcccttgaagctggtcctcaaagtaggagggaacgaagtcaccgaactctccacgggcagctcggggcacgactccagcctcttcgaagacaaaaacgatcatgacaaacacaaggacagaaaaaaaaaaaaaaaaaaaaaaaaaacttttgggcgcgcgcgcccgcgggcccccgcgaagaaagctttttaaaacacacattggcggtgggggcgcgcgggggccccagtgtgggtataggtgaaacagtgggccaaaggggttccccagaagaaaccgcgggccatggacacatgagggcctggggatttcttcaccaatttaaaaacgcgcccgggggaaaacgcgaggggttccggtgaaaaaattccccaagagaggggattccggagaggcacaaaaaggggacctttacaaaagagggggccccaaggggaagcccgcgaaattcaaatttagcccctcgcgggggggagc

SEQ ID NO: 393976 - DNA, 1382 bp, Homo sapiens
  misc_feature (58)..(58): n is a, c, g, or t
cttcccctggatcgttctctcctttctttctctttttccgctttctgtccttgtgtangtcatgatcgtttttgtcttcgaagaggctggagtcgtgccccgagctgcccgtggagagttcggtgggagaaaacggagaagagttaaggaggataaaaagaagcgagatcgagaccgggtggagaatgaggcagaaaaagatctccagtgtcacgcccctgtgagattagacttgcctcctgagaagcctctcacaagctctttagccaaacaagaagaagtagaacagacaccccttcaagaagctttgaatcaactgatgagacaattgcagagaaaagatccaagtgctttcttttcatttcctgtgactgattttattgctcctggctactccatgatcattaaacacccaatggattttagtaccatgaaagaaaagatcaagaacaatgactatcagtccatagaagaactaaaggataacttcaaactaatgtgtactaatgccatgatttacaataaaccagagaccatttattataaagctgcaaagaagctgttgcactcaggaatgaaaattcttagccaggaaagaattcagagcctgaagcagagcatagacttcatggctgacttgcagaaaactcgaaagcagaaagatggaacagacacctcacagagtggggaggacggaggctgctggcagagagagagagaggactctggagatgccgaagcacacgccttcaagagtcccagcaaagaaaataaaaagaaagacaaagatatgcttgaagataagtttaaaagcaataatttagagagagagcaggagcagcttgaccgcatcgtgaaggaatctggaggaaagctgaccaggcggcttgtgaacagtcagtgcgaatttgaaagaagaaaaccagatggaacaacgacgttgggacttctccatcctgtggatcccattgtaggagagccaggctactgccctgtgagactgggaatgacaactggaagacttcagtctggagtgaatactttgcaggggttcaaagaggataaaaggaacaaagtcactccagtgttatatttgaattatgggccctacagttcttatgcaccgcattatgactccacatttgcaaattatcagcaaggatgattctgatttaatctattcaacctatggggaagactctgatcttccaagtgatttcagcatccatgagttttgggccacgtgccaagattatccgtatgtcatgggcagatagtttactggatgtttaacaaaaggagggcattccaggaccctacaagagatggagatgtcattgcctgaagatgaaggccatactaagacacttgacacagcaaaa

SEQ ID NO: 393977 - DNA, 1514 bp, Homo sapiens
  misc_feature (40)..(40): n is a, c, g, or t
gacaaacacctctacgaggagccccgattttaatcgacgngctttcctttcttttcttttctttttttaagagtatgtagagaagcccttgaagctggtcctcaaagtaggagggaacgaagtcaccgaactctccacgggcagctcggggcacgactccagcctcttcgaagacaaaaacgatcatgacaaacacaaggacagaaagcggaaaaagagaaagaaaggagagaagcagattccaggggaagaaaaggggagaaaacggagaagagttaaggaggataaaaagaagcgagatcgagaccgggtggagaatgaggcagaaaaagatctccagtgtcacgcccctgtgagattagacttgcctcctgagaagcctctcacaagctctttagccaaacaagaagaagtagaacagacaccccttcaagaagctttgaatcaactgatgagacaattgcagagaaaagatccaagtgctttcttttcatttcctgtgactgattttattgctcctggctactccatgatcattaaacacccaatggattttagtaccatgaaagaaaagatcaagaacaatgactatcagtccatagaagaactaaaggataacttcaaactaatgtgtactaatgccatgatttacaataaaccagagaccatttattataaagctgcaaagaagctgttgcactcaggaatgaaaattcttagccaggaaagaattcagagcctgaagcagagcatagacttcatggctgacttgcagaaaactcgaaagcagaaagatggaacagacacctcacagagtggggaggacggaggctgctggcagagagagagagaggactctggagatgccgaagcacacgccttcaagagtcccagcaaagaaaataaaaagaaagacaaagatatgcttgaagataagtttaaaagcaataatttagagagagagcaggagcagcttgaccgcatcgtgaaggaatctggaggaaagctgaccaggcggcttgtgaacagtcagtgcgaatttgaaagaagaaaaccagatggaacaacgacgttgggacttctccatcctgtggatcccattgtaggagagccaggctactgccctgtgagactgggaatgacaactggaagacttcagtctggagtgaatactttgcaggggttcaaagaggataaaaggaacaaagtcactccagtgttatatttgaattatgggccctacagttcttatgcaccgcattatgactccacatttgcaaattatcagcaaggatgattctgatttaatctattcaacctatggggaagactctgatcttccaagtgatttcagcatccatgagttttgggccacgtgccaagattatccgtatgtcatgggcagatagtttactggatgtttaacaaaaggagggcattccaggaccctacaagagatggagatgtcattgcctgaagatgaaggccatactaagacacttgacacagcaaaa

SEQ ID NO: 393978 - DNA, 402 bp, Homo sapiens
cttaagtatcctatccttgatttatcaccaactctccaccaggtctggtcccgttattcatttcctaacacttttaatacttttccttcacagtactcatcaagccttatcaactcagttaaaatctgtctccccattagaattgtaagtgccacagggcaaagattttatcagtcttatttaacttctgtatacttggcataaaacttaagtgactggtaaattttgattgcatatgtgaatgatgagttaaaaaaagaaacaaatacgtatctctggaagaaaattgtacaggatgaaattctaggatcttacacagagaattcttccccttccatgctttacagcaggaagaataaagtaaattttctaagtataataaatccataaaaacaggccggg

SEQ ID NO: 393979 - DNA, 322 bp, Homo sapiens
ccgagattgcgccactgcactccagcctgggctacagagcgagactccgtctcaaaaaaaaagaaaagaagttaacatggtctttatgaatctcatttctatctcagctagttcatgctactgtaactaccacggactgagtggcttgaacaacatttatttctcactgttctggaagctaagtccaagatcaaggcactggcagattccatgtctcttcctgttggcagatggccatctccttgctgttccacatgtggtggagagatcacctgtctcatgtcttttcttagaagggcacttatctcgtcatcagggctcc

SEQ ID NO: 393980 - DNA, 108 bp, Homo sapiens
ttgaagggttctcacgtttccctcagcggagcttggagtgattcctgaatacgtttcctctgcacttggcccctgcatcaaagtccgtgtgtgagcgtccactgggca

SEQ ID NO: 393981 - DNA, 276 bp, Homo sapiens
cagccctcagctgggactacaggtgcgtgccactgcacctggctgaagctcatcattccttggttgtaatgttcccattactcaacttgatggtctgtctttccttaaagcccagatccaacctgggatgagtgttcatttcaagagatcctttggccatctcagatacctgttttatccatttaaggtgctttttcagaagttatcaaagtcaaaggcatcaccctcatctgtgaagccaatgccgatgaaagcactatacctgctcagtgtcat

SEQ ID NO: 393982 - DNA, 377 bp, Homo sapiens
ctaccccccacccatgatgacccccaattcccatcaccactcagcacatttccttccctacctgaacattagcctcttaacaggaactgcattttgcttttgttcaccatgtctcactctgatacagtttttgctaccatttaccaagaaaagctcctacaggttcacaacttctctctgaaaacccttggggccatgattcagaattcagcatttttggacattagaaacgtagtaagatgcatacaccatatattctggtacaacccagagtagcagcccttaatcaaagacatcaacaagactgcagagaaacgtaagaaaattcacactcagagggatcagtgaagaccaaaactagccccccattggacagg

SEQ ID NO: 393983 - DNA, 126 bp, Homo sapiens
ctgcatacagctccatcttttaaactcaacaagaaaacatatcagaatgcaacacatcagagtgcaacatatcaggattcaacacatcagaatacaacataacagaaagaatgcaacacatcagaa

SEQ ID NO: 393984 - DNA, 369 bp, Homo sapiens
agcctagcgttaggggagggatgatgccagcagtcccttagccgccccggcctgtgtctgagtacatcatgtacccgccaagtccagtgattctgggcccagttcaacactaggacatgcctgggagttgcagtccttgtggcacagactgcctttcaagttcatgtaggggcccagagctctttatccgttggtggtgagacttgtgcataggtacttaagttctgacctggctatagctggtttaaatgttctctccattgcacatgtcagctgaatttggtctggtttcactttctgctgtaaaagggcagcactgacttcagtgcctcataaatgctgcactttctttctcccctgagcatagaa

SEQ ID NO: 393985 - DNA, 135 bp, Homo sapiens
agtggttagctaacttctggactatttgcggactttttggttctttggctaaaagtgacctggaggcattggctggctttgggggactggggatggccccgagagcgggcttttaagatgtctaggtgctggagg

SEQ ID NO: 393986 - DNA, 375 bp, Homo sapiens
cctcccaaagtgttgggattacatgtgtgagtcaccatgcctggctaataacccagtcctttagagttgctgcttattttccttcttcatagcacacaccggtctgagaaacccaggctattagacagtttgggatctctgaagtattagcctagtaaccacagctgtaagttgactcaggcgcggaaaaaagaaaagctggcaggctttcccagtgattgttttcttcctttgcttgctctgcaatctggccttggaaacacagggcctatatttcagtgttgaggtttggctgcttgaggggttgacctagttcacaggcacccaaactttgtggattaaatacacccatttcccctccttttttttttttga

SEQ ID NO: 393987 - DNA, 400 bp, Homo sapiens
caatcacttgctagaggtatttgcgtaactaaagaggagccaagtgttgatagccaagacaatgggaaaaagacctcaaaggcatttcagatatctctgaggcagcctctcacattacaggtcctgaggcctaggtgaactgaatggcttgctgggtctggcctagggccccacagtcctgtgcaacctcatggctgattcagctccagccttggctcaagaggctccagataatgctatgccacagttttggggagcaaaagccatgttaagccttggaagcttccatgtggtgttaaacctgcaggagtacagaatgcaagagtgctggagcctcaacaacctccacctagatttcagaggatgtatggaaaagcctgggtgctaaggcagaagcctg

SEQ ID NO: 393988 - DNA, 458 bp, Homo sapiens
gtctcattgcaacaaagtaccttgtacagttaatgaaaatgtgtgtttaccattatactcttacactgcaaagaaataaaaaatatccaagaaggtcagtactgttttcagtctatcacctataaaggaggactaaatgtgttcacaactccaaattaactatgttttcatctgcagactcagcctttccagacctgagaatataagtcaccctctttagaaaggaaaaaaagtcttcttggattaagtcagggaaaactgcctgattttgcatcacaccaggggaaattatggagatgagaaatactaccccagattttattctcctaggactctttaaccacaccagagcccaccaagtcctcttcatgatggttctgagtatcgttttgacctccctgtttggcaattccctcatgattctcctgattcactgggaccaccggctccacacgccc

SEQ ID NO: 393989 - DNA, 407 bp, Homo sapiens
atatatacagggatagggaaaacccagccagatctgtggggcatctgcacacaaagggcatgggagctggtgaagggtcagagaaaagagaaatgaatatttacgtccagaggagatggatgcagagatcaattccagaagggcctattaagaaggggtggagaagcacaaacgcctggacaaccagacagacgcagagaaaaagaccaacagatacaaatctgataactcacatgagtcacaccaaccgtaatttaggatgtccttcttcaaaatactgccaaactcaagacagttaatacccagccctcaacgtcctaaaaaggtgagcagcaggttaacatgtcattctccaacaagcagcaatatgaaagctttccagaaaatgagtgagttcctgagaagcc

SEQ ID NO: 393990 - DNA, 499 bp, Homo sapiens
gattggttggatccaggggctctggctgtgtcatccagactttatctgcatctctcagctctgcttttctctgttgctttcattcttagacaggctccatattggtagggagtcagagggggtgctgtgtctttaggttgcatcctaccagcttagcaatcccaactgaaggaaaacttctggaaagattgtttctattatataagcatataggagcaggtgttgtctctgcttctatggaaatctttaaaataggccagagtggctaggggtctgtctgtagttcttggaggctactgcgtgacccaggtaacttcagggtcctttcttaattttgtggttgcagatttataagtctctaggacttcccatttctctgtctcacatcaagtacattaggaagatgtccttggccgagcacggtggctcacacctgaaatcccaaagtgctaggattacaggcgtgagccaccatgcctggccgagaccccatctcttt

SEQ ID NO: 393991 - DNA, 745 bp, Homo sapiens
gattggttggatccaggggctctggctgtgtcatccagactttatctgcatctctcagctctgcttttctctgttgctttcattcttagacaggctccatattggtagggagtcagagggggtgctgtgtctttaggttgcatcctaccagcttagcaatcccaactgaaggaaaacttctggaaagattgtttctattatataagcatataggagcaggtgttgtctctgcttctatggaaatctttaaaataggccagagtggctaggggtctgtctgtagttcttggaggctactgcgtgacccaggtaacttcagggtcctttcttaattttgtggttgcagatttataagtctctaggacttcccatttctctgtctcacatcaagtacattaggaagatgtccttggccgagcacggtggctcacacctgaaatcccagcactttgggaggccaaggtgggtggatcacgaggtcaggagattgagaccgtcctggctaacatggtgaaaccccgtctctatcccgaccgagaccatcctggctaacacggtgaaaccccatctctactaaaaatacacacaaaaaaattagccgggcatggtggcaggtgcctgtagtcccagctactcaggaggctgaggcaggagaatggcatgaacccgggaggcagagcttgcagtgagccgagatcgcgccactgtactccagcctgggcgacagagtgagactctgtctcaa

SEQ ID NO: 393992 - DNA, 352 bp, Homo sapiens
ttgcttccagcaagaacctgtgatttactggtaatgtcaacattctggaaagttattagataataattaaacaccgtgcaggtcaacatctgaaagagatcaagttcccagatcaccatgcagtaggctcaacattaagttcacaggtagaaattcctaaaatgtaattgtcttgagaatctactgcaggacacggctaaagctgataaataatacaccaataccgagccgacttcaggcaccgaccttcacctaaaatgaccttctcctctgatttccagacgagtacacaatcctaatgcacactacaggcggaaaaccacaatcatggttttgcctcccccttctctga

SEQ ID NO: 393993 - DNA, 454 bp, Homo sapiens
tgcccttatatctattaccatgctttaaaaatgtaaggtaatagaatataaggtggatggaaaggggagaattatattacattcattaagtcagcagtgctcaaatagggactcgtatatgccttgagcatagatgagtcatttcagaggaaccacacattcttatgtgcatcactttatgaacagaaaaatatgtctcgctcaagatttgttttaccactttttaaatggtggacttccgtagccagctgtgacttggaaaatatacatttatttgcgaacattactgacttcaggatagcattactgaattccacatattactgtgaattttcccaaataaaaagtattgatgtacagttatgtatgggtccaaataacttattgatttattgattctttaatgtacttgttctagaaatatttatctttacaagtggcattatagtggtta

SEQ ID NO: 393994 - DNA, 263 bp, Homo sapiens
ggccaacagcttcactaggggaataaacacagaggtggtgctggctggaatggagatttggaccgagggggacctaatagatgtcacagtggacttgcaaatcacactcaggaatttcaatcactggagacaagagatgctcttccatcgtgcaaaacacgatgttgcccacatgatcgttgggcatcaccctggacagaatatgggccaggcctttctcagtggtgcctgctcaagcggttttgcggcagctgttgtaatcc

SEQ ID NO: 393995 - DNA, 397 bp, Homo sapiens
aggccacaactgactaaaatctaaaaaaccgaggacataatatgaatttcagtgacattttcagtaaaaataaaatctttattgattatattatcattcactgagtaatcatgaaccagaagataatgggcatatcaatttggaaatgtttgtgacaatacagctaaacacatttttataatacagttttcttaagtcatttatatgtgtatctatttttttttcaggtaaagaactcatattttatccttatcatgaactttatttgtctatagagaaaaggcctatctcctcctaattatctttataaagttcatatacatgtaatattttaatggcttccaaatcatttttgtggtctataatacacccatggcatatgtttataaatatttta

SEQ ID NO: 393996 - DNA, 231 bp, Homo sapiens
taaaatttgaagctagaaaaacgttggtccctataaatgagagtcattttgatgacatcgtaatattcattaggaaacaatgtagtatgtctcctttgatattctctgatttcagcaaaaggtgtataagtttagtttaggttttctctctatacaccatacatacgtgtgcacatgggcactcacacatccacacatgtgtgcatacacatatacagtcttcatagagat

SEQ ID NO: 393997 - DNA, 139 bp, Homo sapiens
ataaaccagcttgttggatgttgaggaaaaacgcagacaggttactcaataagctgtagtatatataaattgaagtagtcaaaagaaatactttaagagtcttcgtgagaaaccacaggctgttgagagcaacctatgg

SEQ ID NO: 393998 - DNA, 350 bp, Homo sapiens
tgtatacctaagtattgcattgtcttcattgtggttgtaaatggtattttgttagggttcaacatgaaatgtgattgacttctttgtgttgaccttatatcctggtccttcctgaacctagcagtggtattttataaatttctcgtggaaattttaatgtgcagccaaggttaagaagcattcttttagacaaagaccagtggtgatatttagtgcccttaaaatcttgtggtttccaatttcaataccatttagcaatccttgggtgtatgcctgcatgattctgtcttctaatatccacagtcgtcattacaaacgttcccccttcttttcagcccttctttccttac

SEQ ID NO: 393999 - DNA, 346 bp, Homo sapiens
ctggactggactaacccaagctggacttaaactaacttccatgccaagccaataaaatttgcttgtcttctatcactccatctatcttagtgaagtttaaaatcagtacatgagtctgagaatatttccattttcccagtagtgtggctttttcctttgtgcccttcattagggctggggtcggtgggtgctggaaaataaacgttttcagtaatccttgtcagtgtccattcaaataccagtaattcattttctgatagccttccaatatgtaactatgtttagaggccctagaagtctcttagttttcaaagatgtgatttgattattggcgattagggttagt

SEQ ID NO: 394000 - DNA, 421 bp, Homo sapiens
agctcggcctcccaggttcacgccactctcctgcctcagcctcctgagtagctgggactacaggcacccaccaccacgtagagatggagtttcaccatgttagctaggatggtctcgatctcctgacctcgtgatccttccaccttggcctcccaaagtgctgggattacaggcgtgagccactgcacccggccaaattaaatttgtttttaaccagattacctgaggctcaatctatgtcatcctaattcccactctggtctgatatggcttgactcctgttccttgtttttgctagcccagggggatagttttgacctgtgctctttgtaatgtacatcatcgctatttaggatcttttctaggaagcattctttctagagatggtcctatgtatttgccagacctgttttcttccttg

SEQ ID NO: 394001 - DNA, 412 bp, Homo sapiens
ttagcatttcaggattgcaaatatcacactttggaaaaataataatgtttgcttcaagaagaacagattggatctgtattatagaaatggaaacaacaaaatgtggacaattttagtaaagattttatgaattaaggaagctttacatatcaatggaaaataattgaggactagcaagttaccgcagtagttggtggcaaaggctacagcagttctttaaggattcagaaaatagttgtgtgcatgtgcgtgtgattgtaaaaacatcatgcattccatttcccatccatggtggctaacactattcaaaaaggacattttcagacctgggatgtcttcaaaacaaaaccaaaaaaaattctaacgatggctgttcctgtgttacccaccacgctcctcacaaatgcttggc

SEQ ID NO: 394002 - DNA, 707 bp, Homo sapiens
gaaccgtttgtggtggacttggtgtccacatagatctaatcagtggtcttagcttttgtgctttcaaaattaccacagtttttgttctaaaactatcattcccttgattttactttaggcatgctatctgtgtattttgaaatttaaaataacattaaaggagaaatgaaattattttgtttgagaaagaattaaaaggttaaaacatcttgatctaaataattttctaatgggagatttggtacatccccagaagttgtctttggttcagagaacagtcttcagacctagaaaggacttgaggagtcccagagaggagccacatggtgtgaaccattcgattctcacaacagaatggataagaacaatttcaaccatgaaaccgtgcagatgttcatattttgaatagggtaagatcggtgccattgtcagaggaaaaactcctggccatcacaggttgggagagaaagtttccattgtaaagaacactcaaatgccatttaaggaaatgggttcttctgccctgattctttggaatatttagggccacgtttttagtttttgacatcataaaaatttcaaagtattctgttctgattgccatttcaaacaattgactggaatttcagagcaatttcataagagtaataccattagaatttttaaattacctataatcctatatgcctaacaagtatgttcatgct

SEQ ID NO: 394003 - DNA, 307 bp, Homo sapiens
gctttggaaaaaaccatgcacacacacaaagatacaaataaagtgtaagtgaagtaatcagagtaagaggttggggaaggtaagtcgaaaccaaaagtgtaattagtatacagattataggctctgcagacctacacggtcacaggaagaccaccacatatttggctgttagcttttgaacaaagccaatgcaaagaggataacatgaacgatgcacggttcccagtgtctgtgccaaaatcgtctaagttcagtccggtctagaaggccgggggatggagctgacctcaggggaaccctgctgaag

SEQ ID NO: 394004 - DNA, 277 bp, Homo sapiens
tctttcttgatcagatgtcttctgtctatccactctggctctgtctactcccttcccaacacatgctctattttaggtaaccatggtagttttgttttgttttgcttttgcttttgtttttggagatggagttacactctgtctcccaggctggagtacagtggcacgatctcggctcactgcaacctctgcctcctgggctgaggcaggagaatggcgtgaagccgagatcccgccactgcattccagcctgggcaacagagccagactccgtgtc

SEQ ID NO: 394005 - DNA, 340 bp, Homo sapiens
gccaacctctgcctcccgagttaaagtgattctcctgcttcagcctcctgagtagttgggaccacaggcgcgtgccaccatgccctgctaatacttgtatttttttgatagagatgagttttcaccatattggccagactggtcttgaactcctgaaaggagtttttggggggtgataagaatcttgaaaaaattacctcctttccttcatctcaccagtcactgagttccttttcctggagacaaccattattggcttgttgctccatccagtgcttaggatgtctgtgtaaaacaaatgatacatagcatacacagtgctctgcatctttttattcat

SEQ ID NO: 394006 - DNA, 480 bp, Homo sapiens
taataactaatgaagttgtcattatattacatttggcagacataaagttaaaattgtaattttggagttgttgtttctttggctataagtgaaatatttttctagagcctcagatactttcattggctattgaaaatcttacagtctatgagcactacgctgttgtactgatggataaaatagctctggccctgtctgcatccttggaagaaagaaagggagacattgaaaataggtaaggacctcaactttggagcttatgttgaactgaccatgattattgtcagttttacaatggagttggggcctcctctgcttaaaacaggctacctgcctaagtgccgttagtaattcgttactcctagggcacacctcttttgaaaatctttataagaatgtgatgcccataaagggtaataaacccattttaaaggtctgcctttgtttttttaatcacatatgttttcctaagcaaaaaaa

SEQ ID NO: 394007 - DNA, 208 bp, Homo sapiens
cagtgtcactgaattgcccctgacttagcctctccatcagccaacaggttagagagttctttcctctgtgtggactggggtctttcctcttggaatctgattttaatgaaacaattaggttgctcattttgaaataaccatggcttttagccaaattttatgctactctgaataaacaattttgcttaaaagattttagccacttcca

SEQ ID NO: 394008 - DNA, 321 bp, Homo sapiens
aaaaaatgcaaaatatgtagaactgaatgatataaaagatatttggccgggatggtgactcaacgcctgtaatccctgcactttgggaggccgaaggtagcgggggagggcggggatcacctgaggtcaggagttcgagaccagcctggccaacatggtgaaaccctgtttctactaaaaatacaaaaattagccgagcgtggtggcacgcacttgtaatcccagctacttgggaggctgaggtaagagaatcgcttgaacctggaaggcagaggtggcagtgagctgagatcgtgccactgtactctaggctgggtgaca

SEQ ID NO: 394009 - DNA, 428 bp, Homo sapiens
aaagagaagcccttaaatgatatgaaaaaagagagaaaggcctagtgtcctagtggcccagcggagcccagttccccaaccaattctctagcagaatgaagccttatgagtaaccactgaccagatgagcagaacaaccacccagccaggcctagaccaaaccccagaatcatggacaaatacaacagttgctgttttaagccaccatgttttgggatggtttgttactcagtaacagataactgatacacttccacgaggccatgggttgtgctggagtgccctggtgatccatgccaacaatgggatcatgcaaagctctgtgcacaggcaaatatatgtctatccttggtgatgggtagtgtgaacataaagagaagccatacagagccactgccatctgcaagtgctccctcaagctactggtg

SEQ ID NO: 394010 - DNA, 425 bp, Homo sapiens
atctgatttggggttcaagagccagacagcaatgggggaaggaacagtaacctttggggacatggtaagtgcttctcagctagcactgtggtttttcttcctactctagattcctgagcatccttgcacaagtgaagcagaaatcagatgagagttgaagtacattaactaacttttctttttggtaggaaaggtcaaatgcgtttacttgcccttgatggctggctatcattgcttccggaaaagacgcagtgtacaggctgtagggtctcagaataaagtgcccccaagaaataaatgaatagcttattacccacgcatccatttctcctagaagccagccagtgttggctaagcagttagcatttattcagccacagagttacaggggagaggagaatatggtgcgcgtccccctgaagcat

SEQ ID NO: 394011 - DNA, 222 bp, Homo sapiens
tgcatgaaagctgcttgcacagggcctggcacacagaaggtggtcagagaagctttagctttcttttctctacaaggactgtttgtgtccccctgccccgcccccgcacatgtgtacatacccactgtcctgattccctgctgctgcaaggttttgcatgacttgactcttccctgcttctccaacctcttctcctgccactaggcccctcctgccacacag

SEQ ID NO: 394012 - DNA, 540 bp, Homo sapiens
cacagctgctttagcaagttctagattaataaaaataaaattaactgtcacttaaaggagacaggaagaagcggggtttttttgtttgtttgagacagagtctcactctgttgcccaggctggagtgcagtggtgctcactgcttctcgcctcctgggctcaactgatctcccgcctcaacctcccaagtggctgggactacaggagcatgccaccacgtctagctaagttttgtatttttcgtaaagacaaggtttcatcatgttgtccaggctagtcttgaactcttaggctcaagcaatccacccacctctgcctcccaaagtgctgagattacagacatgagccactacatctggccaataggaagaagtcttgaaagaagggagatgatcagaaggaaatgaaaggaagtcactgaaactttaaatttactagaaggaaaataactaaatcccagttttaaaactgtgaaaccgagtttaaaatgtagaaggaatatagacttgctcatagtttgtgtacttggtagaaacaaaa

SEQ ID NO: 394013 - DNA, 194 bp, Homo sapiens
ctggagggaagtcagcaggcaggactgaagaactctcagcactgaggagaatcttaggaagaggccatctggccccagagaagtgaaatacatgccagagtcacgtatctgggtggtggccatgtgcccgttggtcctgatgcccactctttctgtttgtggcctcccaataaatagaccggggtgcccagccc

SEQ ID NO: 394014 - DNA, 363 bp, Homo sapiens
tcaccacctaccactgaatctaacctacagctcccagtggttcctgttgcaaatggaaaagatcagctggaaagtgtgactgcctaaaaatgctgagagagctgtgtgtcttcctctcagcttagaccccccatcacacccccatgcaaataccagctgggaatgcacagaagtgcagcctggtttagtttttaaaaagagtaaacatcagtcatggggtcatatgatctccctgttaggttcacaggaatctttagttaatgtctgttacctaagaattatgaaaacagaaacaaccactaacaaggtgtcctaaaaacaaaacaaaccccgcgattagggttagtgggtaccgagcctcga

SEQ ID NO: 394015 - DNA, 804 bp, Homo sapiens
cataggcagcacaggcatcaagatgtccaaccgagtggtccgctgggaagccagccactctgggaactggtacacagcctcaggaccacagctgaatgcacagctagaaggttggctttcacaagtaaagtctacaaaaagacctgctagagccattattgcaccccatgcaggatatacgtactgtgggtcttgtgccacccatgcttataaacaagtggatccgtctattacccagggaattttcatccttgggccttctcatcatgtgtccctctctcagtgtgcactttccagtgtggatatatataggacacctctgcatgaccttcgtattgaccaaaagatttacagagaactgtggaagacaggaatgtttgaacgcatgtctctgcagacaaagatgaacacggtattgaaatgcatttgccttgtacagctaaagccatggaaatccataaggatgagtttaccattattcctgtactggttggagctctgagtgagtcaaaagaacaggaattcggaaaactcttcagtaaatatctagcagatcctagtaatttctttgtggtttcttctgatttttgccattggggtcaaagattccgttacagttactatgatgaatcccagggggagacttatagatccattgaacatctagataaaatgggtatgagtattatagaacaattagaccctgtatcttttagcaattacttgaggaaacaccataatactatatgtggaagacatccctttagggtgttaaatgctatcacagagctccagaagaatgga

SEQ ID NO: 394016 - DNA, 197 bp, Homo sapiens
tgtctgggagtgtgacttggaatctattactgaagattagaggaaaatgtagcaaattgtgatctgaagcatttatggatggattgatggattgatggatagggattctgactgagttaggtagtctatagtctcagacagttgtggaagctccattaggtcatgagcaacccagactccttccaattctgtgccct

SEQ ID NO: 394017 - DNA, 457 bp, Homo sapiens
tgttcctttgacatattcctattattgtgacatgtttacctgcttgcttgttttttagcacttccttactttctggcacttcaagatgccctaggctcatcgtctatatttttttgtcccagtcctagagttagccatttctccaagaagctctggttcctcttgctagagaatggtattagaagacaaaatttgtgtgctagatatactctgggcattttgcttctagagtctctcagcttacaaaacaaagtaatatatctgggtatactaatctgaatacatacacatattataacatttctatatgtaatcaactctaaactgagctaaaacatgaattactactaatgactctaatccattctcatatggaccattctagcctcctcaccttgcttacctgtaaattcccactccaactgtaagaaacctggctcccactatccatcattga

SEQ ID NO: 394018 - DNA, 155 bp, Homo sapiens
gaaagcctgttagcagagcacggaccagtgtctccggagaatgctattctcctacatttccgaacaggttatcaacgcacagatcgatcactgcctctgtcccatcgctccctgaagtagctctgactccggttccttgaaaggggcgtgtacag

SEQ ID NO: 394019 - DNA, 639 bp, Homo sapiens
ttgagacagagtctagctctttgcccaggctacagtgcagtggcacaatcttggctcactgcaaactccacctcccgggttcaagcaattctcctgcctcagcctcctgagtagctgggactacaggcgcctgccaccacgcccagctaatttttgtatttttagtagagacgtggtttcaccatgttagccaggctggtattgaactccttacctcaggtgatccacccgcctcggtctcccaaagtgctgagattataggcttcagccaccacgcccggccatccctataaccattttcatatctatggttctgtgatattaaatatattcatagtgatgtgtaaccatcaccactatccatctctagaattcctttcatcttgtaaaactaaaactctgtacccgttaaacactaactttctattttcgcctccccgtagccctggcaacagccaatctgctgtgtgtctctatgaatttgactactctgagtgcctcataccagtggaatcagatagtatttgtttttggtgactggctaattttacttagcgtgatgacctcaaggttcatccgtgtcgtagcctatgtcagcatttccttccttttaaggctgaatactattccactgtatat

SEQ ID NO: 394020 - DNA, 366 bp, Homo sapiens
aagcttcagatgactcagacagccaagtgcagatgctgacagctgaatatacaagtctggacttcagtggggcaactgaggctaaagatagagattaagtcattggtgtatataaataatacagatggcatttttcttttctttttgagacaagagtctcactccgtcaaaaaaaaaaaaaaaaaaaaaaaaaaaaaaaaaaaacccctttttagcccccccaatttttgtggcccggggagtgtctttggattttttggggcttcttggggggggttccccccggttttgtgtggtgtttccaggtgtccaagtttctccccattggttgtgggttttacccaacgtttttatggaacccttttt

SEQ ID NO: 394021 - DNA, 363 bp, Homo sapiens
ttgtgattgcgcaaaaacgaaataaccaccttccactttgggttaaagccacaacattctctcactgtgctgcttaaagaaggcaaagaagaacaaacgagcatgggctgatggcatttttgaagtttctctgctaaagataagtaattcaatataagtgataatttggggtttagagccgtcaagaagctgaaggggagattatttatagtatttttttttaagccttggtttcaaggtggccaaaagtcctattaattcgcagttcccttcacaaaacagttcagcattcggtcccaggagaaatggctgtttaagagtttcatttcattgagtatgtagttagagcactcaatatgccat

SEQ ID NO: 394022 - DNA, 334 bp, Homo sapiens
aaatctcccttttatccaaaaggttgagtgcgtatttttgaagtttattcatttgccaaacatcttggggcacatcaataagtatggattttgaagacatggttaatttcatctcgagcagacctgggtttgggactccacctcccttatgactgctcatgtgtggtttctacagcaagttaccaacttcccttgatctcagttttctcatacataaaacaggactaataacagatctaccttggagagcattctcttcatttgtttatttatttattcataaatttgacgatcttttttcagcatctagtctatgctaatagccactgggctg

SEQ ID NO: 394023 - DNA, 180 bp, Homo sapiens
gtagcattcctatgatttgcagtaattgatacattcattaaaatgaattgtttcttaaaagtttcaaaaaagccatatgaacttaaagacattctgggagataattctttgaaaatgtcttcaagctcttgcttgctttttgagttattgaaattttcaatgtctttacgcactttggta

SEQ ID NO: 394024 - DNA, 173 bp, Homo sapiens
agctaactctgtcatgatacataatcacctagtgccgtccttattttacacttgacaggttatgtggccaagcagctttcgtgagttgctgtaaactctgtttctggtctttccaagcagcaggccagcttccctttcccctctaccctccacagtgcctcccacagtcttct

SEQ ID NO: 394025 - DNA, 770 bp, Homo sapiens
acccctcatccccccatggagtaggcagttcctattggtatcctcattatataggagattgaggcacacagagatcaggcaactaggagagaacacacagtgcctaagtactcttggcccctgcactgtcctgctggtgtctgctgttgactttgacctttagaagggcaaagatgaaacatcaaggaagaattcatctatggtataagaacaacatatgatacggctccaggagcagaaatcattagaggtgcccctcgggactgcagaacagaattcctggggttgattgtgcgcttaaagctcttggtttaattggagtgaatcagtattgctgtgaatttccctcaaatgttaggggtcaagtataggattgtatatctagtattggaagccagctggcgttctaagaccactgaaatgttgaggaatgagtcttaaggactcagaaaggcagaggtaccccaagtaaaggtttcttttcaaagtagtgcttactatgtgccagacacagttctgagcactttatgtatctttacttggttaattctcacaaaatctttacaaggtagctactgccctgttttatggataaggaagcagaagtgcaaaacagctaaattacctcatcaaggtcttgccactagaatgtggtggacccagggagtctggttccggcatccatctgcttcattcttttccctttaaaaattttaattttctttttttggttataacatacctttcccaagacagtgagaacagaacag

SEQ ID NO: 394026 - DNA, 350 bp, Homo sapiens
atcgtgatggctgactctagagggtccacagtgacataacaaaatacacattttgttagatttatatataagtatttcatttttgggggtgctcatataaatggtaatgtgcttttaatttcaaattccacttatttgtcactggtatgtaggaaactggttgacttttatgtattaaccttgtatcttgcagtcctgctatataatctcttattccagaaattttttttcacttctttctgattttctacatagataatcatatcatctacaaagttttatttctctcttcctaatctgtatacttttaatttccttttcttattagttaggacttcctatgatgttgg

SEQ ID NO: 394027 - DNA, 509 bp, Homo sapiens
aagggaaagaggaagggaaagggaaagaggaagggaaagggaaagggaaaggtcttattctcacttctcaaagatctaccaacctagaatctacttcacaggaaacacaccacaggagtaacttggtttgcaagcaagatgggctctcttgacagatgctagccttccatgggacccattccacattcctgaacagttttctttatttctataactcatatagtcatctttgtgttgtgtatttacttgggaggggccctctctaatctaaataggtatccatcataattcagcctaagataagtttaaaacaagggcagatgcacagaacttcttatgaccttgaggttgactttctgggtcaataactcaaattgggtgtcgctgtaggaaacatgacattctgataacaatagtggaaccaaacaaaaaataaatgcagcaaaaaaaggatcaccttaaggatttcttgtgtgaaccaggaatagaaaaagaaatgaatagagttg

SEQ ID NO: 394028 - DNA, 385 bp, Homo sapiens
cacaaattcatttattctatggacttaagattggaaagccctaaaccaaaccctactatttcctccttcatacttgcttagctttcctatcctagctgaactcaatggtagtcaaagtttgaatgaagcagacagatactgctttacattttctcaggtatttgaagtttattctgattacttaataagatgacctaaaactgcctagtactgaaggtgtgcaggaatgtttgccaaataataaatcagaaccaacttcagagtcaaggatgctcactctggagcactctaaagcaatactattcaaaaagagtcaggaaagactgcaccgactcccagaacatattctctcactccgagtggactgtctatatcctgttgctct

SEQ ID NO: 394029 - DNA, 214 bp, Homo sapiens
gggcaacgagcagagcaggtgactgtcgagggcgccccactcagggggagcagccagggaaggccccaaggctgtgacatcagcaaggagccccggggtggagaggaggccaagggtcaggcatgcccccgagctcatcacataaagccgggggaaaccgcagcccctggccttgaccctcagcccagcgtgagacccatctggaaggaggagg

SEQ ID NO: 394030 - DNA, 444 bp, Homo sapiens
catctctgccctctctgggccattcctgttctcctatcttcccccaggcctcaaggctgggaaaggcggcacagagatggggttacaattcctgatccccagggcaagggtgctgcccttctcgcacctgggccaccctacgagccctgagacacagcagtgtgggcggggaagcctgggcctccagatggatggtcctgggtgcatctggctctgccactaggggctgggcgaggacaaccttcctgaacaagacaagcttgtaaagtgccccctgggctgtccgcaggagaggcccagcagcagggcctggtttacaggtccaggcttccctaggttctgcccacagctttccccggagcttccttggtcctcatctggcctcactccagctccgtggggtccctggtcccccaccccaccagacaatgccaccagctccca

SEQ ID NO: 394031 - DNA, 265 bp, Homo sapiens
gattaatatttcaaatatacttaaccctgcgtctaattggggctgaaaacagttgaatccaatgaaatcagacttgctggcagttagaggaatcttatttggagacatcataagggaaaggagagaaaacagaggaggtatttgaaatgggaaatttaaaatcactcttgaattttctcaaagtgctgtagatactgaatgacttatcattgtgtgtaaactaggtaactccttgtctttctgatgcctttttgctttttcatgt

SEQ ID NO: 394032 - DNA, 353 bp, Homo sapiens
tccagcccagacccccttccttccataattcagatgatcaatcacagccagctgcctgctatctacctggtggcctcacgcacattctagaatatggacaaaaggaattccccatcttccttccctaaaattatcctgcctccattctctctatgcatttggtgtctcctcccactacccaatcactgaaactagcaacaggacattcctccttgacctatccttttcccacaccactcatcaacagtcagtaagctctcagttttgttcacaaaatatcccttaaatctgtgtcctccccttttcattcctgcttctcctactctatttctcaatcaactctggattctcac

SEQ ID NO: 394033 - DNA, 823 bp, Homo sapiens
  misc_feature (519)..(519): n is a, c, g, or t
  misc_feature (529)..(529): n is a, c, g, or t
  misc_feature (533)..(533): n is a, c, g, or t
ccaggctggtaccgcccgaggtatgggattgcaagtttacctgctgactcgtgaagaggatgacgcatcttcttaaactgatttaagccgaacgatctcaaagaaaactgtcaggagcatacaagaggctccagtgagtgaagatcttgtaatcaggttacgtcgaccccctctaagatacccaagatatgaagccaccagtgtccaacagaaggtcaatttctctgaagaaggagaaactgaagaagatgatcaagacagctctcacagcagtgtcactactgttaaggccagatccagggattctgatgaatctggagataaaaccaccagatcatctagtcaatatatagaatcattttggcagtcatcacaaagtcaaaacttcacagctcatgataagcaacgttcagtgctaagctcaggatatcaaaaaactccccaggaatgggccccacaaactgcaagaataaggaccaggatgcaaaatgacagcattctgaaatcagagcttggaanccagtcaccntcancctccagccgacaagtgactggacaaccccaaaatgcatcttttgtcaagaggaaccggtggtggctacttcctctgatagctgctcttgcctctgggagttaatggttctttagtactcctgaggtagaaaccactgctgttcaagagttccagaaccagatgaatccaacttaagaattaagtaccaaggtcaacgatgagaagctgtggaaaaaggagccaaacattcctggaaaaacatcttaatagctcccatcctcggtctcagcttgtaatcttactggtcac

SEQ ID NO: 394034 - DNA, 595 bp, Homo sapiens
  misc_feature (519)..(519): n is a, c, g, or t
  misc_feature (529)..(529): n is a, c, g, or t
  misc_feature (533)..(533): n is a, c, g, or t
ccaggctggtaccgcccgaggtatgggattgcaagtttacctgctgactcgtgaagaggatgacgcatcttcttaaactgatttaagccgaacgatctcaaagaaaactgtcaggagcatacaagaggctccagtgagtgaagatcttgtaatcaggttacgtcgaccccctctaagatacccaagatatgaagccaccagtgtccaacagaaggtcaatttctctgaagaaggagaaactgaagaagatgatcaagacagctctcacagcagtgtcactactgttaaggccagatccagggattctgatgaatctggagataaaaccaccagatcatctagtcaatatatagaatcattttggcagtcatcacaaagtcaaaacttcacagctcatgataagcaacgttcagtgctaagctcaggatatcaaaaaactccccaggaatgggccccacaaactgcaagaataaggaccaggatgcaaaatgacagcattctgaaatcagagcttggaanccagtcaccntcancctccagccgacgctggagtgcagtggagtgatctcggctcacggcaaccgcatcagccgtt

SEQ ID NO: 394035 - DNA, 248 bp, Homo sapiens
aacatctcacaatccctcctgtgatggcagatgtctccatctactctacagacgcctgcaactatcattcccttgatccgtggtaattaggagggaactcctctgtgaagaactgcttctaccatcctcttttagaaactctttctccactgggatcttgaacattttcaaaatctggtgcaaggtctttatttatttatttattttttttgagacagagtgtcactgtgtcacccaggtgggtacgt

SEQ ID NO: 394036 - DNA, 414 bp, Homo sapiens
gggctcatgccattctcctgcctcagcctcctgagtagctgggactataggcgctcgccaccacgcccggctaatttttttgtatttttagtagagacggggtttcaccgtgttagccaggatggtcttgaactcctgacttcgtgatccacctgctttggcctcccaaagtgctgggattacaggtgtgagccaccgcacccggccttttgagtcctattttcatccgcatctctatggagtctgatactgccaattcctgagtctcgggtatacatagatcttctcagctttccacatttctacctgaagattcagattttcttgagcctactaagtcaattatttgtccttctctgtagcatctgtacttctaaatttttatcttctactggcttggtctttatcctttgg

SEQ ID NO: 394037 - DNA, 408 bp, Homo sapiens
ccagccaggccactgggggcactgggcaaattgaaaaactggatgacccggggcagtggtaaggacctaaatgggcccactgtgtgtgaaaaagctttcctaagccctagtcatcatcatcaagaattactgtaatgagttgattagggcataacttgtgtccgatcattgtcaaagagcccatatcttccttatgtacaactcatttacttgcagaaaaaaggattctactacaattatacttttttccacttgccctgaacttttgtcttctaataataatgttcccaaggtcattcctcatacttttaggccaatatttagagctagcgaagaggatacagattaagagctggcacctttgggcccataagccgtaggtaggcagagggccaggttaaaaaaaaa

SEQ ID NO: 394038 - DNA, 508 bp, Homo sapiens
cggctacataagtttccttatatttttgaattatgatgtaaaagtggtctacataaaatcaaggaaagagtactggctttattgcagttcaagtaccatattaaaaatatatatatgtgaatgtgtgcaaaaatacacactcactcacatacaccctaaattcaattctatattgaagcatcaaattgaaattggttcttgaaaattccagtccttcgtgattagaatattgagagggagagtttgctttgattttttccctctttactctctaaagcattttctcccttaaaatacaccagaaacttctcatataataagggcaagatgattaagagtatgcaattgtacttgctaataccactgcaatttacggagtgtggaactactcagacctcccaacattgccaactgggctcagtgataggactaacgaggttgttcggtaccacagcaagtagaaattaaaattggaagagcaatcgtgtttgatactgggggtcactaa

SEQ ID NO: 394039 - DNA, 348 bp, Homo sapiens
cattttctctctttttcattaatgttatattcagccactaaaggtgaaagaaattgaataaaggcaaatttgaaatatgcaatagctcacacaaaatagtttaagaggagccttagaaattgctttgcataaatataacaccgaacacttaattgtcttctgcctcttaatgtgcagcttgcactattaaagccaattgcttcctatgtaccttataaaacagaaatgctgctttctcttctccaaagaataacctgataaaaactttctaacctcgaaaatcttgctttatacttttctttaaaaattcctcttcttaaaccacagatagcacttattacataatag

SEQ ID NO: 394040 - DNA, 257 bp, Homo sapiens
aagaaaaaatattctttaaaataatttatcttctttagcctatcgacattataattaccatggataatttcactaagtggtctgagacttgaaagtattcccaaccaggaggtgactaatggaagtagaatttttgatgagctttaattggttgttgagcttgaggagttatttgaactgaagtaaaataagtaatctcaaatattttaagtccaaaatggccatcgatatctacaaggtcattgagtgaatttatt

SEQ ID NO: 394041 - DNA, 368 bp, Homo sapiens
gaatgatcaattaaaaaaaaaaagaaaaagaaactgcctctgttaggatcaaaggttgagaaagtaaggagaatacagagcttccttccataacggtaggaaggcaccaaatttgaacagagtaaggctcctagtgccactgcctaaaaggattgagatgagtagcataggtaagttctgctccaggcttcagatcacaattctagtaacatagcacagtgagaacatttttattttttctggacaagttttgcctccccatcgacaggttacataaaggaaacccaatttttcattcatcagcaaagacttccaggaaaagggaggaaaatttcctgttctctcttaaatgttgtcaaaagatttaa

SEQ ID NO: 394042 - DNA, 371 bp, Homo sapiens
gctaggaaccactactgccctttacttttaaaaattattatgaactgattgtaactatttatgaaaaggtttgaaaatcttagtgggagaatatgcaatgtgacttcagattggtattaacaataatcctcaaccttatattgaaggctttcaagtctgttttttcttcttcttcttcttcttcttcttttttttttttttgagacagggtcttactgtcacccaggctggaatgcagtggtgcaatcgtggctcactgcagcttcaacttccctggctcaagtgatcctcctacctcagcctcccgagaagctgagactacaggcatgtgccatcatgcctggctaatttttgtattttttgtggagatg

SEQ ID NO: 394043 - DNA, 167 bp, Homo sapiens
tagctgttcagaggattccctctggtggaagtgtccaatatgattccagcgtatgagaaacagtacacaacaggcatatacatttcattagtaagtgtggttacttaagaatgaaattaggctgggcgcagtagctcatgcctgggagccactttgggaggccagca

SEQ ID NO: 394044 - DNA, 239 bp, Homo sapiens
taaagatctaataagagtaagtagggatatccgtcaccttacacagttgtcttttgttttgttaaaaacagttgaaatatgtaattattgtaaactttagtcatcctactgatctatcaaacactaggtcgtatttcttctatcaaattgtatgtttgtacccattaatcaacctctttttatcttccccatccccaccccttcttggcttctggtacccaccaatctgcattctatct

SEQ ID NO: 394045 - DNA, 420 bp, Homo sapiens
cagtggagtgctaccacagcctggaatcctcagtactggagcctctgccacccagctggggtctcacgctcagcccccgaccatccccagaggccaggccacctgtggttctggggtcccgaggctcttgggagcccaagctgctggtgtgacctgctgcagctgctgccagccaggcagggagagctgagagctgagcttgccctgtgcccaggagggtggactctggcaggacatggcccggaggaaggggcccgtccgcccagggtgtctgttctaaggagcgcagggacagggcctccccctgcaggcgaggccaccagagtgggccacctcctcctccctgacccctcctcccaaggggcttatcctcctctgcagggctggtgttactcccccgaaggtcaacggggatcctct

SEQ ID NO: 394046 - DNA, 107 bp, Homo sapiens
tagaaagcaagttttaggacagcagggacctagaacagtagtccatacacaatagaggagcaagactacctgggtccaaatcctaactctgccacttgccagctgtg

SEQ ID NO: 394047 - DNA, 427 bp, Homo sapiens
agcaaagcactgtgggaccaactgaccagaggtgagtcaaggggtcaaagcttcagagctgacaactgagtccaggggacatcaccaagcagcggcaggaataagatcagaggcaaatgggggttcatccaccagtgcttcagctacgcaagtgggaagggctccagcatggtcctagatgacggaggaattaaattatcttcttccatgtccacccctatagtcagggtttactgagtgtttactagggccaggtactcttctaagcacttcattaaaactcaattctcacaactactctgtgaagtaggtactcttaccaccaaacatattttgtataagagcaaattcaagcctagaaaaattcagttatttgcccacagtcacgaagcaagcacagtcccagcagtttgacttgatagccccc

SEQ ID NO: 394048 - DNA, 1099 bp, Homo sapiens
ccagcccattcactccttagaacctagttatgtttttgatccagttgatttcatctactagttcacaaaatagtttgaggctgagacattacggtgaagtaatgtaattggaagtgttaaaccaacttttgaaacaacttaatacctgacatttgtatataacatacattgtctcacctaatcctcacaacaactctgagttagaccgggctaatttcctaactcctgggaagcagcaaattttttttctttttccccaatttggttcctggaaacggggcaaatggatttggcatcttacaagtgagaatatgacagggtttactgccattgttgggtagtagtagagccagaactgggaccagtcttcttgagttgtgttctatcccatatggcctctgcttctgtcctttttcaggcagaatatctccccatgcttttagacctaggaatctgatctttttgtgtaattgtgctgtcttcttttccaaattagagccaggtggtcagctttaaagctgtgaagatggtggaagctaatgtttctccagatactgctttctgacctagagccctgagtatttttcctatctcccttcctaaccttcttcactgaatttaagttgcagggccatttatggccatctatacactttctctttgcagcagggaatgtcactgtatcccccgtggtagcagtaatttgggcttttattagcaaagaagattatagggtggatgctgctggagtggtaattgcacttcagaccctgttgaaattcagtaactggaagaatctctttttgagctcagagtcctcttggtgtggaaggttcataggtcattgtacatagtggataagggcaagtacttaagaaatggagatgaaaggggagcacctttttttttaaaataagggtgcttattcaagaaagacctttgagtggcctgttggaatgtagggtgggaatatgagaaagtggcaatgggttttggactgaaaggaagaagagttgataggcgattatgggaacttcgagctggggtaggaggaatttagggaagggaacacgatctttaaacttagggactggattga

SEQ ID NO: 394049 - DNA, 662 bp, Homo sapiens
gagaactaggtgaaatgctgtgctaattaaaaactcctctgtgtgccaaggtattcatgtgctgattctaataatcattgattgcatatatataagggtattttaaagactgcaaccccaaacaaaaaaacacatgggcccctttggacatatatattcatgaggcatatataataagaataataaattcatacttccacaagttgtttttcaaacctaaagggaacttcaatcccttacatctagaactgtttcttaccctagccacgggccagctgactgttgtattgccaaattctgcctcctttgatatatatttggatgggattcaaaatagaaacaaggattcttgtgtgtctattctttgcacttttcacttaggctgctctgctgggtctctttttaaaagatatgattgatccttacagaatgatacttgagaagtagtagtcatctgtcctatttaggcaaataaaagttgctgtaatgtcattaaattgccaaggacaagcctagttatttcagaaatgttcaccctatcccttcggttatccatgcagcataaagtgtcaacatttcttatccatctaaatatgtctgcctcatacaaactgaggacactgattcctttattggtaaaaattccccagtgcttgtcttga

SEQ ID NO: 394050 - DNA, 464 bp, Homo sapiens
caggagaaaaatgaagcagggatgcataaagttagttcagagagagaacaggatacaattttaaatagtgtggtcagataagggtttattaaggaggtggcatttgggccaagacactaaggaagtaagagaacaagctatgtagatagctgggaagagcattcctaggaagagggaacaagtatctaatagagaagcatgtctagtatgttcaaagaatagcaaagccttggtagccttaatgaagaaagcaatggagagagtaataagagatgatgtcagcgagctaaaggagggcatgaagattagagtagggccctataaactggatgaccactgtcaaatgaaattaaggctgttgaggcagaaatgatttgataaaagtttattggaagccaaatgtgaggatgaacccaggaaaacacaccaacaaagttgagagtgttctggagtctgttacaagt

SEQ ID NO: 394051 - DNA, 385 bp, Homo sapiens
gtttttaaattgcacaccattctgaatagcaggatgaaatcgtgcacgtccctcttcgtccctctcaggacagaaattcttttgtccagcatatatctatgttgcatataccaccagccaattagtcacttagtagctggtgttggttatgagatcaactgtcatagtatcacagtgcttgtttcaggtaacccttatgttatttaatagtggcccaagagtgcaagagtactgttgctgacaatttggattcacgagaagctgtaaagtgcttcccttaagggaaaagacgaaagttctcgactttaggaaagaaaaaatctcttatgcagaggttgctaaaatctgtggtaagaatgaattatctgtgacgttgtgaagaagg

SEQ ID NO: 394052 - DNA, 180 bp, Homo sapiens
  misc_feature (47)..(47): n is a, c, g, or t
  misc_feature (70)..(70): n is a, c, g, or t
aaagaacggcctgtacaccaggtactgggccctctgcgtgggtgggnggccaggcccagcagtgcccggntgggggccaggcccagcagtgcccaggtggggagaatgctggggaaggccatagagcagggagtgcccacctggccataccttgtcctgggaaacaccattcaagcccca

SEQ ID NO: 394053 - DNA, 146 bp, Homo sapiens
tatattatatacaaggatattaagggggaataagtaataaactaagatcttaggaaacggaaatgcagttggtacatattagacaaatagaataaaaattaagggaccgttagtaggaatcacaatacacaaaatgcctcattcat

SEQ ID NO: 394054 - DNA, 360 bp, Homo sapiens
tggacagggcttcatgagtgtgcatcctgggaatgcatggatgaatggatggatgaaggatggatggatggataaataatggatggatagatgaatgaatgatggatgaatgaggtgggtagatgaatgaatgatggatgaatggatgatgggtggattgatgaatgaatgatggatgaatgggtgatgggtggactcacctggtctgacctgactggacttcctggactggactgactgggtgcgactggcctacctgacctgctggactgacaggctggactgactgggtgcactgtcccacctggactgcctgacctggactactgcggtggactgacacggaatggactgacttga

SEQ ID NO: 394055 - DNA, 219 bp, Homo sapiens
gtctcccctactgccctaccccagccacctctgccccaagatggaaagcactgcagacaggagtgtgatatgtaagatgctcaccagccatacagccaggcctgaccaaacagaaccgaaggtctgtgcacagtgctggccctgagcctctgagcaccagcccagctgcagccttgtgcttatttccaaaacaaaccagtagatctttgaggaccctgg

SEQ ID NO: 394056 - DNA, 228 bp, Homo sapiens
ctcctagaattggccagaagccaatatctggaggccaaaattgggtcactagggtgaccaactcatcacagggccctggattatctctgcaaaagcccacctgctactggttagccaggaccatcacagtgtgcccaggtaaccctgcgtttcaccccaaagcagaattttacaccagagcctggacaccagttgaattttctttaactcatttctgtcaatggttac

SEQ ID NO: 394057 - DNA, 330 bp, Homo sapiens
ggtgaagcctactgatgacaaatacacacataatatgtaacaaatacacacatactgtataacaaatacatgctatataactaatacatacatacatatatacatacatacatacatatttgagacaggatctcagtctgttgcccaggctggagtacagtggcgtgatcacagttcactgcagccttgaccttctgggctcaagcaatcctcctgcctcagcctcccgtgtagctgggaccattggcatgtgccaccatgctgtgctaattttttaaatttttgtagagacggtgtctcagtttgttgcccaggctggtcttgaacttc

SEQ ID NO: 394058 - DNA, 276 bp, Homo sapiens
ttaagtcctaactcagtgcctcaccataagtataattaaaggaatgtgtacatgggaggatatatttgaaactatttcaaatctatttcctcagcctgagtcttgcagcccagggggctcctccactgcagtagtcccatgctggggacaaaggtggatcctgttgaggcaagtcgctccccggctcccaacatcagttagacttttgtttgagtttccagcaaacaagcaggctgaaaagctatgctctgtctggagggaagattttctaaattc

SEQ ID NO: 394059 - DNA, 279 bp, Homo sapiens
tgtttctttctctgccctgtgggaagcactgtgacaaaatggaacacattagatttgaaggcggggggatcaaaccacgattttgaattgaaactcagctctctctatatgaccctggaaaacatcacatcacaccacagagcgccattttcctcaccgaaagtgaagtgagaatatcagctctgctctataacaacactactactaaaagctcatgcttattcttattgagctattctgtgccaagaatcagtctcttgtatagacaaaggctacaac

SEQ ID NO: 394060 - DNA, 320 bp, Homo sapiens
gaccgtaggcacatctgtgctatttcagcacaaacattgcctggaaggagagattcctgcctgtctcttctgtgctttcagaattgttatgtttcatccttagggcagtgtgagggcactgaagagatcctagtttatcttgcaaatatccccctccctgctgttctttcctaatgcctataaaagcccttaggagctttccttacatgaaaattaagactagttcacttgagtattttattacttatcttctcccttagttcacttgagtattttattacttatcttctccctctatgttcattgcagcctttttaatt

SEQ ID NO: 394061 - DNA, 346 bp, Homo sapiens
tctgctagttcacaagatgctacaggtgggatacgatgccatattcccattctaccctctactctctttccaccttttttgtttttgagacggagtttcactcttgtcacccaggtgacaatggtgcaatctcggctcactgcaacctccacctcccgggttcaagtgattctcctgcctcagcctcccaagtagctgggattacaggcactcgccaccatgctcagctaatttctgtattttagtagagatgaggtttcaccatgttggccaggctggtctcaaactcctggcttcaggtgatctatccacctcggcctcccaaagtgttgggattacaggcatg

SEQ ID NO: 394062 - DNA, 511 bp, Homo sapiens
tggtcatccacggaggacacctgggatgctgggtcccactcctgggacactgctatctctaatcagctgggcagctcctgacttcctctgcttttcaaggtattgccgagacctcctctgtggcttttttttggcagacatgaggatcagcccttgctacatttctaacgccctactgtttgccagcaacagctgccctgctgcatacctcccctcacacaggtgtggcccactctgcccccgtgttaatcctaatcatgtttcatttaaaaatccaggggtctagtttaattttcatcctcatcaatttcctggtagtatctgacattaccaatactccctccccctgaaactcatcattcctctaactggtcttcttagccttcaataaaaaactatttaccatgtagctgcggaatatctggccttgtgctgggagctgtatacaaaggtgagggaggggtggggaaggcctgggatcactaatgtggctctgatgtgaggcacgtca

SEQ ID NO: 394063 - DNA, 4265 bp, Homo sapiens
actcactgagccccaggcccaaggataatgatgtgttgtttcttggtagcataatttgtcacacgtacattttttcttcttcttctcttgcagaaagctctgctccctctctctctccctctctctttctctcttttctccctctcctacattttcttgctgttgctaattcatggtgatcaaatgatgtacgacaaaataaattgtaaagagtgactgcctggagttgggaaccagaaggtgttttccccctcccaaggagacagcaaacctttaaaaaggaaggacaattgatttttggggggagcttaagtgagccttgactttgcagctggttgagaacaggttggaggagggtttaaagccaggtgcaccgagtcagctcgccatgtccagatccggggacaggacctccaccttcgaccccagccacagcgacaacctgctgcacggcctcaacctgctgtggaggaagcagctgttttgcgacgtgaccctgacggcccagggccagcagttccattgccacaaggccgtgctggcctcctgctcgcagtacttccgatcgctcttctccagccacccccctctcgggggaggggtcggcggccaggacggcctgggggcccccaaggaccagcagcagccgccgcagcagcagccgtcacagcagcagcagccgccgccgcaggaggagcccgggactccttcttcctcccccgacgacaagctgctgaccagcccccgggccatcaacaacctggtgctgcagggctgctcgtccatcgggctgcgcctggtgctcgagtacctctacacggccaacgtgaccctgtccctggacacggtggaggaggtgctgtcggtcagcaagatcctgcacatcccccaggtcaccaagctctgcgtgcagttcctcaacgaccagatctcggtgcagaactacaagcaggtgtgcaagatcgccgcgctgcacggcctggaggagaccaagaagctggccaacaagtacctggtggaggatgtgctgctgctcaacttcgaggagatgcgcgccctgctggactcgctgccgccccccgtggagtcggagctggcgctcttccagatgtccgtgctgtggctggagcacgaccgcgagacccgcatgcagtatgcgcctgacctcatgaagcgcctccgcttcgccctcatcccggccccggagctggtggagcgggtccagtcagtggatttcatgcgaaccgacccggtctgccagaagctgctgctggacgccatgaactaccacctgatgcccttcaggcagcactgcaggcagagcctggccagcagaattcgctctaacaagaaaatgctgttattggttggagggctgcctcctggaccggaccggctccccagcaatttggttcagtattacgacgatgaaaagaagacatggaaaatactcacaattatgccatacaacagtgcccaccactgcgttgtggaggtggaaaacttcttgttcgtgttgggtggagaggaccagtggaatccgaatggaaaacacagtacaaattttgtcagccgatatgatcctcgatttaatagctggattcaacttccacccatgcaggaaagaagagccagtttctatgcatgtcggttggacaagcatttatacgtaattggtggaaggaatgaaactggctacttgtccagcgtggagtgctataacctagaaacgaatgaatggcgctatgtgtcctctttgccacagcctctggcggctcatgcgggagcagtgcacaatgggaaaatatacatttcagggggtgtacacaatggagaatatgtcccatggctatattgctatgacccagtaatggatgtctgggctcgaaaacaagatatgaacacaaaacgtgcaattcacactttggctgtaatgaatgatcgcttgtatgcaattggaggaaatcatttgaaaggtttctcccaccttgatgtaatgcttgtggaatgctatgacccaaaaggtgaccagtggaatatactccaaactcccattttggagggtcgaagtggccctggctgtgcagtgcttgatgacagcatttaccttgtgggaggctacagctggagtatgggggcctacaagtcatctacaatatgctattgtccagagaaaggaacctggacagaactcgaaggagatgtagcagaaccgttggcaggccctgcctgtgtgacagttattctgccctcttgtgtaccatacaacaaataacaccaggaaactctggaatgaacagtatcacattctaggaagcaatggcaggtgacatcactattataataggaacaatgcattctaatggtacaactgccaaaacccacccttggtttctgatgatttataagtaactacaaaagaaagagacctgttcttgaacagatactatgtctataactcagatcgcaccaaacttcctgtggtgacagactcttccatttcagactggttttaacttatcccagctttacaaaaactcttcatgtgaatcttaacttgcaaaaggagaaagataaaatacagaagactggccccagagagacctcagatcagtattgtgcattgtagtctacctgcatgtgatctatgttgacatttcggggatattgtgttcaagaatgattccaaatttgagccaccaaaatacactgcattacagaaattgccacttgattctgtactcttaacctttggctacttcacagactccattggcaacactgttattgaaaatcatgtaagattaaagagaggcattttcgtttctatacaacttcatttcatacaccttctgcccttacagcacctcatgggatcagaaaagagaaagatgttggctcttgtaataaatgctttctaccctataggttctaggctagacagagtcgtcatttctgtgtcctcaattttatctgaaagattaaaacaaaatatattatgtcactattcagttcatggaggtttgtgctttttcatattttgtgatatataagtagtgaacacacatgttatttacttcaaaagacaggattgacaaattcagtcaatactattttagagattctgttagatgatatgtctgacccaaatttaatccataataaaaaaaaatgggagattgttttcaggaattcagggatgaaaagaaagaataatttccattaagtagaattccagttgtctttctgtttctaaaacacagaacttacaagagccacaggagccaattatagcacctgacagaatacttctcctcttcctcaccttcgggtgcctctagacacttgacttacgatcgttattcccccaattcatcatattttgtttgttatcaccagagatgcctgaactcagttaagcgagcaattgctagttgtcttgaggagcatgaggaattcaggagcagaaggtcaggatagcatgagatagtctcaatgtggccaaccaaaaggacaaaactgacaggaatgcacattcgattttcaagccctccagagcttgaacaacaactttaggagtaaataaaagcctaaaatatattttaaccatccagagatggtgttgaatccttcaacaaatgtgtcattcaaaacagtaattagggaaatcccacagatgaaaaatgccttagtgataagctttcatggcagagcacgtcaagataaatgggtatactggaatccgatgccgtttctacagtaaagtgcaatcttcgttgtttttgtatttatttgtatgttcagatccaaaggatccgttgtaaaaatatatatatataaatatatgtatatccagtgcaatcaactgtcatttctttttccttaaaacatatgagtatatagaaagaaaagttacagtactctgtgggaaaatctcagctgacatcatgaatagaatgaggtctgcttcagaaccttttgttgtcaactgtcactgtttcttccaaaagtcacaatttgtacaagaacctttgctttccttagacttgttctgcattttattttttatttctcaccaaaataaaagcatttatgagaattataagtaaagctttctgtatttcagagagacataagttactagaaagtgaaaagtgaataaataagtcacagagaatgtaaattttgtacagtattagaatgtgtaaatgaagcttgcttggaaggggaaaactttaaataaaaactttatgtactaaaaaaaa

SEQ ID NO: 394064 - DNA, 2163 bp, Homo sapiens
  misc_feature (2141)..(2141): n is a, c, g, or t
actcactgagccccaggcccaaggataatgatgtgttgtttcttggtagcataatttgtcacacgtacattttttcttcttcttctcttgcagaaagctctgctccctctctctctccctctctctttctctcttttctccctctcctacattttcttgctgttgctaattcatggtgatcaaatgatgtacgacaaaataaattgtaaagagtgactgcctggagttgggaaccagaaggtgttttccccctcccaaggagacagcaaacctttaaaaaggaaggacaattgatttttggggggagcttaagtgagccttgactttgcagctggttgagaacaggttggaggagggtttaaagccaggtgcaccgagtcagctcgccatgtccagatccggggacaggacctccaccttcgaccccagccacagcgacaacctgctgcacggcctcaacctgctgtggaggaagcagctgttttgcgacgtgaccctgacggcccagggccagcagttccattgccacaaggccgtgctggcctcctgctcgcagtacttccgatcgctcttctccagccacccccctctcgggggaggggtcggcggccaggacggcctgggggcccccaaggaccagcagcagccgccgcagcagcagccgtcacagcagcagcagccgccgccgcaggaggagcccgggactccttcttcctcccccgacgacaagctgctgaccagcccccgggccatcaacaacctggtgctgcagggctgctcgtccatcgggctgcgcctggtgctcgagtacctctacacggccaacgtgaccctgtccctggacacggtggaggaggtgctgtcggtcagcaagatcctgcacatcccccaggtcaccaagctctgcgtgcagttcctcaacgaccagatctcggtgcagaactacaagcaggtgtgcaagatcgccgcgctgcacggcctggaggagaccaagaagctggccaacaagtacctggtggaggatgtgctgctgctcaacttcgaggagatgcgcgccctgctggactcgctgccgccccccgtggagtcggagctggcgctcttccagatgtccgtgctgtggctggagcacgaccgcgagacccgcatgcagtatgcgcctgacctcatgaagcgcctccgcttcgccctcatcccggccccggagctggtggagcgggtccagtcagtggatttcatgcgaaccgacccggtctgccagaagctgctgctggacgccatgaactaccacctgatgcccttcaggcagcactgcaggcagagcctggccagcagaattcgctctaacaagaaaatgctgttattggttggagggctgcctcctggaccggaccggctccccagcaatttggttcagtattacgacgatgaaaagaagacatggaaaatactcacaattatgccatacaacagtgcccaccactgcgttgtggaggtggaaaacttcttgttcgtgttgggtggagaggaccagtggaatccgaatggaaaacacagtacaaattttgtcagccgatatgatcctcgatttaatagctggattcaacttccacccatgcaggaaagaagagccagtttctatgcatgtcggttggacaagcatttatacgtaattggtggaaggaatgaaactggctacttgtccagcgtggagtgctataacctagaaacgaatgaatggcgctatgtgtcctctttgccacagcctctggcggctcatgcgggagcagtgcacaatgggaaaatatacatttcagggggtgtacacaatggagaatatgtcccatggctatattgctatgacccagtaatggatgtctgggctcgaaaacaagatatgaacacaaaacgtgcaattcacactttggctgtaatgaatgatcgcttgtatgcaattggaggaaatcatttgaaaggtttctcccaccttgatgtaatgcttgtggaatgctatgacccaaaaggtgaccagtggaatatactccaaactcccattttggagggtcgaagtggccctggctgtgcagtgcttgatgacagcatttacctttttttattctacatctttattattttttccnacaattcatctacaatattcta

SEQ ID NO: 394065 - DNA, 223 bp, Homo sapiens
gtgtgactgaggggtgtgtgtatgagtgtgactgaggggtgtgaatgagtgtgactgaggggtgtgaatgagtggctgaggggtgtgtgaatgagtgtggctgaggggtgtgaatgagtgtgactgaagtgcgtgtgaatgtgtgtgacgggggaccacagagggactcggtccttgtgtggctcttcctttacctccatgtctggaagaaattaggacttcg

SEQ ID NO: 394066 - DNA, 721 bp, Homo sapiens
cattgattatttcttctgtgagagtaatgatgattggatttggttaggactgtgggggtgaagcttccttgacttttcatttctgttcacagtacatacagatctgtaaaatttccatggaaatgttcatcaaagcatttgaagcccatgtcctattcgtgcatttgtgtaccctctgtaccacacacctcccaagttttaacaaataatataagtgaaattctcacagagaatcatgctgatttgtagaagttattgcgttactaggatcaccgaagtctgagcatagacatttaggtgaggagagaccctagttaaataccagccctgactaagtaggagctggatgaagcgggaaaggaacttgtctgcgttttctcttggtttttatggggattacacactatctttcctgaagcattcttaaccattgtgaggggctggttaattttaattattagcaaatctaaacacaatttaaaatatcatcaaccaagaaaacccacaaaacagactgaactgttctgtgggttttcctgcttttacttatttattttcaaaacagggtcttgctctgttacccaggctggaatgcagtggtgctagctagcatagctcactgcagcctcgacctcccaggttcgagtgatcctcccatctcagcctccagagtacctgggaccacaggcgtgtgccaccacacccagctaatttttttttt

SEQ ID NO: 394067 - DNA, 191 bp, Homo sapiens
gctggaattggagaggtcctgggaggtaggtgtatgagcacagacctgctcccacatgcagaggatcaacagaccaaggctttttatttgctacctatagaaatatcagtatcttccccagggatttcttggttcaccttcctgaagcagcatcatgattactttctacccgccagctgggcagaacagtt

SEQ ID NO: 394068 - DNA, 526 bp, Homo sapiens
ggcagacgagggtcatctgaagtcggtttaactgagtcattgagtcaggtttctgcccattagtttatctcatttttaaatgagaaataggtgattataataatgcctacctctaagcttattaaaaggattaagttattttatgaatatcaagtactgagtgtaaagccctatatgttttttgtttgtttgttttagttgatattgaccacactaactttatttttgtatctcatgctgtgctctaaggagcacttattagaaagtctgtgctgaaagatatggagatgagtctgattccatacttcttgaaactttttaggaatcatacataccagactgattatgtcaaaagaaaaaatagtagaatgggagtattcagggaacatcctgtctggtaggacctggaaggggtatatttgattgaaagatgattattgaaactgggattttgatgatttaggaaggaaaatgggtataaggtagaaatgtcttttatttatgtattttcccctggtatactatc

SEQ ID NO: 394069 - DNA, 668 bp, Homo sapiens
gagctcggcacccattcatttgcaggagggattactggtgtcagccactgcgccaggcctgtttttttctttagatggtcattggtagctcatgaatatttggctgtagtgccaagtgaatacaggtgttttggatgtggtttgtgtctgtatagttacatcatttctttctctggattgggctctttggatgttacacattataagagtatagacatcgaatcatttggagatctgttttggtcacatagtctgtttgttacctttatattgtagccctcagaatgctgaaagcaaagcaaagttgcatgtctaggcaacctaggccctggaaatgaaggcaggtgttcctggcctctggtgtgtcttcataatgttaggggtggtagagaatggagctagaaagaatctactctttactatgtcttactcttcagggttcattccagcccttgaagtcggtaactaagtcctaaaatgttgggattgtgcaaggaaggcaggggcctggattggtacatgatacctcactgggacctcctcccaaacgcagtggttacatacagccagaactcagcagcaccggcatttatgagaggtgtaagaatgtgaggataaaggattgtttgatctgattcttcagaggaattacttgtcgtttggagatt

SEQ ID NO: 394070 - DNA, 594 bp, Homo sapiens
tgaagtaataccctggtaagaatctaaatgaaggagagaagttaaatggatttctcaatcttgagaagttctctctgatgcagagaatagggaattctatgacaaaggaggacaggcaattaaagagggtggggctggtggcagttctcattcccccatggacatctctgctaagtttttttgggggagaaggaaggatactaagagaaaggagaggtaaaaactcctacatcagctctcagtagccttaggagatctatccaatggtgaaaaaagaaaactggctctgcacaaagaatatgatttgtgacaaatgtgaaggcagaggtgttaagaagggagcaggatcctgctgtgccaactgctgaggtgcttgaatgcaaacagtaattcatcaataagacctggaatggttcagcaaattcaatctgtgtgcatggagtgccaagcccatggggaaaccatccgtcctaaagatagacgtgacagctgcaatggaaggaagacagttgcagagaaggagattctagaagtccatattgacaaaggcatgaaagatggccagaagataacattccgtggtgaaggatacca

SEQ ID NO: 394071 - DNA, 416 bp, Homo sapiens
ccagttgagcatttctaattggcaagtccaaaatgcttcagtgagcattttctttgagcatcatgcaagcactcaaaaagtcccagattttcgagcacttcggagtggggatgctcaccttgtatctgttctgccatatgagttattttaaagtgggcaccaaactgggttggacttttcaaaatttggtgattttgtagctgttaagccagctatgatttgagatttataatgatagtcattaaactcagataatattactttaacactagctcctggataattgcctgtatcatagtattatcacatggattctttccagtgagtaagtatatagaaagtagatgaagaaagcatactaaccatctagaaaagagtgtcattgtaacgttaatttgctgactcactttctaaag

SEQ ID NO: 394072 - DNA, 708 bp, Homo sapiens
atgtggaaatcgcggtgatgggaactggaaatgaaataggttctttttcgcagttgtttttctgcagaaaatcatcaactgtggagaagaagaagggaaataagaaagaaagaaaaccctaaaaaccaccctggcgcccgggcccgcaggcctcgggccggctctgaaaagtttgggctgtgcacgtgatgagcgcgtaggcgggagccccagacaggacccgggcgggcatttcgagaaaaagcagcggtgacagcctttggtccccatctccattgttcctgccagctctggaccccaggctgcatgagacgtaggtcccaggggacacccgaccccgtggccccagtcttaggtaaacttaggaatcagaacaacactcacccctatgccgcgcttgctccatttccccttgtctatttctgctcaccaagcatccagctgacattgcattcaaagcagcatttcagcttagaaatcgcttctagtccatcacggtgcttgccatgtgtctccaaggctttattaggtgtgtttttagttgtcctgataatcagttcaccccagggtgctgatggctgataatactggcgcttccctccctacccccatgcgttgcacagggagggtgagtcatgtggagatggatgcagccccctgggcagtgggggtgcaggtgctgtgcagggaggagtcttagggcgtttt

SEQ ID NO: 394073 - DNA, 338 bp, Homo sapiens
tttaatgtgtggcccaagataatttctccttccagtgtggcccacgaaagccaaaagattggacaaccctaggctactctttctagaaaagagaattctaccctttaaggaacttttaagagtagtttcttacttttcccccaagaattctggtcacatatatggttctctcctctgaagtgggactatgactaccagtttgaacaattaaaaatccaaaggggctgggtacagtggctcacgcctgtaatcccagaactttgggaggtcaaggggggaagatcatttgtgcccaagagctcgagacaagcctgggcacacattatgggatctctaca

SEQ ID NO: 394074 - DNA, 396 bp, Homo sapiens
tcctatcattccacccccatgttggtttcctcttttctccatctcagatgcatctcagggcatggactgcccccagcccccaaacatgcacctgagcaaatacagccttgctctgggaagcattactcctagaagagttccagaatttctggagcctaatgtcctggagttccagatttctggaacttgccccactggtgccctgaggctcctgccctactgcttcccagccttcctttctggcttgcactggtttgcttggaggagttatttggtttcctatgtctttctccatcctctcccagactcagctcagaatgcccacaggcttgggtcacatcaaacctgagagaccagcagactcaaatgtggtctctcaagtttgggagggccctg

SEQ ID NO: 394075 - DNA, 300 bp, Homo sapiens
catgaagccgtacagtgtgcagaggaaatagctagaatcgtcacactagagttctgcaggtcactacgtgggggtccttgagtcatccagagatgctgggcagagctgtggcctgagctagtggaaaagcttgattggttggggcagagaaatgtcccacagctctgctcagtgagttgcatctggggacaggggttcttaaggatctcactgtgagtgtggtagaagcaggcactatgctgaggaggccagataaggtggacatcactacctgggcacaccctgcccactctggccctt

SEQ ID NO: 394076 - DNA, 280 bp, Homo sapiens
taatttgggaagattctttttatttaagaaaaaaacttaaaattacataactaacacggtcattgaaaaaagttagaaaatacagataaggagaggaagaaagtcatcattacccataactcttatagctgaccactgttaacagtttgggatatataattctgtacagaattatatgccagatataaaacggattttttaatgagacgagattattctgagtctgctaatatattatgattttatttatatgctaatgaattccacaacaacatgatgc

SEQ ID NO: 394077 - DNA, 177 bp, Homo sapiens
gcttacccattatgtgacttgagttgattgaatactccaaaacaatccattagagtgactaataaacttgatttcctgaggtctattgatgatgtattttagcctatagttttgctaaagactattgggagcctggtctgattcaaatccttctgcaaacccatgacattcacatga

SEQ ID NO: 394078 - DNA, 383 bp, Homo sapiens
  misc_feature (14)..(15): n is a, c, g, or t
  misc_feature (18)..(18): n is a, c, g, or t
ggggaccttatgtnnganccactatgactaatagaagactggctaaataagttctggtgtatccttattataccagaactagtgtatgatacagctatttttaaaaagatgttacagaaatgtatccagtgataggaaacaagggtcagcaaactacagccctttggccaaattggctcaagacctgtttttatactaccagagctgtgagtgggttgttaaattttaaaggattattaaaaataaacgtgagacagagtatgtgactagtaaagcttaaaatatttactatctaaccctctatagaaaatgtttgctgacccctgatatagaatgttgtatacaatgtagattaaattggtaggggtgggtcagaacataag

SEQ ID NO: 394079 - DNA, 467 bp, Homo sapiens
atccagagcaaagggaaaggggaagacaagctccttttctttttaaggaaggtatttgtatcacttttccacacatccagtccccagaacctaggcagaagttggatggccatgtataatgtttagccggatgatcatgtgtccagctgagacttctgttactataggagaaatggagaactattggcatttgtttctgccactggatagtgtctggataaaaaacaaaaatagttataattgctatttttatgtcttaaagtttgtataatttatctcatttattatttctaacagtctggtagttcatgtgattttagagagtccagaattgaagcccagactctatttagcatttaagacagaatgatgtagtaaagggatattgagctttggagtcaaacactctttgatttaaatccggactactaattcaggatatactaatgtgtgaactgagacaaccc

SEQ ID NO: 394080 - DNA, 204 bp, Homo sapiens
acccaaaaagagataaagaagcccacagcctggttgaggcagggaagccatcagtactatcagcatccctccagccatggcccttcctaggtcacagagcctctagggtccccagctgccacactagctctacttaaggtcaacattgtacaagttcaggcccacctagggcataagccaacactgcctaactaaacctccctg

SEQ ID NO: 394081 - DNA, 123 bp, Homo sapiens
gactaaatttaatttttttgtgaggtggcaatgagtttttaaaaaggtgttggcaaattacaaaaaaaaaagcctgagttaagataaagaatagatttagaaaagatattttggaataactat

SEQ ID NO: 394082 - DNA, 575 bp, Homo sapiens
aggcctctacagttatcgggtaagatgtaggtaggtaggtaagacatgacaacacacatggctttgctttcaactaagggcttggttacctgtacagtttctggtgatagcatccattgagaatacacactttgttcagcattgtgctttggggttcaaggataaatttacagtatcatacatgtacttcaggccttcaaaccgcttggggaaatggaaagagcgcacatagcaatagcactaaatatatggcggaagataagccagtgctgaattttgtgggtcaggtgagaaaagttttaaaatgctgagggaggtttcaaaagcaagagagtgcaagagaatttgcagagtttgcagatttgatgggatttagaacagtagaaggagggggcatggatgaggaggtcagctctggaaggctgagtcaggatgaactaagcactaagaagagcctctatcttccccgaaactttaatcacagaactgaaatacaaagagaaataaaaaatcgtttagcccattttttttcttccttagtccaatgcccactgtcagtggagaaggaaagatgc

SEQ ID NO: 394083 - DNA, 566 bp, Homo sapiens
ctgatacaagactcaaattacagagtgactgacataaaaagagaggcaaattgacatcatggaaagatactaactttggagtctgtcatattcactttcaaatctgtgaaaggaaaataccttgggcccccaaaatcactcaggaaaactcaagctggaaactgcttagggcaaacttgcctcccattctattcaaagtcactcttctgctcaataagatagatgcatatctgatttgcttcctttggaaaggctactcagaaactcaaaagtatgtaaccctttgtgtttcacctatttgtgacctgaaagctccctccccacttcctgtcttcttgcttttgcttcatgttgtcccacctttccagactgaaccactgtacttcttacatacattgattgatatctcatgtctccctaaaatgtatgaaaccacactgtgccctgaccacctttggcacatgttgtcaggacctcctgaggctgtgtcatgggcgtgtcctcggccttggcaaaataaacttcctaaattaccggaaaaaaaataaatcggctccgtggcctca

SEQ ID NO: 394084 - DNA, 715 bp, Homo sapiens
cagtgagattaatactaatctgtcaagatgacccagtgaacagttggctatcaaagtattataagaaggtttttaaaaggaaagtgtctattttgtaaagatcttgagtaaattatgcttttaagtatgttttgatattcccccccctcctcccaaagtgtagcatgcctgagcgctgtcatgtttaggaggtgatgggttggggttagagggtgattgactgttagcgaagtgggttgggatgaacaagtgcacttgagtacgcgctgcacagtgtaggcatcaggccacgtcagtgtgtctctgcatttgggcagatgccaggcctattgcaggcagcataacatctaggaacgggtttatggatgaacctgggtaactctgggagcacaaacccagaccacacccatcgggagagattgacctgagtgatgcgctaacgcatatcattgagatggggccagatatcttgcttagatgaataattggagttcatgtcaaccatctgtcctttcccataatttaaagccaacttctatattttccaggttcatactttttttttcattaattgcatgtaaagttgcggtgaacaccttctttcttgacttcctgtttaaaaaaattacagttcttaaaattataagcttattcaggatggagtggtcagtttgtagaaaaactagctctttagatcttttaaaagcactacatt

SEQ ID NO: 394085 - DNA, 697 bp, Homo sapiens
gcagtctgttctagaaagattcccatggctaaaatatagacagtttggatccttaccagaatattatacacagaaaagttccccttttacagaccctgttgccaggggagtagatggcagctttttctcccctcctacctctacagcacagacagtgtccttccctttcaaacactccctgatggggatgctctgtcctctctgtggaccaggcctagtaggttcacagatctcttacaaactgctcaggggaaggaaagttgagggaaatcatccgtgtagattttttttttcttcatgtgcatccattcaacctattaaattgctttttattttctcttaaaagttgattttattttctgattttagttattgtgaaaaagggcagccagcgcagtagctcacgcctgtaatcccagcactttgggaggccgagacgagtggatcacctgaggtcaggagttggagaccagcctggccaacattatgaaaccctgtctctactaaaaatacagaaattagctgggcgtgatggcaggcgcctgaaatcccagctactcaggaggctgagacaggagaattgcttgaacgtgggaggcggaggttgcagtgagccaagatcgtgccactgtactccagcctgggagacagagcgagactctgtctcaaaaaaaaaaaaagaaagaaagaaagaaaa

SEQ ID NO: 394086 - DNA, 198 bp, Homo sapiens
ctgttaagaagttcaatagcattatgtctagaaaaaaaagtacataccttaattttaaaatcctgctaaaaatgttgtgatcatttgaggactcagcaagttggaacctttctgttgtgtagggccttgccttgatgttgatgggctgctgcctggggtggtttactactaggtgctattgaaacttctaaaactagg

SEQ ID NO: 394087 - DNA, 843 bp, Homo sapiens
gctctttttccagctggaaccatggagtgtgtagaagaagaagaaggaggttcctgctgtgccagaaacccttaagaaaaagcgaaggaatttcgcagagctgaagatcaagcgcctgagaaagaagtttgcccaaaagatgcttcgaaaggcaaggaggaagcttatctatgaaaaagcaaagcactatcacaaggaatataggcagatgtacagaactgaaattcgaatggcgaggatggcaagaaaagctggcaacttctatgtacctgcagaacccaaattggcgtttgtcatcagaatcagaggtatcaatggagtgagcccaaaggttcgaaaggtgttgcagcttcttcgccttcgtcaaatcttcaatggaacctttgtgaagctcaacaaggcttcgattaacatgctgaggattgtagagccatatattgcatgggggtaccccaatctgaagtcagtaaatgaactaatctacaagcgtggttatggcaaaatcaataagaagcgaattgctttgacagataacgctttgattgctcgatctcttggtaaatacggcatcatctgcatggaggatttgattcatgagatctatactgttggaaaaggcttcaaagaggcaaataacttcctgtggcccttcaaattgtcttctccacgaggtggaatgaagaaaaagaccacccatttgtagaaggtggagatgctggcaacagggaggaccagatcaacaggcttattagaagaatgaactaaggtgtctaccatgattatttttctaagctggtcgggtaataaacagtacctgctctcaaaaaaaaaaaaaaaaaaaaa

SEQ ID NO: 394088 - DNA, 583 bp, Homo sapiens
ctccagcacagacaccagagtggtgtcaaaaaaaaaaaaaatatagaagatgcgatgcatatagatatacaactattttttcacactacagactagactatataactatttcttaaacttacaaaaacagcaacctatattcagtgtgcacattaacacactctgtgccttgtttttttcttatggcaagtatgttggctattgtttttctgtcttggtggctttgaggccatgtactgtgattttgcatagcatgttaaggtttagcagttgatggttaatttatttgtgtatgatgtgtgtctgcaatatggaaattaaaagctgactgtaacaataaattatgaaaatgaaaaagtaggcaataaaataggcatgtgctttgcaagttctatagcattatattgtatttcttgtaaaactgcactaccttgaggttgctttctagaagtaatgttattgtttagtatcagcattcactttttttagaatcacattgatagatatgatgtaaatatttgcacaggtgaaattaaaatacacagtaaagaggatagttcgaaatcttaagagagggatatat

SEQ ID NO: 394089 - DNA, 472 bp, Homo sapiens
tctggggactctgagtaaatggccacccaggccaatcgcttttccttattttggttttgaaattcttttaaactttggggtgatgtcaacattggtaaactgtgtataagtggcttggcaggtcccaagaaacaactgcagctcaagcaacatattagaacaggtttcctgggtctgttttgatatcagtgaaagaaacccttaatacagtgacatttacattaagactgtgctgagcaaggatctgcctttttaaaaaaaaaaacttctatgggcaagagggatgtgatttgcttgcttttcttgctgaactttaagccttaagggcactatacaacattggatgcatgacttttaaaatcaaccaatgagtagttacttaggaccccccagaggcccaacactgggctgtccagataccaacacagatgaaaccacagcacatagcacaaagcacaaagtacaatatgat

SEQ ID NO: 394090 - DNA, 225 bp, Homo sapiens
ccttccaagtgtatttctagcttgtctattcccaccacctatccccaaaatggtaagcactggtttccaaaatacctccttacccctacttgaaccaagactacattcacaacaaatataacacaattagtcatagcaaaaaatattatatactgataacattagcatattacaaattcagaaaatggaaaaatgataagtgtgtttattctgctaaattatata

SEQ ID NO: 394091 - DNA, 271 bp, Homo sapiens
accataacagatgggaggttatgacgtagttgtcacctctggttgacatgtaatgaaccaggacctgcaggcaggtgagaggttgcagcagggctgtgaagggaagcttccctgaagctgatcgacaaacactggagtaaccctgaagtagccggtaggtttcgccttgtggttatagtggctgtctggatgaagtggctgcaactgtgtcatgatagttagtaatgtctgctgtggacagaaatgagaatgatggctcaactggcatgta

SEQ ID NO: 394092 - DNA, 967 bp, Homo sapiens
cgaaactcggtctcaaaaaataaaaaaataaagaaaacatttttcatggacccatctccccgcaagatgttaacctgaatcatttttatcatatcacttaggtaaaacataaaactgggtatatatataaaaaaaaaaccacttctttttgcttttgttcttatacctaaccttaaaatcaaactgtttccaaagtagataaatgtaaaaaccgtgacattccacctgactgtgttaactgaaaatggtgggtggtgctttgctgactgcactgcaggatgtggtgtggcaaaggcacagactcagcagagtagatctggatggtcttaggccccgatgctcctactggtgatgaaaatggaaacccaaagccaaacatccttctagagaactggcgaacccctcaaggtgacacatccacaggtcccacctggagaaatgtaaatgtaaggaaaggaaactgggcatcccctggagggaggggacccgtggtggccacctgctctagagtcatgccgagagttaagagcagtggggaccacccagccctccttgatggaaactgaccatgaatcccatgtcagccccagctgcacacctgtctggtaactcctcccagttagttcattgccctcagctcatttggtcaattaccagctcctgtacaaataccccttaaatatttcagggttttggcttctttcctaccctcatctaaaccatcattatctgatcacaatcatttatcactccccaacttaaaacccttcaggccaggcatggtggttcgtgcctgtaattccagcactttgggaggctgaggcaggcagttcgcttgaggccaggccaggtgttttgaggccagcctggttaacatggttaacttcttcaatactaaaaatacaaaaatagccgggcatggtggtacatgcctgtaacccctgctactcaggaggctaaggtacaa

SEQ ID NO: 394093 - DNA, 345 bp, Homo sapiens
tctgctagagatttcttgcagatgatcacgagacagaatattgagttctgctagcagtgtgagaacttaactgatagagtaaacattaacttatgctgttaaaattaaactagaagaccccaaattaattagacataggggtggcattgcttttcagggacaattaataattctgttcttatttctcttttgccatttttcatgatgatcgttttctaaattcccttcattaaaaagatttcacattgattacatatcccccaaagtaacttgttttaagagaagcaaaattacacgatctgaaagaaactatgctatttcaaaagtttatacatgatcacatgg

SEQ ID NO: 394094 - DNA, 416 bp, Homo sapiens
atggtagattccaagcagatgccctgcaaggccagcttaaaaggacgcgaaattcatgtagactcagttgcacgacttgcacacattatcaaacatctaaagtccttataaagagatcatctctaacagtgatttgatatgactttaagtcactttccacataattaacaggtagaaatcagttttctcatagataatattaaatagcagatgaaagataaaatctcccaattaatatatcagtcatgatgctttagatggcaataaccgaaaaccccaactcaagtacgacgagaaagtgaattcacatattatctggtatcctagaacagattagtatttggcatgctaagctccaggtgcgcaagatctaaatgactcaatgatgcatttatggactctggttccactttcag

SEQ ID NO: 394095 - DNA, 567 bp, Homo sapiens
agaatcctgcccactcagaacccaagacccatgcctggggctgcctctggccaggaagctctctctcctcagcccatccccagccttctcctcctggcccagctcccccttcccttgctgagtttctagcacctcttatgctgttcacacccagacaattccgaaaacactggatcccctgtgaatggtgtggaaatgcaacttccccacgtggagtcgctgggcatgttccccttcccttcccctcgaaccctgcacagagggggccattatgtcacacaaggccacttcacgagtaagggacaaaacagcccttttgaaactcaaaacaaagcttaagagccgcacctgagttactaaagcttccactcagcctcacccattcctagcaataagctgcagcagccggatctgctcccacctctgggtgacggctgggaacaccaggctgttacctttcatcaaaaacacaaagggacagcaagggacctcaggcatgtaatggcgccgaggagtagccataacatgttattacagaattagttctttcgaaactgcgtgccaact

SEQ ID NO: 394096 - DNA, 821 bp, Homo sapiens
ctgcaatatgccaggcactaatcatcagtgaacaaagcaaatcttgccctcaaggaacttctgtgtattgggccttctttcttttttattgagacaaatattccattttatggatatgctacactgtccatccaacagctgatggatacttgaattgtttccagtttaggactattataaataatggagctataaatgttcatgtgtaagtcatggtgtggacatatatttcatatctcttgagcacatgcctaggagtagaattactgggttatctgaaaagcatgtctttactttttaagacattgcctgttttccaaatttaccatttaggtataccattttacattcctaccaacagtgtattccaatttctccacattttcaccaacacttgttattgtcaggttttttactgcagccatcctaggtgtgtagttatatcacttgcattttcctaattactaatgctattgaacatttttccatattatggaatattacttggcaataaaaagggaacatgctacaacatgatgaatctcaaaaaaatgctaagtaaaagaaaaaccaaacccaaaagaccacatattatatgtttttatttctatggcaggtccagaaaaggcaaaattatagagatagaaagtaaatcattggctgcttggagctaggatgggagtgggaatgactgggcacacgggaactttttgaggtggtggaaatgttttaaaattgctttgtgatgatggctacacaactctatgtttactaaaaaatgaactatagggctgggtgtggtggctcacacctgtaatccc

SEQ ID NO: 394097 - DNA, 100 bp, Homo sapiens
gaactccatgatgactatcaggggtttaatggcgacctgaggttctgaccttctcaactaagtataaagaaagaaaatgcagaaggaaagaagttgaatt

SEQ ID NO: 394098 - DNA, 177 bp, Homo sapiens
tagcctgaggcccccgcatggcgggcatccccaccagacgttggcggacgagagccctgctgacgccagccccttcccccaccacacccaccacacttcccggtccgacgcaggactacctgttcccgggcagacacagagcacagagtgccgggtcccacgtcagcccctgacgca

SEQ ID NO: 394099 - DNA, 797 bp, Homo sapiens
atgtatgcaatgtgtaatgatctaagcagagtaattagcatactcatcacctcaaacatttattatttgtgttaataatattcaaaaatgttcttttctagctttttgaaaatacataataagtatatttaaccatattcatcctacattgctgaagaacaccagaactcattcctcctatctagctataatttcatattcattaaccaacctctccccatgctccccacccctttccatatgatccagcagtccttctactgggtatttatccaaggaaaaagaaatcagtatatcaaagagttgcctgcaccaccatgttcattgcaacactattcacaatagctaagatatagaaccaaactaaccgtgtatcaatagatgaatggataaagaaaatgtggcatatatacacaatggaatactattcagccataaaaaagaatggaatcatgtctttggcagcaaaatggatcagcctggaaataaaagtcaggcatggaaagataaataccacatgctttcaaagaagagcagagacagacagacaaatggccagagggagatagacaggcgaatataaagataggaatggacagaggtggataaaggcagggatagacagacagggaaggatagaccaagaaggagagacagagccagtcagatggaaaaacagaaaggcagaggcaaacatggatagataaaggtatagagatcaactggttaatatagagagatggaagcatacaaagagagatggacagacaaagagaagcagacaggtggaaaggaag

SEQ ID NO: 394100 - DNA, 338 bp, Homo sapiens
ctgggtttgaaaatcaacataaaattggaagttcaacagttttttttctttttaatggggaaatgtgtttggaggcaggcacagaaatgtttgctgactgtgtcatatgaaccactgtaagtgacaaaaaggtgtggtagtcttaggctgcattaacaaatgtacaatttccagatcacaggaaattaaagtctcactacactcaaaactggccacactatatctggagaactagatgagttctttattaacacactttaagaaggacattgataaatcagagcgcatcccataatgagaaaggggtccagttctggggaccatggtcaagaagttcc

SEQ ID NO: 394101 - DNA, 547 bp, Homo sapiens
ataattatcaaaatatgacacagagacacaagtttataggtgagcagatgctgttggaaaaatggcatacagaattgcttgacacaggattgccagaaattttcaatttgtaaaaaaatgctttatctatgaagcacaataaaacaaggtatgcctttatattcagaatcttttggcaatgagatattctggataatttttgtgtttgtggtaacttacagagtaatgctattacaaattcaagataatttgggtatgagtagtaatgagtacctcataggcagttggagtcacatgtatgagcagatattacactgaatgttaatgggaaacgttttggtcagtcagatctctttagattcaggaaaaatagaatgaatttataaatatataaggagtacatgctttgggaatactgaaattggtgaattggtaaaggaaatcagagaagaatatgttaatgaataggaagattgaatatttgaatgatgtcaagtggtccccagattgttctacattatcaattaaatcccatcaaattctagca

SEQ ID NO: 394102 - DNA, 371 bp, Homo sapiens
ccaagaccctcagcgcccgtcccaggccctaggaacctgccaggccagcatgagccagcctcggggcgtgctccgcagaagctctaaactggaccccgcagacccacagatcagaccctggcccccaaggggcaggcatgactcccagaagccttccctgcaggctggagtttggggacttccagcacagcacaacctaggtgccgtgagacatggaggcggctcaccgccctcccagggccggccggggtccaccggatacatcttcccacacggggtgaacaaggagcctcccctgtctcctgcagtggtgtcacctggtccccgtccctgtggtagccagcagtccagacagccagagcgggagggag

SEQ ID NO: 394103 - DNA, 527 bp, Homo sapiens
cagctactcgggaagctgagtcagaagaatcacttgaacccaggaggcggaggttgtggtgagccgagatcgcaccactgcactccagtctgggcgacagggtaagactctgtttcaaaaacaaattatctatctatctatctatctacacattaaaaataattcagtggtaccccaaaaagctaaaagaaatactttgataaaagaattctactcctaggtttatatccaaaagaactgaatacaggaacttgagcagataatgatatgccagtgttcactgaagcattattcacaacagccaaaaggtgtatgacccaagtgtatatcaacagatgaatggattaaacagccagaaaagaaagtcttgatacttgttacaatacagttgaaagctgaaagcatcatgctaagtgaaataaggcagacatgaaaggccaaatgttgtcacactactgacatgaaatattcacaacagtcaaaactcacagagacaaactagataaggggttaccataggctggcag

SEQ ID NO: 394104 - DNA, 195 bp, Homo sapiens
aaaatcaggctgtattgagagggaagtaagtgggaagtgaaaagtgtgtcaaggctgagacaagcagaagttcagctcctttgctgtcattgctgtggctgtatctcctcttcttgcccagtcttttcactacaggctgtgctatatgcgcacacatgcacgtagcattagaaaacctgaaaaaggggtgactgt

SEQ ID NO: 394105 - DNA, 385 bp, Homo sapiens
  misc_feature (6)..(6): n is a, c, g, or t
agaggnatttagaatgattgcctttgatttttttatttaaattcaagatccaatcagggctctcacattgcatttgattatcctttctccttattttcctttaatctagagtatttttcttgtctttttgttcacaaaagagaaaaagcaagagaagtttagaccagtctaggctggcctacagtctggatttcttttttttaattgcttcctcattactagattcaacttacatattttagggcaagattactatataggtaataatgtgttcttccttttatatcacatcgggagacacataatgtcagtttgtcccattattggtgatgctgactgatcacttggctagaatggtacctaccagatttcttcattataatgg

SEQ ID NO: 394106 - DNA, 699 bp, Homo sapiens
cttagatcgagctctgtacccaatggtctgtcggttggatgcagtggctcatggcgtaatcccagcactctgggaggctgaggcaggcggatcatttgaggccgaacgaaaggctgaggcaggcaggagaatggcatgaacccggaaggcggaacttgcggtgagctgagatcgcgccactgcactccagcctgggcaacaaagcaagactctgtctcagaaaaaaaagtaggaatgggtttgttcatggaactgtttgctctgggaatccattttggctaaatattagatgcgagtgggggaataataggaaatatagctgtgaacataatttgaatctagggcagaagggtctttaaaagttcatctaaagaatttggacataattctgcagagaattttccaaaagagtgttgttatttgagctacatgtttaggaacgtgaatgaagaatggcgtgttactagaaagactggaggtggcaggaatctatttgaaggccattaaatagttcataggtaaggtaattagaccttgggttatgcctactcatcctttaaaatttaccttaagcttttcctgccacaccttttccttgcccaggttaggtgaaatcttcctccttgatgttttcatactattatgtgcctagtggtatcactgtacttatcctccattgtgttctttttgtgtatcttt

SEQ ID NO: 394107 - DNA, 284 bp, Homo sapiens
catccatccatccatccactcatccaaccatttacacaccaacccatccactggcccactgatccatccaaccatttactcaccaacccgtctaccagcccactcatccatccatccactcatccaaccatttacccaccagcccatccaccagcccacccatccatccatccatccatccactcatccaaccatttacccaccaacccatctaccagcccactcatccatccatccatccacttatccaaccatttacccaccaacccatctaccagcccact

SEQ ID NO: 394108 - DNA, 756 bp, Homo sapiens
caccacatatattattgcattacatatatcattgcatacagtcaagtagaaaattctagaattctggatctcagatttttttccaattatataatgagattaatgaataggaagaaagtgtctattactgcttttctttttagcgtcatcttaaacttttctaaaattatcattaattattgtttatcctttcactgaccattgccctaaatatagtatctgtcacttacatgtatttcaaaatattgtttttggttattctgtaatgctgatttaaagagatgcaaattattttccataaagtacctctgtattctcctttttggagctttcttatatctgttgcctgttaaatgtctggccacttgtggcactttccttctctatctttctcaatgtaatattaaattaccatagcaattataaaatcatgcagaataataaatgtgtggtacaaagtcattgatacaaatactagaaaagaaaatgaggtttaggcctaaaggcattatgtgatgtaaataaggaatactagttacaataacaaatgtatcatcatataccatattgtcatcatagccattattatcaccatacatcttttaaatgcaaacagaagaaaggatgaatttgttaatgcagtggaacacaaaattgttttattatttggatatattaatgatttggcaagaaaaaataaatttgacatttctattgattacatagctgttaaaaatgagagtcatgaatagggaa

SEQ ID NO: 394109 - DNA, 347 bp, Homo sapiens
gctgcattctcctctccaggaagtacatttgtgggctgctaagccacaagataaggaagaacacaagacagctagagaaggccacgagctggacccaatacccacatattcaggagtaaacactggtgctgtgaaagggtcagtgcctccataaacgtctccacagacatagagctctgagcggacacggaccactacacacaacagagctacacacaacagagcttgacaagccacagagctccacaaaccgcagagctctctacagacacagacatctcctcaccacagagctttccaaaccaaagagctctccacatacacagagctctccacaccacagatct

SEQ ID NO: 394110 - DNA, 130 bp, Homo sapiens
gttacaaagttactcctcaggccgaagtaaacgttcaagttaatcagaatgagggcagcctcaggaacagccaaaaataccctgctggcagctgtcttctctttgcagctaccaaggtttttacctactg

SEQ ID NO: 394111 - DNA, 404 bp, Homo sapiens
ggctgaggcaggcggatcagctgagtcaggagttcgagaccagccatggccaacatggtgaaaccctgtctctactaaaaatacaaaaattagctgggcatggtagtgcaagcctgtaatcccagctactcgggaggctgaggcaggagaattgcttgaacctgggaggcggaggttgcagtgagctgagatcacaccattggactccagtgtgggcaacaagagtgaaactccatctcaagagaagagaagagaagagaagagaaaagagaagagaaagaaaaagaagaacaaagttggagaactcagctttctctattttaaaactaattacaaagcaatagttatcaagacagtgtggtcctggcataaggatcaatggatccttgacatattgatgaatg

SEQ ID NO: 394112 - DNA, 224 bp, Homo sapiens
agaattcaaagttagatgtgaaattattatatcaagaaagactgagaagtaactcaagaatgccaccatcttctgaaaactgtgagattactcatatcacagatatcgtaaaacatgaagttatttaagttagaaagtagcttatatgcaaagtaagccagcaattcaattagaaagttaattttttacctctagacaagaaaagtttcttgtttcagatgatg

SEQ ID NO: 394113 - DNA, 280 bp, Homo sapiens
ccaatctacagctttctaaagggagtcacttgagaaaatgtcttaaggcaaaaaaaaaaaaaaaaaaaaaaaatcccatgggaggaataaatgtatgtgtcttctataaaaaaagtttccatcgttgttactttgtggtcaccttgacaagaacagtaaccacaagcattcatttcattctttacataattttattaacttcaggcatgatgtatataagctgcaactatctatttaagcagatctccaaaaataaaaaataacacatataccctttcac

SEQ ID NO: 394114 - DNA, 452 bp, Homo sapiens
aagacagtgactttggaatcagccagattcagctaaactctatgttttgctgaaaggtagctgtgtggtcttgggcaaataagttaacctctctgagccacggttgcttttctgtaaaaaggagggtcagactgtctgtgtcaggttgttctgaggattaaaagagatgacataggtggagagacacctcaatgtgcagtgcttgtcggttatctgttagataatacagatagtatcgtagatattagctaataccaatgagatctgtttgctaggatgttcttcaaatgcgactggagatctgtttgctaggatgttcttcaaatgcatattctgattcggttgctctagagctgggcctgagatgctgcatctttaacaaacccccagatgatgccgatgctgctggccccagaccacactctgaatagtgagatgtgacattgaccttg

SEQ ID NO: 394115 - DNA, 306 bp, Homo sapiens
aggaaatctacaaaaatatttgtggatttagaaacactaaagggaagagaaaattgttctgtagttcacgttcctgacatttcagaagctcatgatcccaggctctcaggttacaaaaagatttttttcttctaaacatgttcccttaaggtgtcaatggttgataatgcgcccaataaacattaatgcatcaaacaagtacaaaccctttttgacacaggaacagagctgaaactgtgggaccttaagcattagcaggcatgggtgtgttttggagagggaaaagtcctcctgagatcacatggg

SEQ ID NO: 394116 - DNA, 490 bp, Homo sapiens
aacccagctgagtggagctcgattgacaggcaagtgtttggtgtccccctggcttgtagaagggccgatgttagctcctgagaccaccatgtgtctactgcgaaaggacagctggacacctgcaagcctcctacagataggggaaggagggaatggggagaaggggaaaatcagtaaaatacgaccttttccagcacctgggagagaaggtgctcttgcaccaagagccagacactgctctcctgggggagggggccatctttcccggcttcatccctctccctggcctgggagggaggaggagacccccactgggccattccaggcaggtgctcagccagtgggcaccctggtcaagcaagcctgggtgctccaaggtgaaaggaaccttaaacccattggactaggaccccaaccttcttaccaccctcatccagggacccttgttttgaaaacttctatatattaaataaatggcaattaaaacaga

SEQ ID NO: 394117 - DNA, 621 bp, Homo sapiens
tgcttgtcaatcacttcctgctgtgcggcctggttcctaataggccactcaccagtactggtacccggcctgggggttggggacccctgatttagactataaatcagaagatgtcataatacaaataggtctatgtttttggtcccaagaacaaagttaacattctaaaatggaaacaattaaaaactgagcaaacaaaatgtaaattttccagcaggatgattttttgacaactggatacattacaaacgcatcccctcaagatatcccacctccaccccaagaggtagacactataatgacttctaattctgtaattaattttgcttatactaggagttcatataaatggaatcatgcagaacacactcccttgtgcctatgagattcactcatgttatcgagctattcggtagtagttccttataactataccttaattcctccattttcttttcgatggacattcgggttatttccagtttggaggtttcgtataataaaaatgctattaataagaatgttatgaatgtttttgttcaaattttgagaacttaagttatttttctgggtaaatacaaggaagtgctgggtcacagagtagttctgtagttaacttca

SEQ ID NO: 394118 - DNA, 369 bp, Homo sapiens
gatgatgcccggttacctggcatttcacaaagtaaagatgcagccagtattcatctactttaatctataatatcgtccctttgacatgctctagtcatgcacgtggtatctgaaacctctgctcttcctagaggaagtcctggtttgcaaagagttctatcaataatgcatcctgactgcaaagcagagacatttgagtctgcacttaaaagacttaaaaatgttgccagtttttctgcattttaatgtttactaaaggaaatgtgagaagtgaagatggactattgaaaatgcttgacgttcttcagttgttctttatgtttcaattttagcttgccgatgccattttttatggggctttaaaaatgc

SEQ ID NO: 394119 - DNA, 381 bp, Homo sapiens
ccccacgtcagggaagaagggggaatccagccttcctgtggatgagcccagagacccagcagcccagggtgacacagctgcctcatgtcccaatcgcagggccaaaaaataaaaacctcaaatccaccaaaaccgtggaccatcacatggcaaagcgccccagtctctgctaaacagaagaaagggagagcaatcatcagaattggtccccatcaaatccagtgatgctttttattgtctctagtgtgctctgttctggagagcaggcttccaaaatgccactgctttctgcaagagtggggcaggggaggggtggcgaaggctgggccaagtcccagcagcaagcatgggagcctatagacttgaatctggaggcaaagc

SEQ ID NO: 394120 - DNA, 421 bp, Homo sapiens
aaatggaatggagagtatagagttcccactgtacccccgtcctcacacgcaagtgcacagcctcccccaccatcaacatcccacgccacatgggtggtacatttgttacaattggtgagtctacgctggcacatcattgtcacccagggcccacagttcacatgagggttcactcctggtggtgtacagtctgtggatttggacagacatgtaaggacacgcattcaccatttttgtatcatacagaatagccgcttcactgccctgaaagtcctttgtgctctgccctttcatcaccccagcacattttatatgaagcatcactgccctggacagtgatttgaggggatcagtggtgtttggctcttttgggattggagaaggagaatttaagcaaggcaggtttggattagaaagggct

SEQ ID NO: 394121 - DNA, 349 bp, Homo sapiens
aagtagttttcatccatcagacttgcaaaaatgaaaattctgaaaaattaataaataaagtatttggaagaatacatagaaatgacccacacactgctggtgggagttctaattatttcagccaatacaagcgtaatctgatagaatctaactaaaatgcacataagctatgacctaacgatttgacttgtagacacacaaaccctaaagaatctctcatacatgctcaaggggacttccacaaggatgttcactatagcactgttaataacagcagaatattgaatacaacctaaaactgggtaataaatacatagaatattttttattcacagggtggaatactgta

SEQ ID NO: 394122 - DNA, 306 bp, Homo sapiens
aagctactctgtgtgcccctggattctgggccagggaagccctgtccatctagtgaggacgacaacaccactgccagctgcagatctaagcatggcttctcgctgtaaaggtagctaattcaatccagtgtaattggaaagatcgtgcctagattgacttgtgtacccttcagtggcagcaggggattgattcaaatgaccttggatgcgaatcagctctacaaaagtggcctcttgtagctggtttctgccccttcctggctattcaatgataaccagtcttccgtcttatctctttaccttgcc

SEQ ID NO: 394123 - DNA, 535 bp, Homo sapiens
caaatactgaaagacttgtaaatggctttggcaatatgtttgaattctaagaggaaatattttcccataattgtatatcagagaaatatagtgatatacaatttccttgaaaaccaatttctaaataattttcttctctgtaatctaagtgtaaaaaggtttagttttttaataggtttaggtgtttataagcaatagttctctattttctagttgatataagtagaagaattgacaagtgagatggaaatgttaatttataaagggaaagaaaagctaggtgaggttgagttataattaaactgttcaggaaacatcgtaaaggctttaggctccctttttcatttctataccaattaatctcatgggttctagagtggttagttctacgggaattgtttttgtttttgtttttaaagatgctgaaaactactctcaatcaaattagtaccatcatttaagctttgaatacttggcagtaattgcctgggctcgtcaataaatgttagcaaattcttgatgttcctcacttttg

SEQ ID NO: 394124 - DNA, 406 bp, Homo sapiens
ggaaagaactgcctatctccagcgttattgcaagcattaactggagcaaatggcctacagcatgcattcaatcaatgtctgtcagtattattaccagcaaggggccagaaggccccaaaaaatccagactcacttctcagatttcacactaatacatggagactgggcttataggacacaaaaatgactaaataagaggttaaaaaatgtctcctaatcatccagatgtttggtagatggagcacatataacattcctcaggtttctccccaccaatattttaccttcctcacctccttctggggatattataaatagctaagtgatactgtaaaatgttcacaggggtttctcccctaacacatatgtttacttaaaaatgtaaaacatctgtacagcacaacag

SEQ ID NO: 394125 - DNA, 233 bp, Homo sapiens
catgggtggtgatgggacaacgtcggattctggttacagagagggatgagatcgacatgtggggctaagtttgagggtgtgggttgggttcgaaactaaggctcaaatcaaagctggcagggaagagccgtgaacacaggtgacacagggactccccaagctcctgcttaggtttcccaaacctcagtggttctgactggtacacttcagaagaagtgggattctaggaggag

SEQ ID NO: 394126 - DNA, 731 bp, Homo sapiens
gagatgtaaccagagtgcttcagggaacaagacattgcatcattgcaaaaatgtagttttttatattagagcagattgagaacactggttcatcagggaagtggagaggcaggagaagggactgggaagtgatatgggaaggtactaaagataacatcttccacctttgggctattgcctaaagttacagtgcctagacaacattccttttaacttcagtggaaataaaactggcataaattaaaatcctctcgaataatatagcaagtacattttacttttcagattctgttatgatagctttttgtataatgttgccacagcagaattcagctgtcttgctaactttttcagtgtcttatttcctacttaaattgaattacctattcctgaatttcaaagccatttaaatgtagccttgtccctatctacataaattaatttccctctgtttccaacacacattcttttatagtcaaagcactcctttagcgacaaatatactgacgattttgtcggaatgtttttttccacatatttccttttctcgaagtgccactacctctccttacccaatgccaatccattcttcaaagaggtcttgtagtctttagtgataaatgtgaccttcattaagttccctttccgcccaacatttgatctttatctgtagctccccagacctctcttttaaattgcagaacctccatttgcagctctctatataggat

SEQ ID NO: 394127 - DNA, 784 bp, Homo sapiens
ccgatttctttttcctcctatgttcccagattctggaatggaaccccagcccttccaggtctgagagccactctttctttactctggatttctgtcacatcgggggcccctccctctgcggagttgcatgttgctgttcctgatgcacagactcctcccccgctgcttttctgcccactgggtcaggatctgccattctttacaagtttccttaacgtattgcgtcaaagcgagacaaccgagtcttactcaaacttgttttaaccggagatggagggttgctgctgtgtcaccgcctgcacagggctgccctcagggcaagctttcctggggcttactccaagggcatcggcttgccccgcactgtggtgggatgtaaagtgataacagctaaacgacgcatgcacaacatgtcctggtgccttctgcgtgaccccagagcagcaggttctgcacgtggcaggtaagagcacagctgccaagaccccaagcctagttctgctgctacaagctgctgcgtgacttaaggtgagttcatcttcgcctcagtttcctcctctgtcaaatgggatagtccttaccgtgtatggaatttaaagcactttgaacagtgagtgtgagccattactaactcaagtaataccccttcccaacccagaaccctataaggcagggacagtcagtccctctctctgctttagggggttgcaggataaagacaccgtcacaagaaatttaaacacagtaggtaaattttgagccacagcaaagcacagaggttgca

SEQ ID NO: 394128 - DNA, 348 bp, Homo sapiens
ccgatttctttttcctcctatgttcccagattctggaatggaaccccagcccttccaggtctgagagccactctttctttactctggatttctgtcacatcgggggcccctccctctgcggagttgcatgttgctgttcctgatgcacagactcctcccccgctgcttttctgcccactgggtcaggatctgccattctttacaagtttccttaacgtattgcgtcaaagcgagacaaccgagtcttactcaaacttgttttaaccggagatggagggttgctgctgtgtcaccgcctgcacagggctgccctcaggtgagtaccccgagtctgccaggctgggtgct

SEQ ID NO: 394129 - DNA, 234 bp, Homo sapiens
ggtatatagggggccagttcttagctgtttgggaggcagtgacttttagctgattgaacgaaaacctgagaaaatcacggagagtcaccttagttaagggaaaagtagatggaagtatctatttgctgccatgatagtatcaatacagaggtcacaataaggtcacagagatacttgcaagttagaactggcagagtctcattagtctactgtttcctgtttggataggatgtg

SEQ ID NO: 394130 - DNA, 586 bp, Homo sapiens
gctgggggtgttgcggaggtgtaggtctgcagtgagtgcccgcatgtctctgcaggcgggaccacatactggccattctggcgctgcgccgactgggccgccagcggaaccagcatctcttgcagcacaccgaagacctgctgagagctgcggccggggcggcgggtgcggaggcccctcggggccgcgtgctcttcgaggagatcaaggtgcccagtgccatggctgtgctgatcacctgcgtctagttctctctggctcgagggggggccggccgctggcagggagctgtggtcagtgggggtcagccaggagcccagggagtcactctgggccctgcccccaactctgacactgcagttagggaatttttgtcgtcagcagccaagcgcagctgtcaggccagaaggagcagccgtgcaggaggcatttcaggcatcgttgaggggagtgttttggggccgcagagctctcaatgctgcctatcgggcggggggggcctcccgcccgactgtccagcttcaccctccagtctgaaagtgaagagcagagtatttatttaaaaaataaatgtgaattaaaatgg

SEQ ID NO: 394131 - DNA, 2355 bp, Homo sapiens
  misc_feature (12)..(12): n is a, c, g, or t
  misc_feature (16)..(16): n is a, c, g, or t
  misc_feature (840)..(840): n is a, c, g, or t
gagcgcggaggnggangcccacccttctccccccgacgacggcgacttcctgcgcacgccgcgccgctggcgccagcactgggaggaggcggtgcggcgaagcgctcaggagcgcgtgcggcggccgggcgcggggtgggccttcggggaggcggagggcgcgtcgggtttggcccagcttctggccgagctgggtggcttggttcgccgcgacctgcagaaggtgcggcaggaggtgcagcccgcgtatgcggcggccggcttcccagcgtgggaggtctatctgcgtgccttccacagcgccgtggcccagcgcctccaggagctcgcgcgcgacgcccgcggctgcgagcagctctatatcctgctggactgggccgccaacgtctacggcagtcctgacttcctgggcgccccggggctggcgctgcccgccgagccgctgcctccgctcctggcgccggacgtgtgggcccgactggagagcgactacaccagcttcctggaggccaagatcgcaagctgcttcgacagcatcttgcagctggagcagagtcactgggcggccgccgaggtccccgaggtgctgcagggcctctaccaggcgccgctgtccatggacgtccatatggtgcggcccgggagcaggggctgagaaggggcgtctgttcaagcctcacgcacacggtggcgatttccagaacgaattcctatccagtcccaaccaacccttccgttagatgggagcctgaggccccacgcggggggaaatcggggacccccggcgcgccgacgggcagggaggctgctggatgggagtttgcgggagttgactctccngttgggcggctgaaagctggaggggccaagactgacaggcacagcggggcgggctggaggcgcagcgggggctaccaggggacccgcggcctcaggtcgggggctgggaggcacgctcagtgcggggcttcgctcgcagctcgtggccgagcacgtgaaggcggccggcgccatctccgcggagctggaggccaccaccctgcgaatctgcacgcgggcgctcggcctcttcgtgcccaggtgcggacgcatcctcagtaggggagcgacctggccgggtgcgctctgcaggtgggagggaggagtctgcgtagggacctgattgggagggtggacccagggtcatcgcgcagctagggagggtccccaaaggctctgtgtatcccgccccaggtttgaaaaggcttttctggcgtcggaggcggtgagcgagccgcacctgggcgcctacatcaacgcctgcgaggagctcaggaccagtcttctctccaggttcccaggaacccaagaggagctggagaagcccctggtgacggccacctgcagcttccagaagcacttgcttcagggcttgcagcgtgagttgcagccgctcttcagggttgtgtgcaccagggactggctgacgcaggactggctgcatcccctcatggacaaggtggtgaccttcgccggtcatctccagcgtgtggcccggccgcgggcacaggagactctgcaggaggtgcaccggttcgtggtccgcgagtacctggcgcgggcgctgaggccacgggagcggttccggggcatggagcgcatgcatggctcccagaagatgagcctggatgcccaggccatcagcgacaccttccagggcctgggttccgaggccacatggttggaccaagccatccagtgcgtggctgagatcctgggcgagacctacaaagatgacatccagcggcacctggagactcttatccggagctaccccgacatcaggcgggaccacatactggccattctggcgctgcgccgactgggccgccagcggaaccagcatctcttgcagcacaccgaagacctgctgagagctgcggccggggcggcgggtgcggaggcccctcggggccgcgtgctcttcgaggagatcaaggtgcccagtgccatggctgtgctgatcacctgcgtctagttctctctggctcgagggggggccggccgctggcagggagctgtggtcagtgggggtcagccaggagcccagggagtcactctgggccctgcccccaactctgacactgcagttagggaatttttgtcgtcagcagccaagcgcagctgtcaggccagaaggagcagccgtgcaggaggcatttcaggcatcgttgaggggagtgttttggggccgcagagctctcaatgctgcctatcgggcggggggggcctcccgcccgactgtccagcttcaccctccagtctgaaagtgaagagcagagtatttatttaaaaaataaatgtgaattaaaatgg

SEQ ID NO: 394132 - DNA, 658 bp, Homo sapiens
ttcttgcccccagctctcctgctgccaagatgccatcaccacagacagacactcctgggccggagctgcagagtcccaaggaggctgaggagccacagactccagctcagggctcccggcgaacaagcagcaggaaagagcccaatgcccaccgcaaggatggcacaaggctgggcctgggctccctgaggcaggccttctcccgggccagccagcgggctttgacccaggtctccaaggaagatacgggcctgttccggcgaagctcctgctccctgttccggtccttccggcaagccctgaatgacggcccagctaccggccattcccaggccactcctgaggtgccctcgggggtcatgaatggtgtcagccaacaggcatccactggggcagcgtctgaggaactgaaacccgaggcagaaggcaaatccgtggccgacctcattactgaacggcaactgctggcggccttcgaacagcttctgcgcctggagacgctgctggtggccgagaaggcctcgcgcacctttgagcaggaccctacggccttcgcgcggcgcgctatggacgtgtgcctgctttacgacgggctggcagccgagatcggcgccatcgtgcgcgagacgctggacagcgacggtgtggacgcggccgc

SEQ ID NO: 394133 - DNA, 1780 bp, Homo sapiens
ttcttgcccccagctctcctgctgccaagatgccatcaccacagacagacactcctgggccggagctgcagagtcccaaggaggctgaggagccacagactccagctcagggctcccggcgaacaagcagcaggaaagagcccaatgcccaccgcaaggatggcacaaggctgggcctgggctccctgaggcaggccttctcccgggccagccagcgggctttgacccaggtctccaaggaagatacgggcctgttccggcgaagctcctgctccctgttccggtccttccggcaagccctgaatgacggcccagctaccggccattcccaggccactcctgaggtgccctcgggggtcatgaatggtgtcagccaacaggcatccactggggcagcgtctgaggaactgaaacccgaggcagtcctgacttcctgggcgccccggggctggcgctgcccgccgagccgctgcctccgctcctggcgccggacgtgtgggcccgactggagagcgactacaccagcttcctggaggccaagatcgcaagctgcttcgacagcatcttgcagctggagcagagtcactgggcggccgccgaggtccccgaggtgctgcagggcctctaccaggcgccgctgtccatggacgtccatatggtttgaaaaggcttttctggcgtcggaggcggtgagcgagccgcacctgggcgcctacatcaacgcctgcgaggagctcaggaccagtcttctctccaggttcccaggaacccaagaggagctggagaagcccctggtgacggccacctgcagcttccagaagcacttgcttcagggcttgcagcgtgagttgcagccgctcttcagggttgtgtgcaccagggactggctgacgcaggactggctgcatcccctcatggacaaggtggtgaccttcgccggtcatctccagcgtgtggcccggccgcgggcacaggagactctgcaggaggtgcaccggttcgtggtccgcgagtacctggcgcgggcgctgaggccacgggagcggttccggggcatggagcgcatgcatggctcccagaagatgagcctggatgcccaggccatcagcgacaccttccagggcctgggttccgaggccacatggttggaccaagccatccagtgcgtggctgagatcctgggcgagacctacaaagatgacatccagcggcacctggagactcttatccggagctaccccgacatcaggcgggaccacatactggccattctggcgctgcgccgactgggccgccagcggaaccagcatctcttgcagcacaccgaagacctgctgagagctgcggccggggcggcgggtgcggaggcccctcggggccgcgtgctcttcgaggagatcaaggtgcccagtgccatggctgtgctgatcacctgcgtctagttctctctggctcgagggggggccggccgctggcagggagctgtggtcagtgggggtcagccaggagcccagggagtcactctgggccctgcccccaactctgacactgcagttagggaatttttgtcgtcagcagccaagcgcagctgtcaggccagaaggagcagccgtgcaggaggcatttcaggcatcgttgaggggagtgttttggggccgcagagctctcaatgctgcctatcgggcggggggggcctcccgcccgactgtccagcttcaccctccagtctgaaagtgaagagcagagtatttatttaaaaaataaatgtgaattaaaatgg

SEQ ID NO: 394134 - DNA, 1881 bp, Homo sapiens
ttcttgcccccagctctcctgctgccaagatgccatcaccacagacagacactcctgggccggagctgcagagtcccaaggaggctgaggagccacagactccagctcagggctcccggcgaacaagcagcaggaaagagcccaatgcccaccgcaaggatggcacaaggctgggcctgggctccctgaggcaggccttctcccgggccagccagcgggctttgacccaggtctccaaggaagatacgggcctgttccggcgaagctcctgctccctgttccggtccttccggcaagccctgaatgacggcccagctaccggccattcccaggccactcctgaggtgccctcgggggtcatgaatggtgtcagccaacaggcatccactggggcagcgtctgaggaactgaaacccgaggcagtcctgacttcctgggcgccccggggctggcgctgcccgccgagccgctgcctccgctcctggcgccggacgtgtgggcccgactggagagcgactacaccagcttcctggaggccaagatcgcaagctgcttcgacagcatcttgcagctggagcagagtcactgggcggccgccgaggtccccgaggtgctgcagggcctctaccaggcgccgctgtccatggacgtccatatgctcgtggccgagcacgtgaaggcggccggcgccatctccgcggagctggaggccaccaccctgcgaatctgcacgcgggcgctcggcctcttcgtgcccaggtttgaaaaggcttttctggcgtcggaggcggtgagcgagccgcacctgggcgcctacatcaacgcctgcgaggagctcaggaccagtcttctctccaggttcccaggaacccaagaggagctggagaagcccctggtgacggccacctgcagcttccagaagcacttgcttcagggcttgcagcgtgagttgcagccgctcttcagggttgtgtgcaccagggactggctgacgcaggactggctgcatcccctcatggacaaggtggtgaccttcgccggtcatctccagcgtgtggcccggccgcgggcacaggagactctgcaggaggtgcaccggttcgtggtccgcgagtacctggcgcgggcgctgaggccacgggagcggttccggggcatggagcgcatgcatggctcccagaagatgagcctggatgcccaggccatcagcgacaccttccagggcctgggttccgaggccacatggttggaccaagccatccagtgcgtggctgagatcctgggcgagacctacaaagatgacatccagcggcacctggagactcttatccggagctaccccgacatcaggcgggaccacatactggccattctggcgctgcgccgactgggccgccagcggaaccagcatctcttgcagcacaccgaagacctgctgagagctgcggccggggcggcgggtgcggaggcccctcggggccgcgtgctcttcgaggagatcaaggtgcccagtgccatggctgtgctgatcacctgcgtctagttctctctggctcgagggggggccggccgctggcagggagctgtggtcagtgggggtcagccaggagcccagggagtcactctgggccctgcccccaactctgacactgcagttagggaatttttgtcgtcagcagccaagcgcagctgtcaggccagaaggagcagccgtgcaggaggcatttcaggcatcgttgaggggagtgttttggggccgcagagctctcaatgctgcctatcgggcggggggggcctcccgcccgactgtccagcttcaccctccagtctgaaagtgaagagcagagtatttatttaaaaaataaatgtgaattaaaatgg

SEQ ID NO: 394135 - DNA, 1847 bp, Homo sapiens
gaggttgcctgaagtcccgcactccttaaattgctccttaaattgtgtggggtcagacccgtgtccgccctgctgtgggcctccgtgctgcgggttggagggtggccgattcctgagctgtgtttgaggagagggcggagtgccatctgggtagccgtccttcagcgttctgcaggaaggcaggaacccagctgtcagaggcttcccgggagggggtgtggcatggcagcctagaggcgcgcgcgcgtgtgtgtgtgtgtgtgtgtgtgtgtgtgtgtacagatgcccaggttcgggattggcgttagactttgagcctggccagaagaggggcagcggctgccgcatcagagccgctcccgcccccagccccctgccctgtcttccagtcctgacttcctgggcgccccggggctggcgctgcccgccgagccgctgcctccgctcctggcgccggacgtgtgggcccgactggagagcgactacaccagcttcctggaggccaagatcgcaagctgcttcgacagcatcttgcagctggagcagagtcactgggcggccgccgaggtccccgaggtgctgcagggcctctaccaggcgccgctgtccatggacgtccatatgctcgtggccgagcacgtgaaggcggccggcgccatctccgcggagctggaggccaccaccctgcgaatctgcacgcgggcgctcggcctcttcgtgcccaggtttgaaaaggcttttctggcgtcggaggcggtgagcgagccgcacctgggcgcctacatcaacgcctgcgaggagctcaggaccagtcttctctccaggttcccaggaacccaagaggagctggagaagcccctggtgacggccacctgcagcttccagaagcacttgcttcagggcttgcagcgtgagttgcagccgctcttcagggttgtgtgcaccagggactggctgacgcaggactggctgcatcccctcatggacaaggtggtgaccttcgccggtcatctccagcgtgtggcccggccgcgggcacaggagactctgcaggaggtgcaccggttcgtggtccgcgagtacctggcgcgggcgctgaggccacgggagcggttccggggcatggagcgcatgcatggctcccagaagatgagcctggatgcccaggccatcagcgacaccttccagggcctgggttccgaggccacatggttggaccaagccatccagtgcgtggctgagatcctgggcgagacctacaaagatgacatccagcggcacctggagactcttatccggagctaccccgacatcaggcgggaccacatactggccattctggcgctgcgccgactgggccgccagcggaaccagcatctcttgcagcacaccgaagacctgctgagagctgcggccggggcggcgggtgcggaggcccctcggggccgcgtgctcttcgaggagatcaaggtgcccagtgccatggctgtgctgatcacctgcgtctagttctctctggctcgagggggggccggccgctggcagggagctgtggtcagtgggggtcagccaggagcccagggagtcactctgggccctgcccccaactctgacactgcagttagggaatttttgtcgtcagcagccaagcgcagctgtcaggccagaaggagcagccgtgcaggaggcatttcaggcatcgttgaggggagtgttttggggccgcagagctctcaatgctgcctatcgggcggggggggcctcccgcccgactgtccagcttcaccctccagtctgaaagtgaagagcagagtatttatttaaaaaataaatgtgaattaaaatgg

SEQ ID NO: 394136 - DNA, 679 bp, Homo sapiens
ctggcggcgttcagaggatcccgacggctcacggaactttatgtcaatgaatgtgaaaacacagatgacttagatgaattcgtagaaaaatacaatgtattatctaaagaataaactgagactctaaataatcctttgacaactaaaaaaaaaattacatcaaaagttaaaaatgctctcacacacacaaaaagcaaccttaataggttatagatgaatttcactatgcattcaagaaacacaattctaatcttatacaaaacttccagagaatagaaaaaacgtatggactcattttttaaaaagggcaattacaggccaatctcacttcctaaacagaaatgcaaaatgccaaaactaaacatctgtaaactaatccagaaagtataaaaaagataacatgacaaagtctgttttggttaaatttaggaaatcatataaatataattcactgcattaacagattaaaagagaaaaaactatacagttatcatctcaataaacacatttaatataactcaatatttgtgcgtgatataaacttttatacaaaaatttgagctgtctaaatataataaaaggcatccacaagaaaaaaagagtaataattaaaggtaacacctggaacgtattccttttatgactggcaacattacaagaaaatgctcattatcagcac

SEQ ID NO: 394137 - DNA, 192 bp, Homo sapiens
acaatgtacactataaaacactatacattacttacaatgtacactactggaataactggtttactaagatctcagaattcaccactacataattcatccctataacaaaaaaatactggtacctcaaaagctactgaaataaaaattaattttcaaattttaaagaagactttttcctcatgatattgattg

SEQ ID NO: 394138 - DNA, 755 bp, Homo sapiens
  misc_feature (120)..(120): n is a, c, g, or t
  misc_feature (552)..(552): n is a, c, g, or t
  misc_feature (669)..(669): n is a, c, g, or t
  misc_feature (674)..(674): n is a, c, g, or t
  misc_feature (676)..(676): n is a, c, g, or t
tgatacagagtctcactctgtcacttaggctggagcgcagtggcatgatctcagctcactgcaacctccgcttcctgggttcaagcaattctcatgcctcagcctcctgagtagctgagnaccacaggtgcgtgccaccacacccagctaattttttgtatttttagtagagacagagtctcaccatgttgcccaggcttgtctccaactcctgagctcaggcaatctgcccaccttggcctcccaaagtgctacaattacaggcacgagccactacacctggcctcatgttttttaaataattgccttttatatttaccctttttgtcatcactttagaatgaaaattcccatttaaatctaaaagttactttaatagtcctcttgtgttattaggacagtgttactatagtacttatttattatattttagactttttcttttttcttctgctgcttttagggacagttaaaactgggaaactatgaaacatggaacattttatcctacctagaatagtaaatgagtaattgtgaagcgtaagacaccgnaggctaatacaactctgtcttcatgtgtcgagtgcctggcacatagtactaattctcttccctttaacatataaatgttaagctgcttagagtctagtaaccaccaactgtaaacgnagccntngtgcctttaacaagaaattttaaactacctatgagtatttctttatagggctcacttaaatacgtttgtatatactgta

SEQ ID NO: 394139 - DNA, 326 bp, Homo sapiens
gatagaccacagtagactttgacccatgtatccttgatgagtggcgagagtttcaccacattctgtattggaaaaccccctgatgactgcaaccacagtctatccatatgctgtagccatggcctatccacatgctgtaaccatggtttatctaaacactgtaaccatgctttatccacaaaacgtaaccacggtctatccacacactgtaaccacggcccatccacacgctgtgaccacggcccatccacacgctgtgaccacggcccatccacacgctgtgaccacggcccatccacacgctgtaaccacggcccatccacacg

SEQ ID NO: 394140 - DNA, 311 bp, Homo sapiens
ctccactcgagcatgcggcattatttaatcactgatagttcttctgtgagaccgtctttgacagctttcccctgacatctttctcttgtgaacctctgtggtgttgaactctgcaccccaatcaagccagaggtctctcacatcccctcccatgggtcgttgagctagaactccagcctcggggctgccctgccctcccccagttgtctcagacacaaacactcgagaactctgtgaccttctctgctcctccccactgcccaggcaccagcaggttctgcagcttctaacacccaccccgtcccctctac

SEQ ID NO: 394141 - DNA, 354 bp, Homo sapiens
  misc_feature (1)..(1): n is a, c, g, or t
  misc_feature (24)..(24): n is a, c, g, or t
nctagtagtcgtacagtgtccagnaggcaaaaggacaagtatgcaccgccctacttacctactttccacactgctgcacaggaaaatctgacagaggacaataacaaacatctcaccagctcatgcgttcttttttgatcctaattccgagagactcaccaaagacatgaagagaaaacaaacaatacttttcttggaaatattgtaattgctggtacgtttgttgttctggcataaagtagaaattgtcaggtaaacattgcttccttttggatcaaaaagaaatttaaccaaataaatgcaagaggtatgagggaagataatgggaaataaatgagatttgagaaatcaaaa

SEQ ID NO: 394142 - DNA, 378 bp, Homo sapiens
atcgagctcgctaccttgacattcgtgtcccatatcacgcgtttattcactgctctcagagataaatccggaagttaacagcagcccctgggtctcagcccccaaaacctcaggattaatttgggaaaatggggtcttctgccaccagcctacagacctacaggaaggaagcgaggcctgtgttctatggagcccctcgtggctaatcttcctgctaggagtgcccttctcatggggccagcatggggcagcgcttcccaatgctctttggacccagggaaatggcatctatactgccctgccctatggcggtgaaataggttctcgcttcctgctgctgagattccctgctctccggcccaccagcacaccgggtgg

SEQ ID NO: 394143 - DNA, 375 bp, Homo sapiens
tgggaggatcactgagcccatgaaggtttagcctgcagtgagccgtgatcatgccactgcactgcagcccaggcagcagagtgacagcaacaacaacagtaccacacagactctggactaaaactgctcaggtttagctcatacttctgcagcctactagccatgttagctgtgtgactttggagactttccttagttgatccctcctctgtaaagtgagggtgatactagtacccacctcataggatagctataataattgagcaaattagcaatctatgtaattaataatagatattaatatatggagttaatagtgtatataaagggctcagaagaatgcttagcacctaataagtaccatcaaaatgttgt

SEQ ID NO: 394144 - DNA, 624 bp, Homo sapiens
catttctcctttatttcctttgtctgtagaataaagtcttagaataatattcctgttaaggccctgcttatcccaataccgtatccatactgaactttcagttctttatatgcactctactctctgtctttcagatttttgcaggtattcctttagaacactctttctcttccatcttatcgcctactctttgggtttctgtttaaacattacatttctcggtgggggggcttttctgtcccttagagtaggtcacacctagcagctgtatgttttcaaagctccatgtacattttttatcatgatactcatcatttatcacttctcatttttgcttgtcttcctggtagactaaaactgcatgagaacagagatcttatgtttactgttgaaacacctgtactagtatattgcctagtatatagtatgtggtcaataaatatgccttgaaggagtaagcagcatagtggtcatgtaagcaaggagttggaagggttcattaagagtagagttgaggtatgattggtaagtgaggaagtagagggaatgtagcctgctctctgaagcagcttagctatgacaggaaagagaaatgaggcacacaaatgtttcttcttgtttcag

SEQ ID NO: 394145 - DNA, 498 bp, Homo sapiens
tggagtcaaagaggattgtcctgaggcctccaggtctcaggcgctttgccttgctagacgtgtgacttgcttgggacccgtctcccctctcttcctactgggtcctgccttttgcaatggggagttccatcccatgcctgttcactgttgtattttagaaggacgtggcttgtctggtctcacaggttcttggctggagagcaggtctgctttaggagaaattgtaccttgagtcttacccatttctgatttagatggtagttaaatgaaactttggcttagactttagagttgatgctggaatgggttaagacgtttggggctgttgggatggagttaatgtattttgcatgtgaggacataaattttggaggcaaggattgaatgttataagctgaatgtttgtgtcccctaaaactcatatgttgaagccctagcccctagtttggctgtatttggagaaggggcctctaaggaagttaagtttaaggttaaatg

SEQ ID NO: 394146 - DNA, 399 bp, Homo sapiens
cattactagtgaagatgttctagttgacctataattatctgccctttccaagaccactgattcagaggaagcctagtagagacagacctctctgaattctcaatgaagtctgaggtggcagagtttgcaaaatgaattagaccaggctggagactcatgttttgtcatgggaagagaggcatgtgctacgtggagagggactaaagagaagacaagtaaaggaaacccaaagataattgggagaaaggtgagagtaagggagggagagggcatttcctgacattctctgtattattcccttcttgcattgccataaataagtacctgagactaggtaatttataaagaaaagaggtttaattggcttatggtcctgcagactgtacaggaagcacagca

SEQ ID NO: 394147 - DNA, 260 bp, Homo sapiens
cccgagtgccgctagaggcccggctaattttttgatttttcatagagaaggggcttcatcatcttgccaggctgctcttacactcctgggctcaagcagtcctcctgcggtggccttccaaagtgctaagattgcaggcgtgagccaccgtgctggcctcatatttggttctattccttgttaaatgatggtctgccctccagtggcctttgtcaccttcacctgaaggttatgctcagctggagagtctgtgcctctag

SEQ ID NO: 394148 - DNA, 597 bp, Homo sapiens
gtctaccaatactgtatctacttgaaggcttagttcccatctcaccccctccgtgggatctttgaggactgctccattcacacaagtccctccctctgaatcccatcatacctatagcatgtgctgctcattcattcagaaaaaaattttattgtgcactaaatatatacctgccagtgttagaggagctgaggatacagcaatgacaaaatactgctgtctttgtgggaaggcaaaaatgccggtcctttaaagctgaagttctagtctatcattggtacatattaaaaatggttccaaacactggttaaatttttgtgtatatcatttgtctctgcaagtaaattgtatatttttttaaagcagagacttattctgtggttacagttttgggatttttcttttttgttgttgttgttgttgttttgttttgtttttggtaccctgtgctttgaataatatgtcttctgaatagtaggagctttttaaacatttcagaatttgagaacagaagcgttctcaaatcctgccaataatacattcattggcagttatttttagtggtgcccgatctggataggtgatgattgccactgt

SEQ ID NO: 394149 - DNA, 153 bp, Homo sapiens
gcatccaccttccagccactccaaatacaatgtgcttgtatatcattgacatcctctgtttcccattgtgtgtctcatccttatatgacctcagttgcaatcttcttcagaacttatctattaattaatgtattcatccattaatattgattg

SEQ ID NO: 394150 - DNA, 470 bp, Homo sapiens
acatcttaacaccttattgaatgaaattttaattatgagacctactgaaaacccaccacaaactaacttccacccctctccccagcctcattttctactctcccttcacacgggccggcttccagagaggatcccaaatgctcttgcctctgaactctgattctctgccccaccttgctgcagtacctcacctcctcacctcccagcccagtggggtccagcctgggctgcacattaaatttgcctggaatgctttaaaaagtgcagatacaggccgggcacggtggctcatgcctgtaatcccagcactttgggaggctgagggcaggggcagatcacctgaggtcaggaggttgagaccagcctggccaacagggtgaaacctcgtctctactaaaaatgcaaaaattagccaggtgtggtggtgcgtgcctgtaatcccacctacttgggaggctgaggcagaagaa

SEQ ID NO: 394151 - DNA, 319 bp, Homo sapiens
catctccatttccagtgggagaattcaggcctaagccaattagtgcagagcatcctgccagctgtagggattagttcagaaatgagcgtacgttttgaataaaaaaggtgcaaggggaaattttctggggcttctgcagatattgtcctctctctctggagaaagcatcagcaggagccagtttgatcctctgacattgctgtgtgtggatatgagttctggggatactgcagccacctcacaagaagcttgtgcgtgacactggtgcagcggtgggaatggccaggagcatcacagagaccactggataaagccaatc

SEQ ID NO: 394152 - DNA, 1455 bp, Homo sapiens
  misc_feature (8)..(8): n is a, c, g, or t
ttttgcancccgtcggccaggcgcacgcccatcttgccccctcctggtacaggagcaggttgtgcagcgtggtgatggcatagaacaggaccgactccacaggggagctgagcatgcggaccagagcagggatgccacccgacttgaagatggcgagcagcccctcccggtggtgggagaggttgtgcaggatgctggtggtgcagcgggctgtgtccaggtcgctggtattctgcatggtacgcacgacagcggccaccagctggggcgagcccatcagggcccgccgcgacgcctccttcttcgacagctggttcacaatcatggccgccttggtcaccaccaccgggtcctcgtcgttgagcagtttggtgagctcgggcagggcgcgagtggccagctcggcatcgtcctggtagttgatgagatgcacaatggccgacttgagcagctgggacggctcggccagtcgctgcaggttggtggcctgcccctccacctgggtggccagcagaagcgagctgtcctcgcctgacacaccagggcacatggcctcccgcacccgtttggccctggctgttgtggacatctggtactccaggtcaccttggctggggggcaccccctgggtgtaagtggtggttttcttgagcgtgtactggcgcccgcaggcctcatcctcctccatgatgcccttgctgctgacggagggcacgcaggtgttggcgcccgagtggatacccgagtcgtaggtgtatgtctgctgccactcagtcaccttgataggctgctccatcaggttcatcacctccatcgtgcctccgctgaagaagccagagccgggctcccaccggcgtggagggaggcgccgcaggtagtatcgacgaggctctgggagctggagggcagggcctctggactccgtgcgctcacctgctcggcaggtggggccagagtcgctgggaaaatgtgcgctcggcccccacagttgggcaagctgggcgcaaacaatagggccccacccaggcctgggggagtagggagggagggaaagcgaggatgacgcgtggggtggggtgagggtggccccaaagagaccagcggcagcaagttccccaaacggtaaattcctgactgcagcgtgagccctgggacgcagtcgaagcagagcaaagtctcccccgccagcccagggcgagagtcagggacgcggcgtcgggcgagctgcgcgggccccgggggaggcgcgaccccggaggcacctgtccggatccctccccgccttgctcagatctctggttcgcggagctccgaggcgcgctcggcccgaaccgcgcgacccccaagtcgccgcgcccaggaccccagcgcgccccctgccgccggtgcagggtggcgctcgatggcaccggccctcacctgcccagggacggctgggaccggccccgcggccgc

SEQ ID NO: 394153 - DNA, 469 bp, Homo sapiens
ttgccaggctggagtgcagtggcacgatcttggctcactgcaatctctgcgtcacgggtttaagtgattctcctgcctcagcctcctgagtagctgggactacaggcatgcaccaccacacccggctaatttttgtatttttagtagagacggggtttcaccatgttggccaggatggtctcaatctcctgacctcgtaatccacccacgttgttctcccaaagtgctgggattacaaggtgtgagccaccgcgcccggcccaaacatattcttatacaattctcttcttagatatagggtttgcaaacattttatctcacattgtaattattttttcattttcttgaaagtctactttgatacaggaatatttgtgaattttataaagtacagcttatctgtattttctattatacttgtggttttggtatgatatccataaaatcattgcctaacccaaggtcacaa

SEQ ID NO: 394154 - DNA, 532 bp, Homo sapiens
ctctgcatctactctgacccctagccacaaccttctccacattcaagccatgacatgacaagcgctcacgtcaaagttcaaatctgatcatgacacttccttgcttaaaacattcagtggcttccagtcgttattagaataaaaacaactattcatgccgcctacaaggttctcctcactgtggcctggcctctccctcccgccccttaaacctctggccttgtactctctgctccagggaccacggcttcctctaggcttctcttctttatcctgcaccctcttcccacagggactttgcatatgctattctttccatttaacatcaccttccctcttctctttatctcatttaaactacacatgattcaagatttcggaaagtcttaatttatctctctgaatggggcaaaagacttattacatgttttcaatgcaatattcacttgtcttcagagtctagcaattaacaattatccttttctccctctggacctgagaggaggaggtggaaacagtgggggtgggaggg

SEQ ID NO: 394155 - DNA, 169 bp, Homo sapiens
gcagaaggaacaaaacaggaccgctgcctccttcaccagcctggatttgactcccagctttgtccagagagggaattggtcctgaagaaacagtcagaggtgagcactgagatgtatgatgcagggtgctcactgtaacactgtttccaagaatgaaacatccgaagga

SEQ ID NO: 394156 - DNA, 3900 bp, Homo sapiens
  misc_feature (439)..(439): n is a, c, g, or t
  misc_feature (473)..(473): n is a, c, g, or t
  misc_feature (1789)..(1789): n is a, c, g, or t
  misc_feature (3111)..(3112): n is a, c, g, or t
  misc_feature (3224)..(3224): n is a, c, g, or t
caagagcttggcgatacagaaatttctgctggtgttggggcgggtgcgggaactgaagacgggcgagtgcgagccgggggcgggtgctggggaagggtaagcgggaagcgagggcgaggggtaggggctggggaagggcgagcgggaggcgcgggctctctctagcagggggctgcagccatgaagaggctcttagctgccgctggcaagggcgtgcggggcccggagcccccgaaccccttcagcgaacgggtctacactgagaaggactacgggaccatctacttcggggatctagggaagatccatacagctgcctcccggggccaagtccagaagctggagaagatgacagtagggaagaagcccgtcaacctgaacaaaagagatatgaagaagaggactgctctacactgggcctgtgtcaatggccatgcanaagtagtaacatttctggtagacagaaagtgccngcttaatgtccttgatggcgaagggaggacacctctgatgaaggctctacaatgcgagagggaagctttgtgcaaatattctcatagatgctggtgctgatctaaattatgtagatgtgtatggcaacacggctctccattatgccgtttatagtgagaatttattaatggtggcaacactgctgtcctatggtgcagtcatcgaggtgcaaaacaaggctagcctcacaccccttttactggccatacagaaaagaagcaagcaaactgtggaatttttactaacaaaaaatgcaaatgcaaacgcatttaatgagtctaaatgcacagccctcatgcttgccatatgtgaaggctcatcagagatagtcggcatgcttcttcagcaaaatgttgacgtctttgctgaagacatacatggaataactgcagaacgttatgctgctgctcgtggagttaattacattcatcaacaacttttggaacatatacgaaaattacctaaaaatcctcaaaataccaatccagaaggaacatctacaggaacacctgatgaggctgcacccttggcggaaagaacacctgacacggctgaaagcttgctggaaaaaacacctgacgaggctgcacgcttggtggagggaacgtctgccaaaattcaatgtctggggaaagcaacatctggaaagtttgaacagtcaacagaagaaacacctaggaaaattttgaggcctacaaaagaaacatctgagaaattttcatggccagcaaaagaaagatctaggaagatcacatgggaggaaaaagaaacatctgtaaagactgaatgcgtggcaggagtaacacctaataaaactgaagttttggaaaaaggaacatctaatatgattgcatgtcctacaaaagaaacatctacaaaagcaagtacaaatgtggatgtgagttctgtagagcctatattcagtctttttggcacacggactattgaaaattcacagtgtacaaaagttgaggaagactttaatcttgctaccaagattatctctaagagtgctgcacagaattatacgtgtttacctgatgctacatatcaaaaagatatcaaaacaataaatcacaaaatagaagatcagatgttcccatcagaatccaaacgagaggaagatgaagaatattcttgggattctgggagtctctttgagagttctgcaaagactcaagtgtgtatacctgagtctatgtatcagaaagtaatggagataaatagagaagtagaagagcttcctgagaagccatctgccttcaagcctgccgtngaaatgcaaaagactgttccaaataaagcctttgaattgaagaatgaacaaacattgagagcagctcagatgttcccatcagaatccaaacaaaaggacgatgaagaaaattcttgggattctgagagtccctgtgagacggtttcacagaaggatgtgtatttacccaaagctacacatcaaaaagaattcgataccttaagtggaaaattagaagagtctcctgttaaagatggtcttctgaagcctacctgtggaaggaaagtttctcttccaaataaagccttagaattaaaggacagagaaacattcaaagcagagtctcctgataaagatggtcttctgaagcctacctgtggaaggaaagtttctcttccaaataaagccttagaattaaaggacagagaaacactcaaagcagagtctcctgataatgatggtcttctgaagcctacctgtggaaggaaagtttctcttccaaataaagctttagaattgaaggacagagaaacattcaaagcagctcagatgttcccatcagaatccaaacaaaaggatgatgaagaaaattcttgggattttgagagtttccttgagactctcttacagaatgatgtgtgtttacccaaggctacacatcaaaaagaattcgataccttaagtggaaaattagaagagtctcctgataaagatggtcttctgaagcctacctgtggaatgaaaatttctcttccaaataaagccttagaattgaaggacagagaaacattcaaagcagaggatgtgagttctgtagagtccacattcagtctttttggcaaaccgactactgaaaattcacagtctacaaaagttgaggaagactttaatcttactaccaaggagggagcaacaaagacagtaactggacaacaggaacgtgatattggcattattgaacgagctccacaagatcaaacaaataagatgcccacatcagaattaggaagaaaagaagatacaaaatcaacttcagattctgagattatctctgtgagtgatacacagaattatgagtgtttacctgaggctacatatcaaaaagaaataaagacaacaaatggcaaaatagaagagtctcctgaaaagccttctcactttgagcctgccactgaaatgcaaaactctgttccaaataaaggcttagaatggaagaataaacaaacattgagagcagattcaactaccctatcaaaaatcttggatgcacttccttcttgtgaaagaggaagggaacttaaaaaagataactgtgaacaaattacagcaaaaatggaacaaannaaaaataagttttgtgtactacaaaaggaactgtcagaagcgaaagaaataaaatcacagttagagaaccaaaaagctaaatgggaacaagagctctgcagtgtgagattgnctttaaatcaagaagaagagaagagaagaaatgtcgatatattaaaagaaaaaattagacccgaagagcaacttaggaaaaagttagaagtgaaacaacaacttgaacagactctcagaatacaagatatagaattgaaaagtgtaacaagtaatttgaatcaggtttctcacactcatgaaagtgaaaatgatctctttcatgaaaattgcatgttgaaaaaggaaattgccatgctaaaactggaagtagccacactgaaacatcaacaccaggtgaaggaaaataaatactttgaggacattaagattttacaagaaaagaatgctgaacttcaaatgaccctaaaactgaaacagaaaacagtaacaaaaagggcatctcagtatagagagcagcttaaagttctgacggcagagaacacgatgctgacttctaaattgaaggaaaaacaagacaaagaaatactggagacagaaattgaatcacaccatcctagactggcttctgctttacaagaccatgatcaaagtgtcacatcaagaaaaaaccaagaacttgctttccacagtgcaggagatgctcctttgcaaggaataatgaatgttgatgtgagtaatacaatatataacaatgaggtgctccatcaaccactttatgaagctcaaaggaaatc

SEQ ID NO: 394157 - DNA, 355 bp, Homo sapiens
caatatcatatgccacttcctgatgaatgtttagaggttaagttactttaggtaggattgaacccagttgcccaatgccttagttgttattaaaagtttgttgcaggccaggcatgagccactgcgcccggctgtcttttcatctttttaacagggtctttcagagcataaattttacattttgataaatacaaagtcataaacatttcatttaatgaattatgcttttgatgtcagttttaagaatctttgcctagccctaggctctgatgcttctaagaggtctcaagttttaggtattattttagcccatgacccattttgagtttgttgttgttgttgtttggtttacgga

SEQ ID NO: 394158 - DNA, 522 bp, Homo sapiens
ggctggcaggaccaagggaaagcaaaaagagaaagcagataagctataagtctgcatttcttcatggtcccagacatgtagccctcctgtgcccaacttgtcaccagacacctgcaagttagctcactgcaaccttggtgttatcagtagtgcacaaagccctcttcagtacacagcacagtaccattctgtaaaatccccagcaagccttagtctctttgtagtcagctcctctcttgctgtcttcctgttgccaccttgcaacgtattttcctactttctttaacaaatctgcctttctttacgtacaactgtcttggtaaattcttcttaccccagcaccaccagctccaggtagttgctgctcacttgcaacagatacctcccctttttagaccatagagggtaattttgaatgttgccatggcatttgtaaactgtcatggtacccgtgggagtgtcttttagcatgctaacgtattactattggcatacaatgaacagtgaggatgactagaggtc

SEQ ID NO: 394159 - DNA, 428 bp, Homo sapiens
cctaaatgaatgaatgaaagaatgccacatattctgcggcagccctgcatttcacacccacatgaacacacacactctcattacactgcatgtgccaacattgaccatgctcctttccctatttcaaatgggcctgtaatggaaggtgtggaggtggctttcctcaccccggctgtcagagcatgctggggtcctgtgtggagggactgagtcctgtgtatcctccgcccacacatgacacctggccgcgacctccatgggtgctcaggaaggagctgttgaacaagattcaggggcacgtgggacatctgtgcttgtcagaggctgtgcaaggctccgcgagggaacagttccaaaggcaggtccagaaggatgttagaggctgggtttcttttgaacaaaagagcagcatgatgtgtttgaaaagg

SEQ ID NO: 394160 - DNA, 219 bp, Homo sapiens
gcaacagggaaaacctgtactccctccccagggccccgacctcaagctcccgagaggcctagatcattgacagagaggacgctggccaaggtaaagttctcagccctgtttgaccactccatgcatgtgaagtaggagactcttttagggaattagttgctgagtgaaactaagacttacttccaaaagggtcctaggtgccctgagaacagtggcccc

SEQ ID NO: 394161 - DNA, 176 bp, Homo sapiens
tgatataatactagtaaagcgcttagcatgcatcttgggcggatgttctcaatcattatcatattcagtattgtcatcgctcatactgctattcatacactcacctcacgaccccttaccctctactgtttatatctctttaactttcatatttcccctcttcttttgcctctgtc

SEQ ID NO: 394162 - DNA, 111 bp, Homo sapiens
gctgggagtacaggcgcagtgggtgtacttggagctgtgtgtgtgcacaggtgtagtgggtgcactcagggccatgtgtgtgtgcagccatgtgcacaggtctggcggggg

SEQ ID NO: 394163 - DNA, 378 bp, Homo sapiens
tgctggtattacaggcatgagccaccatgcctggcccagaattaactttttaaatgtaaagatatgacatcagtgcccataagaaccagagagaccaagagaaggccacaatcctaaagaactggagactttatcatatctttgaagtctgttaactaatgagctcatgcttataatttgaatgtacagagggctgttacttatctccattggtcatcctgtcagccgatgaatgtggtgaggctcagagattattaactagccttttcccaggtttggaagtcacgaagctgtaactcataccagctcttctgactctaggctcaggaatttgggcatggtaggagaagggagaaatactggacccaatttccaggg

SEQ ID NO: 394164 - DNA, 697 bp, Homo sapiens
  misc_feature (344)..(344): n is a, c, g, or t
  misc_feature (359)..(359): n is a, c, g, or t
agtggtcggttctggagctgcggtcttctgctagcctgatcgcagcttagcctccgcgcctctcagccctcggcgccgccgctggcgccgccgctgacccgcaggccgccgcgggccgcagagcccatgagggcgcgggcaccgtcgcgcctccgcggcgtcgccgtcgtcccggagcgccccgggctggcgcgggcatggccgcggcatgagcgtggagccgccgcggagctggaggagaaggcggcgtcggagcccgaggcgggagccatgccggagaagcgcgcgggcgcgcaggccgcggggagcacctggctacaaaggctttggcgaccaagtgtgtnaccagtgctgctatntgtcgatctttcgcttgagattcttttgccgttggggccctggttggaacaaacttccaattgtggatggttctactttgaacacattttctcaacacacattcctcatgaatggtctcattcaaggtgtaaagggcctgctctcttttttgagtgccccactcattggtgccctgtctgatgtgtgggggaggaagccctttctcctcggcactgtattctttacctgcttcccaatcccactgatgaggatcagcccatggtggtattttgcgatgatttctgtgtctggagtcttctcggtcacgttttctgttatatttgcctatgtagctgat

SEQ ID NO: 394165 - DNA, 579 bp, Homo sapiens
atgctttctagggtggagaggatgggcagagccatccccagagaggaagctgtgtaaacgcaggcccagacccaggaaaactcccagcctgtgcagaggagaccaggagtcccctgagagggcgagggggcaagaaaggctgggactgaattgtgaaggctcccatgacagacactgtcaggcctctgagcccaagctaagccatcatatctcctgcgacctgcacatatacatccagttggcctgaagcaagtgaagaatcacaaaagaagtgaaaatgaccagttcctgtcttcactgatggcattccaccattgtgatttgttcctgccgcaccttaactgagcgattaaccttgtgaaatcccttctcctggctcagaagctcgcccactgagcaccttgtgatccctgccctgcccgcaagagaaaaatcccctttgactgtaattttcctctacccacccaaatcctataaaacggccccacccctgtctcccttcgctgactctcttttcagactcagcccacctgcacccaggtgattaaaaagctttattgctcacacaaagcctgtttg

SEQ ID NO: 394166 - DNA, 467 bp, Homo sapiens
cattaggagatacacctaatgttaaatgacgagttaatggatgcagcacaccaacatggcacatgtatacatatgtaacaaacctgcacgttgtgcacatgtaccctaaaacttaaagtataataataaaaaaaattagaatgctaaaatcccaaaaaaaaaaaagaaaattaaaattatcttaggcaatttagaaatagcaactgagatgagagctggagagaggcctttcatgggaaggtgagaaggggttacttagaattgctaaagggcgggggaaggggaggttcaacacaattttcttattttcttgattccctaatgctccagtcctttggacttcttggtcttaaggctatctgaaggacctaattagacaagtttcccatcttccactgattcttcaccgcctctccactatttctcaacctcagtttgtttcctacacactgccacctgtggccagc

SEQ ID NO: 394167 - DNA, 561 bp, Homo sapiens
gaggctggccaggccccacctgggggaggcttgagggcagggccccaaggctgagattcaggcttgggggaacagagcaggaaagagacccggtaccgaaagtgagcggggcaggcacctagtcacatgggtaatgggcaggggtcggtcactggctttggctccagggccagagcagtctgacttagtgttgagctccaagcatggaacactggagttggttcattttgaccagcaagcctctaaatgggtgccttgattacccaccgcaaggagagggcagttgcctttttatgacatgttaattccagccaggtgagtcaccaggtagctctcatcctcctgccaggctcccctgcctgtcggtttggcattgtcagataatgtgatcattcattgaagtgacatttgagttccaaaccagttttctcctttaaccatttcaccctcaggagtgattctcctttgtttggcattgtcagggaatgtgatgatccattcaaatgacttttgagttccaaatagtgtttctactttaacttcctaaatgaaaaaaaaaaa

SEQ ID NO: 394168 - DNA, 437 bp, Homo sapiens
tatggaaaaatcgcagtataagacatagcaacaatagaagtacgctctctgcacgattaaaaaaatgaaaataaaaacactgaaagagttatacgcaaatgtggagaagagcaaacaaccgtttgggaatccatatttcattaagaatttatcagtgcctagtgagcatccagccttagcacagtatccacctcgtaactggtagacataaatacttagtaaaagagtgagtgaatgaataaacacaggtgtttgtaaggcgacattcttggaatactgctgctgctatatttcaactcagtgaggttttgtaaattcaaaaacttggattttgaactcaagctgcttggatttgaaccctggctttactacctgctatgctgcaattgcttcatggggaaaagaagaaatggcaatcctaaaggatggatccctac

SEQ ID NO: 394169 - DNA, 481 bp, Homo sapiens
ttaattgtggtaaaacatacagaacataaaattcctctttctaaccatttttaagtgtataattcagtggcattaagtatattcacaatgttgtacaagcatactcagagttcttaactgttgtcaactaatcaaaaaatattttgaatactttaggaactgaagttatcaagtttataatacttgatataaatatcaagtttataatatgtgataaactacactctttatactgatagactacactggaggtggagggtaatacagacttcagctttagaaagcctcctgggtaattaccctatacaaccctgcctaagaattttgacctatgctgaatgttgactgctacatcccaaggttgtaaagcaacaagacctagctatgtagtgtctcaacaaatgcttggaagttttacagtaacactgaaggagtacagaaactaaaccattaaggtccccagttacacaatgtggataaa

SEQ ID NO: 394170 - DNA, 393 bp, Homo sapiens
aggccatcaagagaaacaggctttaatttgccgtggagcagcccagggtgtgggtgcaggtgatgtgcccaggcaaacagaagcagatttgccctcctcactgggtcccctccaccctacccaccaccaccatttaatcctcggcttcatgcaaagctgcctgctaggcaggttcccatatgggaaaatccaaggagtgcaaattctggaagcaccagataaatgcaccccttccttaaacagcaccagaattaagaaaggccaccctccctctcaagcgcctgctctctttaggataaggattgtgccagggacgggtgatggttagcgagcgctcactgccaaaggacacgtgggtaggagagggcagggagggacacacaggagcaatca

SEQ ID NO: 394171 - DNA, 323 bp, Homo sapiens
gtcttcacttccacccttgcccacacagattccatggaattttgcaaatattcttaactcccttttttcactctctctttccttccttttcttgtctggcaaaaccccaatttggctgacctcaaacatctaccttatccatgagagcctttgagcagctagataaactggactgaaggcatctacatctgggctaaccaatttcatgtaaaatgtgtgaccacaagtgctagatgggcactcaacactgcctggggacccagttacatttcctcagggggtgtgcctttcctctccttgagacaactattcaaacctcccct

SEQ ID NO: 394172 - DNA, 524 bp, Homo sapiens
agctgggattacaggcgcacaccaccacacccagctaatttttatatttttagtagagacggggtctctccgtgttggtcaggctggtctcgaactcccagcctcaggtgatctgcccacctctgcctcccagagtgctgggattacaggcgtgagccaccacacccagcctatgtgaccttgattttaaagacgcctcatttaatgttagtgttgattcatttaatagtgttaacattgaactcagggccagctgtagtaagtagtctgtggtgccatcatttcagcctgttagaaagctcatcccacaccggttttgtctgtaagacacctgacagccagcctgcacttaagaacagcagacagcacttcacactgcacctggggccacttcagacagcgatgtcaccagaaaaagcccaaagggcaaaacacccgacactcatcgtgaaaagacttgacagctaataactgaaacaggcagagcattatcgttttctgcctcagctgggatcgtcgcatct

SEQ ID NO: 394173 - DNA, 525 bp, Homo sapiens
gcgttctagagcatcacttaaaacgtatcagaacccagccactttcttcttgggtaaagggcacctcagtgtccttacctggggcctggaccaatgtaataggggcggagttccctctgctatgggatacctccaataggggagtggtttcccagaggagtttggggtttctcaataagaatgtgacattttggcttcccagaaatgtaaaaaataaagagtgtgacagggtggctgctctgtctcccccagacccctgtgagaggatagacattgttttcctagggtccagacgggagagggagcctcactcacttatttcacagatatttcctaagtgttatataccaggcactatcctcgggatgaataagagagacaaagtcctgggcctcatgaacctcacgatgagtgtgtgtataggggggaaaatacgctgaacaagtaattctcctgcctcagcctcctgagtagctgtgattacaggcgtgtgccaccacgcccggataatttttttttgcattt

SEQ ID NO: 394174 - DNA, 545 bp, Homo sapiens
agtaaggactttatctttaggtgccagcttttctcttgcaacctaatcctctctctactctcacaaagaacctgataatagtcaccagttacccttgttactgaccacacaatattttaaaatcgatgaattttagagaggcatacctcagcctagaactctgtttttcatctttctctcttttcaataaaaagattgtattgattgttaatgcaattttagaaagcaccaagttcatgtagaactaattgaggacccaaaagaacaccttgaaatcaaaataggctgtttgcaagtctagccttgagaataaaccatatcatttctttgaggttaggagtgtgaaagggtatgaagtgacagtctaggtatttttctcctttagagatggatctgtgatctctacaagtagacagagtaggggagagggttgacctatatgcaaatactaaagacctatttctaggagctatttggtttcagcagcttcttcaaggatgtaaaacccactttcatcctatcccctggcaggtccttctctctag

SEQ ID NO: 394175 - DNA, 512 bp, Homo sapiens
gagtccacagtacaatgaatggagggtgttatcataccctgtgatgggcaatccagaggaagacctagtttgggtaggatgtagaaggaaaatacaaatttggtgtgcaatagattgagtttgagacacctttaagacaggccagtgtagatgttgagttatacagggagcttgggaggagaggtctgtgctggagattttggggaataatcccagagtagagcatgagtgaagcccaggtcatgggcaaggtcaggagtgagaagagaagagccaacaactgcagactccaggagttccagtggtgaggctggtgcccaggaataagctggccaaggagactgggaagtgatggctcaagaagtaggaggaaaaccatgaggacatcatgctgctgcaaagagtgtgagccctactcccaccttagtccaacgctgaaggcacatgctaatttactttaaaatggtttagttttagtgtgatttgttacatattacgggggtagatttgga

SEQ ID NO: 394176 - DNA, 478 bp, Homo sapiens
cagtagccacaggatacgggcagaaaaccgagggccagagaggaaccgtgactcggccacatagctagtaaagtgagttgtgcccaagcaggcagacagactggtgaactttgatgctatcctgtttcaagaaagcgttcattgagcacctacttcatacacaacagtggcctggctgctgaaggctgagtgagaagaaagggtaacagaaataaatgggaaacggatcctcatccgtgaagcgttcacatgggaaatgagggtcctcctcaacttatgtgtcacacacatagtgacaacttgagaaggtttaggtccaaccaacatgtactgagctccaacagtaagtactcatggccagaggacagagctgaatcagaagcggccccagctgtcaagccatgtgtgaccatcaaagcccaaacctgagtatccaagggccacaggggtgagagggtgttggggaaatctaggaggg

SEQ ID NO: 394177 - DNA, 291 bp, Homo sapiens
aatgccatgagaatgtggaaagcaagcctccggagagcgaactcactctgagaaaggctttgaagattgttttctcatctgctttttattttcatatgcaagtacggtcctctgtagtacatcttatctctctctttagccagaaatactttggcccataaaaatagaagaaaatctccagctaagagtgacacaagtgcagaggttaaatattcagttctttgaagtgaaatcatttttttgttcttagtgtaatgataccccttttcctccctctcccttcctctccct

SEQ ID NO: 394178 - DNA, 402 bp, Homo sapiens
atgaaggcagcaacaactatctaagggttgaaaggttggagtactagcctggcttactttgcaggagtgacttctctagaactgctagcatgtcagatcagctcaaacatgaggtcatatgaagaggtgggcagattgaagtccgacaggcttccccactgcttttgccccagggtgcagatattagaacagaggctaccacttgtttctgtagaagaaaaactttgtccttcattttctgtgcctccaaatgtcacttaacctccagaagagttgtgttggtaaacataatgaagggattaaactagaaatgaattttgacagtttatagtgagagcttctgatttctgtcatgtggaacttcatgtctgtagcatttcagtatttgaagttcttaatatt

SEQ ID NO: 394179 - DNA, 221 bp, Homo sapiens
cccggttattttgtattttagtagagatggaattttccatatggccaggccggtctcgaactcttgacctcaagtgatctgcccgcctcggcctcccaaaatgttgagattacaggcgtgagccaccatgcccctcttacattatttccacacacctagtttttcagccctatacaggctgaccccatacctgccatctccttttcacttcctgttctttc

SEQ ID NO: 394180 - DNA, 385 bp, Homo sapiens
ctcctcacttccacccccattagataaggttcccttgaattacatcccattgttactctgcagtcctttgcagcacttacaacattactaactgtaatcactctttatgtttgctctgctagaatgtaaaccccatgaggactactttattattcctggagcccttaatgtctacaggcatgttacaagcacttagtttcttcttaaagagtaactgactaatctaactctccccactgatctgttcactatatacccaaatttcctatttagacaagtttattcctggactctccattctattccactaatttgtctgctcttgtagtcgataaattctcaatatttgacaaagatccctttatcattcttctcacagaatttt

SEQ ID NO: 394181 - DNA, 557 bp, Homo sapiens
ggtatgtctttatcagcagcatgagaatgagctaatacaatgagcactcatcaatctggattttcatgtgaaatctcaattttttaagtgttggtaactacatttaaaaataaatactgtgggtatctataggggccacctatttttgttatcttctgggtcagcagggaatgtccttatctttcttgtttctgatcaggctacaggaaaatggattgctagagaacagaggttttgtgacggagtggtataagaagaaatctgatggccaagggcttgttactgggtctgtttcaaatgccagcaccttctgtgtctgccttcagacaacaccaaacacctaaatcatcttggtaaacacagatagaaagagacagaaaggttaaaagtatactcataatcacttgctttttttcccctcctaaacgtgtttgagagcaatattgtttcgtaaaaacaaaatgaccccatttctaaagcaatattcatgctaagctactcagctgttaagtataaccagcagtttgcattatgatgaagctaagccagaatttcaa

SEQ ID NO: 394182 - DNA, 418 bp, Homo sapiens
agccaggatggtctctatctcctgacctcatgatccgcccaccttggcctcccaaagtgctgggattacaggagtgagccaccgcgcccggcctaaacttaattttatacaattatatttgattggcctgtaaaacctatttttcgaagcacctaaaataattttgcataagtttgacatggctgtgagttctctggtgtcagactttatactggattgtagcttcagaaacgccacgtttcagaggaactaagggtccctctggtggtaagtaaggagaactcttctagctcagtgggtggcatgggtttaatgcttgtaaaggttaaaaactctcattctggattattgccttaggttgttagccaaggacaagggtagttaattgttttttttgtttttttttgttttttggttt

SEQ ID NO: 394183 - DNA, 815 bp, Homo sapiens
cacagtgaggacaaccagaggtcactctcgtggccatcttggttttggtcagttttggccaccttctttacggcaacctgttttatcagcaaggtctttatgacctgtattttgtgctgacctcctatctcatcctgtgacttagaatggctgcgtctgagaatgcagcctagtaggtttcagcctcattttccccagctcctattcaagatggagttgctctggttcaaacatctctgacactaccacccaagcagccaccatgctgcgaccagtgcctggatgtgagtgaatttcatcataatttttgtactatctttgcaaattatggacactactgccactcctcacatcaagtccagctgtcttttaagcggagttgaaatatcacactacagatttaccagtgaaacagaaagttattttatctgcaaaaaggcctggaaacagaaaagcaaggtgcctatttgtggtggatgaatgacctccatttcatactttctgcaaagcaacgagcaagagctaagcgataagaaatcattgtgctctgctgtaatcggtggtgcctttgcttccacagtgacaggaaacaaggatgcattttacactcttggaatttagattctgtgaaacatggcaataaataatgtttggacagagtgaatagtctataattccagaaagttccatctcaatgttaaaatctaatgtttaattaacctttcagtttaaaccttgtcatgtggcagaccctcacacccagactccctgcccaattgtggcagataacaaaggcctgtgggtgaatacccatt

SEQ ID NO: 394184 - DNA, 325 bp, Homo sapiens
cgtagagtttgaggtgcctatggatgtcaacttggagagattatatagatagttggatttataagccttaagcctagagccatggatttaaagtctgaacatcacgaaaaggacacatggagattaatgaaaaaataatgagcacagggaaaggagttcattaaggaatgattggagagatacaacaagaacccaaagaatgtgttgtttcagaaaacagaaaggaataaagaactttaaaaagaaggaaatagtttacaatctcatgtatggtccagtgagataagggctgaaaagtgcccattagcttttgcaagcaggaggt

SEQ ID NO: 394185 - DNA, 575 bp, Homo sapiens
aggtgcctgccgccatgcctcgctaattttttgtattttcagtagagatggggtttcactatgtcggccaggctagtctcaaactcctaaccttgtgatccacccgccttggcctcccaaagtgctgggattacagacgtgagccactgtgcccggcctgctttttctttttttccccaaaaattcaggaaagaatgcaggaagagaaactcaaaacttaaaacactattagaagagtcctgcctctgcatccctctacccacagcagccactagttcaaccatgcattctgcacagcttttctggcttctccttctcactcttcccacttattggcttctgatttctaagattacctcctaaaactctatttgtaccctagtctttgtttcagagctctgatattgtaggaacccaaacaaagtcaagccctgatggttccctaagatccagagcctcacttctaacttccttctctcattctcattctctctctctcctccctctccttcttctctctccatattctacccagcatattcataattaaactcatcaccattgtttcaaacctg

SEQ ID NO: 394186 - DNA, 354 bp, Homo sapiens
agaaccaatacaggcaataaaacacaccaagaattagggaaaagctaaagcatagtccaattatctcaattattgtaaatgagaagtacccttcacctaaatgaggctgagtagaaacttccttacctctgcaacaatttataactgtggaattagaatttagattcaagctagcaaaactagagctacattttatactcaaaactatgtctgccacttaaaagaggaaaaaaaagaatgaatataagctggttatattgaagtatattttacacagattttttttagtagttaatttcttatttagataactaggaagggtaagtggaaagatacatatgtttttaaagaggg

SEQ ID NO: 394187 - DNA, 424 bp, Homo sapiens
cagcagaggtgggtacagggctttgtaagtggcaaaggactgataagatttgagaaatgcaacagggagcaggagaagcacagggcagctagggggtcttgattctagggtccccatcggcatctgggctcaaaaaagagttccatgtctagtggacaaaggcaccacttcaaaatacaaagaccacccagcagggaaaaccaatgaggacctgatctgggaaggggggtcaggctcagaagggagaattgggcatgagcaaagccacaggggaggaaaaaagcaagacaggcccttgagggtggtcaagggacaccagtaaggtcactctggaggtcagatgcgacccagagtatcagcagctgcacatcgtggatcagtcaagaagcaggcccagtcattctagcctgaaatagtgggagat

SEQ ID NO: 394188 - DNA, 241 bp, Homo sapiens
tactttcaaagggtcattcttatgctgggttctggaggctcttcaatgcttaactgtcaaaaaatcataacttcctggaaacttttttttcgcatcctgggtcagccactatagggctgaaaaggaatgtgacacatgaggacttcagattctaaataactaataacctgactagggagaccagactattacccctaaggttatcatccgataacttggaatcacacatacgtgagtctca

SEQ ID NO: 394189 - DNA, 372 bp, Homo sapiens
gtagctaattgttacatcagctataaagttgttggttttttagattatgcctaataatcttgagggctaagctaccccaacctataatagaatttatctcttcataagtatatactatgatggtcctcgtagaggtatgatactgtaataaccatgtacctgtctctcagctttagaatttgcagttacacttggtttccaaaaatcagagattctggattttaagagcttagactagccactaaaaacctgtagaatgtctaataatcaccccaaatttttactagtcaaccaagtgttattttttatccatgtggcaactgggtcatttctttgcttctcaagcctataaagattagtaattccttggtt

SEQ ID NO: 394190 - DNA, 509 bp, Homo sapiens
cagccaacatttttactgatagatgataagggcttaaataaaggcagcactcgtatgaatgaaagggagagaaggagtcaaaagaagattctaaagtagacttggtgtggggaaatgaaaaagaagtcaaggatgacttcaaagtttttagcttgatgaatagaaatgacattaattgatgtgagaggccaagatgatgagactgactattgaagttggggtgcctgttaaataattcagatagtgataatgcaaacatagattctatgtagtgtataaatcctgatatttgcaagggtttggtcctcatttctattttgtttgctgtctctctcaaaccagcaagtagagaagagaggaagatggaatcctaataaacaccaagatttaatgagggtgaaggatgaggcaacagtagaacttgaatagaagtgctccaggtgggagagagatacaggatatggaatcatgagaggtgtcttttttcccctttctaagatgagtttttt

SEQ ID NO: 394191 - DNA, 805 bp, Homo sapiens
tagcacgtgtcatctgtccaggaggctggatttccgtgctcccgtgctgatgggacaatggtgagcaagagctccgctcaggcagtaggtcacttcccactgagcactgggtcgctcccgggcaaagctgttgaaccctgggaatgctggcccatcttggggcgggatatagggaggaaggaggctggaggagaactggccaaatgagtccctccctccttcccgtgcagagacactgttggttttgttcatgcagtatctccggtgcttaatgagtagctgctaaagtgaataattgaattcctggggccctcatcttccttggcaagctgggcttctgttgatctaaaagggactgaggatgaagaagagacttctccggttcctgctctttagggacaggctagatgacatcagcttctagaagcttcctggaactctgggtccagagctgagggaggggtcaccagggtgatatttgacaccatgattgtcctgagaaatctaggatgcaaaatcgccatcaccatgcaggatatacagacagacaagccaagcgtctcagtgcagaccgctcatagtcttaagatcaagcaagtttttcccaatagcaaagtcgtgcactttgaagatttctcttttgatgacctgatcacaaacttctctgaactgtctttcctcaaaatgcaatgaatttaagaaatttgcagtgaataaataagaaccaaagtttttttgttgatcttatgaatgttttccaaaatgtgttaccactggtggcacacaagataattctcaaaggccc

SEQ ID NO: 394192 - DNA, 383 bp, Homo sapiens
aaagagaaataagttctatgtattaggctgacttgtctgagaggcagcaatgggcacagcccagacccaggaaaagtcttgataatactatctaaagtgctcttggagactctcccagcactccctcaacatagagagaagaaaaaacaaattttcctttgttttatggaatgagtttatagattcctgttctctgtaactcatgacttcaagtattctgttttatctaagaagtacagcgaaggtcatgagaagcctgagctgcctgggcaccacagtgaaggttatgggataagcccgtgcctaggctaacctagataagggacatctgggttgcatagcaacggttatgtgcaatcctgagttataaacctgttacaaca

SEQ ID NO: 394193 - DNA, 344 bp, Homo sapiens
cactgatgtgggcacactcagctggctgggtaaggaagccacagtctcctagagtgtctctggacaccataagcccacagttcaatgaccagagcttcgtctgcatgagggccaactcctcaatgccgccgcccctctagtctctactcctgggtaggcctcacaggcagaccaatccctgggcagcacagagtctggagcaagacagaggtgggttcaaacactagctcctctcctttttttttttttgagactgagtctcgatctattgcccaggtcggagtgcagtgacgtgatcttggcttactgcaatctccgcctgccaggttcaagcaattctcctg

SEQ ID NO: 394194 - DNA, 591 bp, Homo sapiens
cctcgcgggcacagttctcagtagggttggcactctggcaagaatgctaacggcgctgctgtcctatcaggaggcagagctcagtcagtaatgctcactcgaccgatgttcacctcctgatgcacggccctgttcccaacagttggggacccctgctgcagggcatctatgctctgtagcccccaaggcatagctgggacccatgggggcatcatgagatgcagattctcagcagaacctgagcaaggaccttttccagacagaagtatccccctaggaacagggcagccccaagggcggagggatgagctctctctcctaggagtgtgcagagtggaaatagccagccaggaagcctcagagagactgctaccccaggtgggggtatcccacaagcctctctcgtcccaccccggcatgttaggatcagggcagtagcaagaacattctgacagtcctggaacactgtccagggttggaaataaggtggctccagggatgacaggagatgaagatcagggctctaattcaaacctaggtgccatcattactggctctttaacttctacactaagtcctttggaaaattct

SEQ ID NO: 394195 - DNA, 125 bp, Homo sapiens
gagctaaggtctcactgtattctttgccatgctgctcttgaattcttaggctcaagcgatcttcccaccttggcctctgaaagtactaggattagaggtatatgccaccatgcctggccataaat

SEQ ID NO: 394196 - DNA, 440 bp, Homo sapiens
tataaactgtctctgagtgaaacatagtaagaagtagacaagaaaacaacatacaatagataaacacatttacccagaatttatagctttcaggtatcattaatttatttataattaaaatgtttttgaatttttggggaaatattctgtatgtagtcgtgatgacataaaacttgtttttgtattcctctagtttcttaatcatacagaagtcataagtgtacaagagtttggtgtcattttatacaggaagagctaattatttagtggctcagctaacaatgggggatttcgtctgtatagctcgtactttggaaattccattttctatctgattatacagttataaaatgtcaaccagtgtacctatcatttgaattgaatttcccaaagatgtgataggcacatctaactgaatcaccatgatttttgatactctt

SEQ ID NO: 394197 - DNA, 429 bp, Homo sapiens
tctcattttagagagacccacagcagaggtcctgattcatgaaccaggaggcctgggaacctgcttgcttttgtaaaatatggtgcttaacatgtccttgctgcagatacattgctgggtccagggagtttcttgtttatctcaactgttttacattttacatttttctcatttttaaataataaacaaaataaaatacattccttttcttttgtcctcatcctggaagaattaaagacgagatgagaatagataaccaagtcaggagagggttgaggctggtggaagaatcagtagacattgccagcatttttttctaggtctttaataaaatatctaccagaactttttggagaacataatgttaaatcataaagggaagctcaggatgccacatatatttatgctgggcttaagcccaggatgctg

SEQ ID NO: 394198 - DNA, 310 bp, Homo sapiens
gacgagggaaacctaggtccgctcaaaacctaagcatggttgctcacagcagctattgtatttgtagtaggccgaaaaatggaaaaactaatgtacttcagtagacagggggtcaaacaaacaggggaacctccacccagtggcatctcagcaataaaaaggaatccactcctgaggcccacaactcagaaagacggccctgagctgcggacgagcccgcttctgaaaccttctcataacgacaggcctgcagccatggagacgcatttactggtttccagggttacaatggctgcgtggccgccacggt

SEQ ID NO: 394199 - DNA, 394 bp, Homo sapiens
tatcccgacttcagagggcgttctcgatggttatcgagatgttgctggcccttgtacttccccagagaggagaatccagccaagctggtcagcaagagcctggggtgggtctggaaggagagcttcctgcagtgaagaactccgatgcttccagggccacctgccagatatggggcacagtccccgcctcttccaggtggagatgaggtgttgaactgggcccttctaagaggagggcagggggcagtgccttagcagagcttctaacccacgtaagtgccttcaatgccttcctttcctgccacattaccaaaaaatatactgttattgttgatgagctagcctgtctccccaccgtaagggcaaccgcaaaatggtcgttttctctctcctg

SEQ ID NO: 394200 - DNA, 767 bp, Homo sapiens
caccccctctcatatttctctttgtgtcagtatccttctcatggtgattcaggtttgaaacttcaaaaccgtttttgaatttattttctcctttccctccagtgtatataatctgctgccaaaacacattttctgcttcaggtggtactagaagacaatcagatgctaagcatttgttagccccctccatatgctcattaccatgctagctaccggtggggacacagaagaaactttacatttgatgcaagaaaagcacagaagatcatgcctaggtggtctctccaatttccttgtctgtcaaaataaaaagtaccaacactagcttgttcagcaagtagttaacgtatacatacatatgatgttatttctattcagtagggcctatgaagtagatgcctaatttgtagaagaaaactagtgccagaatctcagcagtttgaaatgggcataaaggataataacaagacatcacagatccaggtaactcatacaggatgatccattactacttgaaatatgtactaattttatggtaaagtctaaatcttagatcaggtcttctttgctctcctgaaaagataatcatagatatgggtatgagtactatctctctccttccctgcctgaaagagcttggattgggtagatggaacagcttaatttttacacctcgtaccaattacaggccatgatttcaaaatgatcactcaccaaatctcctttctaaaatttttttagaaacagggtctcactctgttactcag

SEQ ID NO: 394201 - DNA, 342 bp, Homo sapiens
tttgtgtttagatgagagcagtgttgattgcagtttgacatctgattttttttttaattgagttggtacaagcaggatgtcattggctaggtgacaaagtcactgggggaccaaataccaagatgcccgttggtgagagagaccctccccaggaccctccccaggcgcctccttctccgtgacgttcaggaccctccccaggcgcctccttccccgtgacgttcaggacccctccccagggccctccccaggcgcctccttccccgtgacgttcaggaccctccccaggcgcctccttccctgtcatgttcaggaccctccccaggcgcctccttccctgtg

SEQ ID NO: 394202 - DNA, 267 bp, Homo sapiens
agttccagaggccccctatagcagcagtcttcatagcatcacctgtagctttttttcttttttaaatatacagatgatcaagccttagcccacatttattgactcagaataaccaatgaggaattttttttttttttttttttttttttgggtttttgatggtttcccgcttttttatatggtgggggggcctttggtccttctcctttgaaaaattgttttagccccattttttggtgggtatattatttgtttttttttctttaa

SEQ ID NO: 394203 - DNA, 218 bp, Homo sapiens
ttaaagacaagagtttcactctgtagtgaaggctagggtgtagtattacagccatagctcactgcagcctccacttccctgggtcaagtgatcctcccacttcagcctcccaagtagctggaactacagatgtgcactgccacactcaactaatttatttatttatttttatagagttgggtatggctatgttgcccaagctggtctcgaactcctgt

SEQ ID NO: 394204 - DNA, 214 bp, Homo sapiens
gatctcttgaagtttattctttttgtctaactgtaattatgtatcctttgaccaacatttacccagtagtgggattgctggatcatatggtggttatttctgttttaaatttttttttagaaaccttcatattattttcagtaatggccaccaacagtgtgttaaggattctcttttctccatattctcagcagcacttgttgtcttttgtctt

SEQ ID NO: 394205 - DNA, 379 bp, Homo sapiens
aaaggtactcattctctgccttccacattgcagtgttctttatcaaagtcagttgactgtgtccatatttgtgttgatcatgtttttgttctccctgtttttgtccatagtttatgcaagtatcatatatcagctgtataactacaacttggcagtgtaatttgatattgaggattgtgggtcttcactttgtatttctgaggattcctttagatattcattgcttttgtggttccctgtgatttttagcaatacctatttatttctattaactttttttcacaacataaaggtccataattaggggtacattttcatacatataggttgggtaatgatcaaatcagggtacttaggatctctatttgctcgtccaggc

SEQ ID NO: 394206 - DNA, 289 bp, Homo sapiens
gagtttcacaggcaaacaacttttaaaggtgccacccactgtctgccacttgccagggccacagggagatggctgaggagtcaaaagtaagatctgaatctactctatgggtttttacatagaaacaccttttctgtatcagaaaagagaagtcaaagtcaaaatcctacctcagagcttgggtgctatctagacaatcagtttttccccataaactcttatttctttatttctttctttttccttttttttttgagatggagtctcactcactcaccaggctggagtg

SEQ ID NO: 394207 - DNA, 132 bp, Homo sapiens
aggaaggcgaagggactaccagcccacaggggcaaatcacacacaccggagaggctggaacagaggaggtttcctgggctggaggtgaatgttgatggatgaggaggagtgggtgccacggagtcttccccg

SEQ ID NO: 394208 - DNA, 548 bp, Homo sapiens
acttaaaataaaagaaaaagccaaataaataaaatcaaattgaaaaaggagacattataagggatactacagaaataaaaagaatcactagagactgttatgaactatatgccaacaaactggaaaaccaaaataatggacaaattcctggacaaatttaccaagacggaatcagaaagaacactaaaatctgaacagaccaataatgtgaaatgtgattcattcaccaataaaacatctcaaaacaacaaaatgcccaggagtggatggctttatggctgaattctgccaaacttttaaagaagaactaataacaattcctctcaaactactctaaaaaactgaaaacaaagaaatgcttcctaattcattctacaaggcccgcattaacctgataccaaagccagagaagaatacaagagaaaaactacaggctaatatacgtcatgaacataaatgcaaaagtcctcaacaaaatactagcaaaatgaatatctagtaacacattaaaaagataaataccatgatcaagtgggatttatcccagg

SEQ ID NO: 394209 - DNA, 526 bp, Homo sapiens
agtgtctgcatgtgggagaaatatgaattgcagtggctagagggtagaccatgatagattatttacatagattatcataactgctccttcacaatgtgactttccccttctttccatcaaaaaaaaagagtacaggatctgactggacttggacccgcttttataaacagaatgtgacaaaaatgaggttatatgacttttgactataaatcttgagcctctgctagcttctgcttttcactttcttggagagctacacagagatcaccatgtaaagaaaatgatctagtttattggaaactgccttggttctctgatttaataccagatctccatcatcagggagtatgaaggcactccaagcaacagttagacatgtagttaaggccattttgcaccttctagcctagccacacctctgcctaaatgcagctcctgaggaagcacagacaaaatcaacagaataacaacccaaccaaacttcaaaatcataagaaatagtaaattcttgttgttttaagtcatg

SEQ ID NO: 394210 - DNA, 527 bp, Homo sapiens
tgggatctagttcaggatacagtagacataacttgctgacggcctgcatatgggaggggcactggtaagggagaggtaatcaagactggtccttggtttctgcttgaatgaatgatgagtggtagaaccatttactgacctgggaggaaggattcttggggtggggcaggaggacagtcacgagttacgtttttgtctgtggacactggtgagtctggggcctcagaaggagatataaacgtgggcaccctcagcatatagccctcttattcttcccctagtagctttcaatcctagagcagcagtccctaaccttctgggtaccggggaccagttttgtggaagacaatttttccatgggccagtggggagggggtatggtttcgggatgaaactgttccacctcagaccatcagacactagttagatggttctcataaggagcgtgcaacgtagatcctcgcatgcgcagttcacaatagggttcgtgctcctatgagaagctaatgccgctgctgatctgacag

SEQ ID NO: 394211 - DNA, 250 bp, Homo sapiens
ggactttcaacactagactagccatgagactgacctcagaggtgaggcataaaggaattttgtctttgcaggcagcttgtgcgatggttacacactagaattctgagtttgaacccaagtaaacttttcaggagaggaaacaggagtttcccaggtagaaagtgggagagccagagtttgaaacaaaagcccctggccaggtgcagtggctcacgcctgtaatcccagcactctgggaggccaagacagg

SEQ ID NO: 394212 - DNA, 689 bp, Homo sapiens
tgtcctgcaactccctagccctactgagtctgaatctgcaactaataagttctttcagtgactcatgggcacattaaaatttgagaagcactgtcattgaggttagaaatgtgggccttaaagcacatagatcttggttcaaatccccattccaccttgagcaagctaattttctaatcttgtttcctcacctgtgtgatataatcataggtacctcataaatactactatgagagataaataagatagttacatataaagtgtttatgtagtgcctacctgttagtaactgttcaataattttacctgttttttactatttttttctctgctgagcaagagcagaagaaagtagtgaggaagaagcgttgttggtgtgatcttcctttttttctctattttctcaaccatatgctcactatgacaggaaaaaaaaaaagatttaactgcaggcacggacttgcaaataggtgtaataatctttctgagtttcctccactgctaaatgttacttctacttatattactatggataagtcccttaacctctttgagccttattttcttccttcatagtgtggggttgcaacatcagcctatctcataaagtcgtgaaaaccaaacaaagtggtccataagacagtattatgttcattgttaagaactattttgtagaagttaagatggca

SEQ ID NO: 394213 - DNA, 435 bp, Homo sapiens
cttaaaaaaacttactatgttttggatatctttgaatatcagtctatagagacttattatttttaacagttgaataatattacattatgtggttgtaacataatttatttacaaaatcctctattgatggatatttaagctgtttccattttaaaaaatcattgtaaacaatgctgtaatgaacattcttaggcatatatctttgtgaatctgtgaatatttttttattttcttttttttttttgagacttgagttttgcccttgttgcccaggctggagtgcaatggtgccatcttggttcactgtaacctccacctcccgggttcaagcgcttctcctgtttcagcctcccaagtagctgggattacaggcatgtacaaccacccccagctaattttttgtatttttagtagagacggggttttaccatgttg

SEQ ID NO: 394214 - DNA, 253 bp, Homo sapiens
ttcaccaaggcccacagagcccagcgtggtctggccctgactctgctttctcccctcgccccagctgcacattaacaagactggccccttctctgttccttgaatatgtcaacctcagtcttgccttaggtcttctgcccttttcccatcctgctcttgatcattttgaatggctggtttcttccagaactcaggccttgcctgactatttaatccaacctgacttcccagctactctacatcacatcactct

SEQ ID NO: 394215 - DNA, 447 bp, Homo sapiens
cttcccctccccacatcacggcgggctgatggccctttccaaattgcctacaatgctcagccacgaagctgccaaggactcagaagcttggcttctcaggtagacgatgtgaaggtgaaggcggttgtcttgctgtcgtgacttgcatttaaagcccagtacctcagctccacactcacccagtcccgtcctggtcttcatcccagcttctctctgacctacgcttagcctctcctgcctggctcagcgcacccactctcaactctcaggggaaagaaagcccagtcccaggtctcagcccacccttcctttgtgctgtcccttcccccacaaacctgccctaagaaggatgacgactgatgacaacagtcaacatttactgagtttgttaggcaccagccactgtcattatagtatttataatactattatacaattatataatca

SEQ ID NO: 394216 - DNA, 487 bp, Homo sapiens
tacaccacctgagtctcaaaggacctgcctgataattctcaaaaggaaaaaaaacagctattaaatgtagaaaaaaggttcaactatctagcatctcaaaaaatgcaaattaaaacaaggtacctttttttgcctatcaaattaataaagattaaaaaacaaactgatagtaatactggcaaagctgcagtgaaacgaataacaaactctcacacactcacagctagtggaactgttcactggctctttccggaaagttattcagatgtacatataccttgattctgactctttgactcagtaattccactttcagacatctactgtgaggattagaaggccttagacacaaagctgtccattgcagcaccatttatacaaagtttgaaaatctacataaccaacaggtaggaattttttaaaaattaattttagcacatctatgcaaatttatatgaaaaagagttcttaatgacatgaatagctg

SEQ ID NO: 394217 - DNA, 423 bp, Homo sapiens
cctcctcctgggcgaattcctcctcctcctgggcgaattcctcctcctcctgggcgaattcctcctcctcctccctatgtatccaaaactgggcttggcatcgctgttcctgagggagcgctctgtccttattagggatccgcctggtgacctcagatttacacttaagcttcaactttgttgagggaaaacattttttctctgtcaccaagagaatggagaacactgtgatcgcttttcaagtctcacctgccaggaaatctttattttgcggggggcatcacaacttcctctttttccatgtaccttagtttactattactttaagtgttttggttggattaacttcctgtatttgttcttattttaaatacattctttagttaaagtgttactcagtgaatggaaagagaaaaacaaggc

SEQ ID NO: 394218 - DNA, 583 bp, Homo sapiens
gcgcactcagaaagctcaccttttccagtctctgtccaggaacgtggcctgatacaactgcactgattgactcgtggaagtaacgagagcattgccctgctggagacttggcctgcgtaggcgtgttctcccgtccgcatctgccaagtggaacagctttgccctttagggacataggcaaacgtctgaagactttaaatttttaattgatagactttgtttcatagaacagttttaggttttcagaaaaactgagcagaaagtacagagttcacaggtacccctcccttgccctccaggtattcctgctgtcattaccatcttgcattggtgcgctacatttgttacaactgaggggctggtatgggtacattgttactatctgaagttcacagcttaccttagggtttattgtttgtgttggacactgttggttctgacgaatgcataatgaatgacatgcatccaccaggttgggatcatacagaattgtttcactggtctcaaagtctcctgggcttctggaaccattttcgattgtcactaagcgggcattactggcatttcctgggacagcgatgaa

SEQ ID NO: 394219 - DNA, 339 bp, Homo sapiens
gagactgagtctcgctctgttaccaggctggagtgcagtggcgtgatctcagctccctgcaatctccgcctcctaggttcaaacaattctcctgcctccgcctcccaagtagctgggattacagacatgcaccaccacgcccagttaatttttgtatttttaggagaaacggagtttcactatgttggccaggctggtctcaaactcctgacctcgtgatccgcctatcgcggcctcccaaagtgctaggattacaggtgtgagccaccgtgccaggcccacctgcacacttcttaattcctccatttaaatcattaaaaggcatggttttcgtctcaa

SEQ ID NO: 394220 - DNA, 707 bp, Homo sapiens
atataatttgtgaattacctgatgaaattttcctaattttgaatcatccttgcattcctataataaacactgttagaatggctatggtaatattttatttttgcatttttacttctttataaaataagattatagttttgtttgtttcttttaaggctcttatttcagtatcaagggtatgcagggctaactcgggaagctttacatcttttttctaagacctaggatgtagatctagtttacacagtaattttcaactgcaggaatattttgcctcccatgggacatttggaaatatctggagacatttttgtggtcacaactggtcacggtcgggaggtcttattggcattccgtgggtagaggggatgttactaaatgtcccacaacacaccaggagaaccctcacaaagaattgtctggcccaagatatcaatattgctgaggctgacaaaccctggtttaaataaatgtccaatttggaggatgagtctgtctttttccttcttctgcgtattggtctccagattttccatttcttcagttagttttcgtaactgtagattcttaaaagaaatgaacacttctcccatacttctaaggtgttgtaaagatgtgtaaagttttcactttttgcatcatattcacatgtggctatatgcccttttgtcttcaaagttttctttatcttgatcacttatcagagg

SEQ ID NO: 394221 - DNA, 624 bp, Homo sapiens
agttgatgaggttattttaagacatattaatataaagtaatttggaaatattcagaagaagatgacaaggacaaccccaggttgtagaggagaggactgggttggacattcagattgcattattacatgagctttaaatgtcttgttagtactgttaaaattttttatgcatttgggtagatttgcctacagtatactatcactataactagtatatttattcaattaatttccaagtgcaaatagtgataacacagccattttatcagggataaacatattatttaaagaacacacaccttaacctaatcatttgagttaatcattactcctgaattcctattacttgttatgctgaatataaattttcatagatgaaaactcttacatagtgtaagttcctaaaagtacaagtgcataattctccaccagagaatgaaaacattgctatacaaaatccatctgacctttagttttagataaacagaagctactacctgtgtgcagaatagacaaggagattcaatgggaacctcctcctgtacagcccaactgaacaactgccaacacaagcagaaaagcagatctcttttctatcctctgtactcctaggacttgaatttg

SEQ ID NO: 394222 - DNA, 250 bp, Homo sapiens
atggaggcccagcaatgggaatcatagtccagccatgatggcatagtcatgggagaagagagagggtggggatggcttccaggagggtgtgaagagggggtccagtactgaagggggaaaagatgcatcagaattaattaatgtattttgatgatggcaatagtgttggttgagattggtgaaggtagtaatatttgtgatatttttgttgcttttctccctagacattaactatgtgcttattttcccc

SEQ ID NO: 394223 - DNA, 356 bp, Homo sapiens
ccctgcccccaccccccaaaaaatgagaacactaacaactttgatgcttggcaaaaaaaagaaaaaaaaatacatcaataaaacaatttgtggccaggcgcggtgtctcacgcctgtaatcccaacactttgggaggccaaggtgggcagatcatgaggtcaggagtttgagaccagcctggccaatgtggcgaaaccacatctctactaaaaatacaaaaattaactgggcgtggtggcacgcacctgtagtcccagctactcaggaggctgaggcaggagaattgcttgaacccaagaggtggaggttgcagtgagccaagatggtgccactgccctccagcctgggcgacaga

SEQ ID NO: 394224 - DNA, 976 bp, Homo sapiens
aaacattctagctttgatttttctgaagggaatacacttgttttcaattttggggtttttctttggggcacttgcttgactctgtatgaacttgtgatccaaggaaaaaggagaaagaacagtgttggcttttaaaatcaggatggttttatgtttgctacgaaataaggcaagaataaaaaattcttatttttatttatttatttattttttgagatagagtctggctgtgttgcccaggattgcaccattgtactccagcctaggcaacaagagcgaaactagggaggcagagggggtggcgagccaagatagcaccatagtactccagcctaggcaacaagagcgaaactgtactcaaaaaaacaacaaacaccaaaaggggacagtggctaacccaaagtatacagagaacttagatacaaatgccgggaggaattcgcagtggcactcctggggcgggaggacaaagcggagcaacccacgaggaaatggcccccaatgcggggaacaatgtcgacggcccaacaggcgaggtccgaggacgaaataactcactcagaacaagaagcgccacaaaaagagtgacggaatgaggcaacaaagagacgagggacaggggaagcagcagacgtaggaagggacgcacaaagacacaggggaggccaaaagggcaccggagggcgacaggggcatacccaccgaaagggctagtgatgaaccaaagattgcacggggacactgaaagcgaacccgagagaaaatggacgcgaagaaagggccgaggcaagggcaggcacacgggagcaatacacggctcagagccaagtcaaagacgacaatgaggagaggcactagaaacaaaaggaagtaggggcactgagaactcgcagcagcagacaccaaaaataaggagcaccgagcaaccagtagtgccccatccaaaaatcactaagcagagagaaagcaaggacag

SEQ ID NO: 394225 - DNA, 196 bp, Homo sapiens
aaagtatagcctagagaaccctgacattctgcaaaatcaaaacgatttttggactttttgcccattttcactcgcattccccaaaaacatttgggggagaggggcgcggttctaaaagtttcatgacctatagtgacataattgctctgatggctgatgaaatttgtgcttgtttttttttttttttttttttttt

SEQ ID NO: 394226 - DNA, 314 bp, Homo sapiens
gttgagagctgatattcggctctggcataatttctctgccagcagtggggactgagtgggatgtgggagcagaaaggcaggaggaggtgaggcctaaatgcagaaacctggcaaagagcatttgctggcagttcaggcagaaaatgaaggatgtctaaatgagggaggtggcagtagggacgaagagacatggagcaggtgtgaatggtgaccaagacagaggagatgaaccctgcaggaaggccaccaggtggctggcttgggatggctgggtggctggtggtactgatccttgtgcctgggggactgaggca

SEQ ID NO: 394227 - DNA, 275 bp, Homo sapiens
ctgggggctgctatgtgccggatgatggagtcctctgggcctgtacaaggggcaggacctgggccctgggatcaggccaacctgagtcacactcagctgtgtcctgaaggcccccttgagctacagcaaaatctctcaaacacaccagccctgggtcctcacctgtccgtcaggaccacggcaagggacgagaacgccaaggacactccaggtatgcgcacaggcctcagccggtggagaggaaccactgcctcaggcagccacgctctgccttt

SEQ ID NO: 394228 - DNA, 373 bp, Homo sapiens
acggattacctcaacttattttccatcttattttctattgccctataatatgagtgcattaatttttgctaagctggtctaatgattcaaaaacaaaaaaaaagtgcttctcacttgcaaaacaagcactcaatgcctcatgcaagcatatttaaggctttatatcacatcactaacattcattccactgaccaaagcaaatcctatggccaaacccaacatcagtgggatagggctgaacagtaatcaaaaagtacccaacaatgaatgctaaaattttaactgattaggagaaactgcaataaattatttctacatctacatttttacatagagtcaaattcatattaataagaccctgaaagaaaagatc

SEQ ID NO: 394229 - DNA, 480 bp, Homo sapiens
acccagcatgattcatttgtaggcttagtacaaggaccaggaatagctgagatctagctgtgagcagccacaatccaacccagcacatagggatttgtgcagttttaagctccagagagctgtttcgtggtatctatgccaacacgtactgcagataaagcacaaacccaaattgccccactaggtcaggaagcagagttggtgatataagcacctaggaggtggggcagcaagacagacagaaaaggtcaagaaacccattagctagaactccttccttagcccttcatccttccctgctcagcaggggaaggtcttgcctgtctttttggtgatgatgaaaagggacacgcttcagaaatcccaaatgttacctttgaatgtaggcgccccggtgatgcctatctttcctccttacctttgatatcttttttcataatactttatttaatgctgaacgtgttacacaacgtatcagcc

SEQ ID NO: 394230 - DNA, 158 bp, Homo sapiens
ggaccatacctaccttgggagccacagtgagtcggtggcacggtgaaagtgccagcgacttccctggacaggtgtttgtcaccaaacctgggtgtcagggtttagtccacataagcctgagcctcctggggtgggcgggggcagttcctctggacatc

SEQ ID NO: 394231 - DNA, 456 bp, Homo sapiens
gagtccatggtatagaaatgtccccacagataaatacatgtcgccacttttaaaaggtgtcttatctctattatcattttcctagactgtccaagggattgcatttctgcacttccatttgaattacaatgtgcttttgaatgtcagctgaaacattcccagactactttttaaaggagtttttggctgtttaaaaggcatctcaggggttgtgggtggaggaggagaagggaatgattattcaactgtcgccttttctttgaggacagatgtggccaaggggctgatgagagctggataattctccagagccttcagtttcccgagggaacttgcttttaagatggcaacaagatatgaacggagttgttcttagggtctgagacctgcaaggtcttggtttacttcctcagtgattcaatatcctgcggacagttttcgggttccatcttgctt

SEQ ID NO: 394232 - DNA, 376 bp, Homo sapiens
gctgtggaagactctccatcccccttcttggagcaggaccttcagtgatatggacagtgggtgtcaggccagctgacctggttttacttcacaccggcagatccagggatgcagccaccatccactctgctttatttagtgagacagcacttcataccaacagcaggcttaatcacagtctataccaacatttcacttcccatttctatgtctgtactccttgccttttggttatttggggtggggggtggcaatagcatgctgattctatcttccaagcaccctccccaaatctcctacttccctgctgaaaacgattcccttctcatgttaatttgatgacccagccagctgcacccctccgcccccgcacccc

SEQ ID NO: 394233 - DNA, 368 bp, Homo sapiens
acagtggaagagggaggcagtggtgacagtggagagggaagacagtggggaggtagaagggaggagggtaggacagtccagcccccattggcaggggcagctggggagagcaggccccgcctttgtgtgccccagggcctgggcctgcctggttaagagtctgcacactcctagagctggagcttctcaatgtcgctcttggaaggtgaccccacactccgctggggataatgcagggggcccaggggtcctccctgggaaaagtgtgctgtgccccgccatagggttcgtggcagaagcccctcccctgagctcaggcctcacctccggccactgaagacaaggagatgcagagaggaggcctctgg

SEQ ID NO: 394234 - DNA, 847 bp, Homo sapiens
tacccctcctccccaggactggtgctgtggtgggtgcttatggagtgtgggggctggtctcccctttcctgagttaccgtggatccctaatgaattcaacaatcctgtgcttggcttattggggacatagacctctaaccaagtcctgtccacccacccggcactcttcagccctgccctgtgcccttggctcatcttttccatagggcccagcggataactgcacctgctctttctgccaggccaggccaggcctgggctggacccaggaagagctcagtacttctgtgagctccctgaggatgaacttcctcctgctgctgccctcaggagccagcacagggccaggcctgggaagcgcttagagctgccatgggaaaggggcctctgccacctcctgcccagacagcagggctggcctgtgggaaagctgagtgtaggtctggtggtggaaggtcaaacaggttgtgtgggcttagaggagggagggagcggtttgatggacttcctggaggaggaggcatgccctgagcacaatggagttaataatcccaggtcattatatgaaaaaaagcccctagcagaatgtttggcacatagtgagcgcttagcaagtggtagctgttgtcccagggagaagtgctgagagctgggtgaaggcgcggttgtgaggatgggctccaggttaactgggcactgctgtatggagagtttggggagctgcagaccttctccagtgatgaggatgcgagtagggtggtggtcattcagtacccacttactaaagccccttctgtgctgggaactgctggcggcatggagaggactggccctaggggctcccggc

SEQ ID NO: 394235 - DNA, 320 bp, Homo sapiens
ctggctccaaaaggaatctggaagcttattgggaaatggagaagcaacagcgccaccttcctcagccttgacacacacttgctcatgccctccctctttcccctacccccaagagatgcaatcataatagacggtcatgaatacctagaggacccttggaaggtttatgaaagagttttagggagtctgtgaagcctcacaactttatgcaaacatgtatgtgcctatttggaaaagagggggccacagctttaatcaaactctcagaggatttcataatccacaaaatgttaagcagctttagtctaggagggctttgg

SEQ ID NO: 394236 - DNA, 194 bp, Homo sapiens
tttccaggacaggatttcacctgttgcctgaaatatgtgatcctcccacatttgaatggaccaaaactatgtttgaaatatacagcaagatggccacctgcaaaccaggaagagagcccctaccaggctggtaccttaatcttagacttctcatcctgcagatttgtgagaaataaatgcttgttgttaaagcc

SEQ ID NO: 394237 - DNA, 212 bp, Homo sapiens
tactggtggttagcttgggaagaaagtgaaatgtgacttgcctaagaaagtaagacccctctccccatcacacccatatgtgaaagcttcttgggccattattcttttcatctcagccaatagcctctgtccttgctccttgacatacttcttgatgactggtagtggaccagcaaagtagttaacctgtcccaaaatcacacacgaagaga

SEQ ID NO: 394238 - DNA, 316 bp, Homo sapiens
tttttagccctcttcacttcatgtcctgaccagttttctactttggtcactcaccctgtacagacagactaactagaactctcagatgatagaaaaattcttaactacagtagcccattctgtgccctggaaaatggagcatagctgaatatttggaaatcttatggggaacaactgttattttgcacacttttgtcatttgatgtctgaggatgaatacagacaatggaagtgattgaatgaaatatgtgtccagcccagcatattcctaaatgttgcattagggaaaacaccttaccaattctgtgtttccctg

SEQ ID NO: 394239 - DNA, 1570 bp, Homo sapiens
tgctttgccagttatcccagatcctgcactcactgggagtccatcttgaggaaacactggcatggctgagtaattgatcaggagcagtcctgatgttgccagcagaacaaaggatgattgtgtttttcaaaacgcaactttctcagcacttcactccaaacagcagacttttgaggacagggctggaatttgttttgtgcaatatatgccttcatgaactaaggaatgttcatccccaggcagcatgcaggagggtctgtggggctcacctcctcaccttacccaccatcactcgcgcctagctctcacctctcagttgaatgaatagtgggagatcatttgacttttaatttatgagaattattttatgttatttatgtatataattaactgttttatacatagtagtctcatcaaatgaattcgggcttggggtgatattgtctccattctccagatacaagtgctccaggcatccatggaatcagcaggagaccagggctcctaagatatatttttaaaaatcagtatcgatttctttttgcctttgcagaatctaaagggcaaatgacctcgcagagactcccaacgggctttgggctcatgacgaaacacccactagcattgatcttttattcctcttccctataaaataaaggccttggaaatcacaattttatttttttaaagaagttgttttagtgcctagagtaagaccgcatcaaatgttgttaaagaacctaatttagattgtgtggtatataccactgtttatctcaatacacagacacctcttacttcttgttataagtgagaactctaaagaaaaatcaaactcccaagttttctgtaaacatacgtggtcttaatagggtcactgtctgaggcaaaatgggttgtcttaaagcaattgctacaaatttgcatcaaagaaactagatagcaaaatacaacaaccatgtaccacccaggcagaagagtcctcacctatacgcagttctgcatattgatcatcatgacaggaagtatttcgttttttaactgatcccaggtgcacagatgtattcataaaggaagacattagatccagccattgtggccaccaggctctgtggacccatctcagtggagaattcgttttggacccgtggctccgtgcagctgtggactcgagtgccatccactggtgtgagtcttgcggggaggccacaggtacagctgctccccgtgaatcctggtctgtgggttgagaaggggctcgggcctctggaatgctctagcgtgtgacgtgttctcaggaaaacgttctgtgccaagtgccgcctcgctgtgtccggcatgggactgcgctggagggtccggcgtggaaggcagacctcctgtacctctatcgttcccatttgtggcatccaaaggcggaaggctcatggcttccccactagaggcggcgtcttgggctttcccattggattgtgaaaggcattaagactgtttggagatgttggctgtatttcctgtcacatcaggttgtatgatgacgaataaaaggtgctgtgacccgtgttttcaa

SEQ ID NO: 394240 - DNA, 2372 bp, Homo sapiens
agggaagggcaggagtggtggaggtggtcccaaggcgtgtgtggcttctgggttcccacctgcatcagcagcaccctgacccccagctcatgccctgtgctcctcataggtgctcgcggtgaggatcgatgacctggaccacctcccggagaccaccaccatcgacgcctcctccattggcatcgtccagcctgagctgactctggagcaggaggatttggccgaagggaagcacgggaaagctgccaagcgaagtcacaagagaaagcagaagccagaagaggaggcgggtgctccggtgcccgaggacgccaccttcagcgaatactcagagaaagagacggagttcacaggcagtgtaggcgacgagaccaattccgcagtacagagcattcagcaggtagtggtgaccctgggtgacccaaatgtgaccacaccatcgagctcagtcggcttgaccaacatcaccgtgacccccatcaccactgcggccgcgactcagtttaccaatctccagccggtggccgtggggcaccttaccacccctgaacgccagttacagctggacaactcaatcctgaccgtgacctttgataccgtcagcggctctgccatgttgcacaaccgccaaaatgacgtccagatccacccccagccggaagcctcgaacccacagtctgtggcccatttcatcaacctgacgaccctggtcaactccatcacgcccctggggagccagcttagtgaccagcacccgctcacgtggcgggcagtgccccagactgacgtcttgccacccccgcagccgcaggcacccccacagcaggcggcccagccccaggtgcaggcggagcagcagcagcagcagatgtacagctactgagctgcgttccgggagactcggggcaagaactgcagagggatgtttgggatttgtttagatgtgtttgctggataccaaacaaacaaaaagtcatacattgcaatgtaaggttgacttagctttgcagagtatctccagatcccccgccagcaaccattacggtctgtcagcttaactctagaagggacctctggcaggccagagttttaaactggatggggctccacaccatgccttaccaaggcagtaagtcctgggccggggccgcatctgcctccccttacagaaccagtgttcgcccgacacagggttcgggaaagtgaagctgagagagaagcaggattttaagaggcaggagataagttattaggaacacaaatggttcattttcttttttcttttagagctcggttcctatgagaacacagacagtattcacaggtggcagcaggcagcagggaacattttctcctcacttctggatttttttgcaagcgagcacatagaagttaaagtaacgtgtattctctttgaactaggagtggagtcggttcttatacaactatgggctgaaaccatgaggcgtgctgagccgcacctgatcctgcaaccttcgaggtcatcacggtcatcatgtgcaaggggtcacgtgaggtcactgactccagctcaaaacgcatcttagtaatatccatgaatcgatttccaatagagtttttttccttttttttttttaactttatttcaaacatacattatgtgttcaagactgttatggccaatattgtgttttagttttatgttaacatgataaagtcatgtgcactgtaggaccatctgtccctgtccacccttcacagctgcccagatgcagagggtcgcgcggctgtgtgtgaggagtgagcctccctgctgcccccaggggctcctccgggttgtctcaggattctctgcaatccaaatgtatccattctggctgaagcccagccagaatcccgagtggaagaaacgggggaaaagtcatattttccttctgtttaaacttcaattccaaaggtgcacagatgtattcataaaggaagacattagatccagccattgtggccaccaggctctgtggacccatctcagtggagaattcgttttggacccgtggctccgtgcagctgtggactcgagtgccatccactggtgtgagtcttgcggggaggccacaggaaaacgttctgtgccaagtgccgcctcgctgtgtccggcatgggactgcgctggagggtccggcgtggaaggcagacctcctgtacctctatcgttcccatttgtggcatccaaaggcggaaggctcatggcttccccactagaggcggcgtcttgggctttcccattggattgtgaaaggcattaagactgtttggagatgttggctgtatttcctgtcacatcaggttgtatgatgacgaataaaaggtgctgtgacccgtgttttcaa

SEQ ID NO: 394241 - DNA, 2370 bp, Homo sapiens
tgctttctcttattagcgattggtactgcaaatacctttattgctctttgtagctttgtggtgggattttcatttaccaacagcagggcacttcagaggaatggatagaaaaggaagcatctgttttccgtctttttcgtgcttacttttttcaatttttttctagccagtgaaattaatttgtttcttagttccttctcattgccttcatgattgtgtctgtttcttgtttttgtttctcgctggaatttttccagaacaaaattaactcggtttcctctttcaccaaagaatgtcgtgcttctttggtgtggtaacacagagcgcatcctggggaggtccttgcgttccccattttgcaaaaatgaacggatttttgttgtgtgtgaatcttccaggtagtggtgaccctgggtgacccaaatgtgaccacaccatcgagctcagtcggcttgaccaacatcaccgtgacccccatcaccactgcggccgcgactcagtttaccaatctccagccggtggccgtggggcaccttaccacccctgaacgccagttacagctggacaactcaatcctgaccgtgacctttgataccgtcagcggctctgccatgttgcacaaccgccaaaatgacgtccagatccacccccagccggaagcctcgaacccacagtctgtggcccatttcatcaacctgacgaccctggtcaactccatcacgcccctggggagccagcttagtgaccagcacccgctcacgtggcgggcagtgccccagactgacgtcttgccacccccgcagccgcaggcacccccacagcaggcggcccagccccaggtgcaggcggagcagcagcagcagcagatgtacagctactgagctgcgttccgggagactcggggcaagaactgcagagggatgtttgggatttgtttagatgtgtttgctggataccaaacaaacaaaaagtcatacattgcaatgtaaggttgacttagctttgcagagtatctccagatcccccgccagcaaccattacggtctgtcagcttaactctagaagggacctctggcaggccagagttttaaactggatggggctccacaccatgccttaccaaggcagtaagtcctgggccggggccgcatctgcctccccttacagaaccagtgttcgcccgacacagggttcgggaaagtgaagctgagagagaagcaggattttaagaggcaggagataagttattaggaacacaaatggttcattttcttttttcttttagagctcggttcctatgagaacacagacagtattcacaggtggcagcaggcagcagggaacattttctcctcacttctggatttttttgcaagcgagcacatagaagttaaagtaacgtgtattctctttgaactaggagtggagtcggttcttatacaactatgggctgaaaccatgaggcgtgctgagccgcacctgatcctgcaaccttcgaggtcatcacggtcatcatgtgcaaggggtcacgtgaggtcactgactccagctcaaaacgcatcttagtaatatccatgaatcgatttccaatagagtttttttccttttttttttttaactttatttcaaacatacattatgtgttcaagactgttatggccaatattgtgttttagttttatgttaacatgataaagtcatgtgcactgtaggaccatctgtccctgtccacccttcacagctgcccagatgcagagggtcgcgcggctgtgtgtgaggagtgagcctccctgctgcccccaggggctcctccgggttgtctcaggattctctgcaatccaaatgtatccattctggctgaagcccagccagaatcccgagtggaagaaacgggggaaaagtcatattttccttctgtttaaacttcaattccaaaggtgcacagatgtattcataaaggaagacattagatccagccattgtggccaccaggctctgtggacccatctcagtggagaattcgttttggacccgtggctccgtgcagctgtggactcgagtgccatccactggtgtgagtcttgcggggaggccacaggaaaacgttctgtgccaagtgccgcctcgctgtgtccggcatgggactgcgctggagggtccggcgtggaaggcagacctcctgtacctctatcgttcccatttgtggcatccaaaggcggaaggctcatggcttccccactagaggcggcgtcttgggctttcccattggattgtgaaaggcattaagactgtttggagatgttggctgtatttcctgtcacatcaggttgtatgatgacgaataaaaggtgctgtgacccgtgttttcaa

SEQ ID NO: 394242 - DNA, 2219 bp, Homo sapiens
ggcatcaaggagtacgagtgcaaggagtgccaccgcaggttcgcgcagaaggtcaacatgctcaagcactgcaagcggcacacggggattaaagatttcatgtgtgaattgtgtgggaagacattcagcgagaggaacaccatggagacccacaagctcatccacacagtgggcaagcagtggacgtgctccgtgtgcgacaagaagtacgtgaccgagtacatgctgcagaagcacgttcagctcacacacgacaaggtggaggcgcagagctgccagctgtgcgggaccaaggtgtccaccagggcctccatgagccgacacatgcggcgcaagcaccccgaggtgctcgcggtgaggatcgatgacctggaccacctcccggagaccaccaccatcgacgcctcctccattggcatcgtccagcctgagctgactctggagcaggaggatttggccgaagggaagcacgggaaagctgccaagcgaagtcacaagagaaagcagaagccagaagaggaggcgggtgctccggtgcccgaggacgccaccttcagcgaatactcagagaaagagacggagttcacaggcagtgtaggcgacgagaccaattccgcagtacagagcattcagcaggtagtggtgaccctgggtgacccaaatgtgaccacaccatcgagctcagtcggcttgaccaacatcaccgtgacccccatcaccactgcggccgcgactcagtttaccaatctccagccggtggccgtggggcaccttaccacccctgaacgccagttacagctggacaactcaatcctgaccgtgacctttgataccgtcagcggctctgccatgttgcacaaccgccaaaatgacgtccagatccacccccagccggaagcctcgaacccacagtctgtggcccatttcatcaacctgacgaccctggtcaactccatcacgcccctggggagccagcttagtgaccagcacccgctcacgtggcgggcagtgccccagactgacgtcttgccacccccgcagccgcaggcacccccacagcaggcggcccagccccaggtgcaggcggagcagcagcagcagcagatgtacagctactgagctgcgttccgggagactcggggcaagaactgcagagggatgtttgggatttgtttagatgtgtttgctggataccaaacaaacaaaaagtcatacattgcaatgtaaggttgacttagctttgcagagtatctccagatcccccgccagcaaccattacggtctgtcagcttaactctagaagggacctctggcaggccagagttttaaactggatggggctccacaccatgccttaccaaggcagtaagtcctgggccggggccgcatctgcctccccttacagaaccagtgttcgcccgacacagggttcgggaaagtgaagctgagagagaagcaggattttaagaggcaggagataagttattaggaacacaaatggttcattttcttttttcttttagagctcggttcctatgagaacacagacagtattcacaggtggcagcaggcagcagggaacattttctcctcacttctggatttttttgcaagcgagcacatagaagttaaagtaacgtgtattctctttgaactaggagtggagtcggttcttatacaactatgggctgaaaccatgaggcgtgctgagccgcacctgatcctgcaaccttcgaggtcatcacggtcatcatgtgcaaggggtcacgtgaggtcactgactccagctcaaaacgcatcttagtaatatccatgaatcgatttccaatagagtttttttccttttttttttttaactttatttcaaacatacattatgtgttcaagactgttatggccaatattgtgttttagttttatgttaacatgataaagtcatgtgcactgtaggaccatctgtccctgtccacccttcacagctgcccagatgcagagggtcgcgcggctgtgtgtgaggagtgagcctccctgctgcccccaggggctcctccgggttgtctcaggattctctgcaatccaaatgtatccattctggctgaagcccagccagaatcccgagtggaagaaacgggggaaaagtcatattttccttctgtttaaacttcaattccaaaggttggtgtatttcatgaccagttttctataaaaatattgaatga

SEQ ID NO: 394243 - DNA, 2608 bp, Homo sapiens
ggcatcaaggagtacgagtgcaaggagtgccaccgcaggttcgcgcagaaggtcaacatgctcaagcactgcaagcggcacacggggattaaagatttcatgtgtgaattgtgtgggaagacattcagcgagaggaacaccatggagacccacaagctcatccacacagtgggcaagcagtggacgtgctccgtgtgcgacaagaagtacgtgaccgagtacatgctgcagaagcacgttcagctcacacacgacaaggtggaggcgcagagctgccagctgtgcgggaccaaggtgtccaccagggcctccatgagccgacacatgcggcgcaagcaccccgaggtgctcgcggtgaggatcgatgacctggaccacctcccggagaccaccaccatcgacgcctcctccattggcatcgtccagcctgagctgactctggagcaggaggatttggccgaagggaagcacgggaaagctgccaagcgaagtcacaagagaaagcagaagccagaagaggaggcgggtgctccggtgcccgaggacgccaccttcagcgaatactcagagaaagagacggagttcacaggcagtgtaggcgacgagaccaattccgcagtacagagcattcagcaggtagtggtgaccctgggtgacccaaatgtgaccacaccatcgagctcagtcggcttgaccaacatcaccgtgacccccatcaccactgcggccgcgactcagtttaccaatctccagccggtggccgtggggcaccttaccacccctgaacgccagttacagctggacaactcaatcctgaccgtgacctttgataccgtcagcggctctgccatgttgcacaaccgccaaaatgacgtccagatccacccccagccggaagcctcgaacccacagtctgtggcccatttcatcaacctgacgaccctggtcaactccatcacgcccctggggagccagcttagtgaccagcacccgctcacgtggcgggcagtgccccagactgacgtcttgccacccccgcagccgcaggcacccccacagcaggcggcccagccccaggtgcaggcggagcagcagcagcagcagatgtacagctactgagctgcgttccgggagactcggggcaagaactgcagagggatgtttgggatttgtttagatgtgtttgctggataccaaacaaacaaaaagtcatacattgcaatgtaaggttgacttagctttgcagagtatctccagatcccccgccagcaaccattacggtctgtcagcttaactctagaagggacctctggcaggccagagttttaaactggatggggctccacaccatgccttaccaaggcagtaagtcctgggccggggccgcatctgcctccccttacagaaccagtgttcgcccgacacagggttcgggaaagtgaagctgagagagaagcaggattttaagaggcaggagataagttattaggaacacaaatggttcattttcttttttcttttagagctcggttcctatgagaacacagacagtattcacaggtggcagcaggcagcagggaacattttctcctcacttctggatttttttgcaagcgagcacatagaagttaaagtaacgtgtattctctttgaactaggagtggagtcggttcttatacaactatgggctgaaaccatgaggcgtgctgagccgcacctgatcctgcaaccttcgaggtcatcacggtcatcatgtgcaaggggtcacgtgaggtcactgactccagctcaaaacgcatcttagtaatatccatgaatcgatttccaatagagtttttttccttttttttttttaactttatttcaaacatacattatgtgttcaagactgttatggccaatattgtgttttagttttatgttaacatgataaagtcatgtgcactgtaggaccatctgtccctgtccacccttcacagctgcccagatgcagagggtcgcgcggctgtgtgtgaggagtgagcctccctgctgcccccaggggctcctccgggttgtctcaggattctctgcaatccaaatgtatccattctggctgaagcccagccagaatcccgagtggaagaaacgggggaaaagtcatattttccttctgtttaaacttcaattccaaaggtgcacagatgtattcataaaggaagacattagatccagccattgtggccaccaggctctgtggacccatctcagtggagaattcgttttggacccgtggctccgtgcagctgtggactcgagtgccatccactggtgtgagtcttgcggggaggccacaggaaaacgttctgtgccaagtgccgcctcgctgtgtccggcatgggactgcgctggagggtccggcgtggaaggcagacctcctgtacctctatcgttcccatttgtggcatccaaaggcggaaggctcatggcttccccactagaggcggcgtcttgggctttcccattggattgtgaaaggcattaagactgtttggagatgttggctgtatttcctgtcacatcaggttgtatgatgacgaataaaaggtgctgtgacccgtgttttcaa

SEQ ID NO: 394244 - DNA, 2379 bp, Homo sapiens
tctgcaactaaaggaacttgccccgatccttagaaatacaagacccagctgtggtcactgtttcttgtggcagctcggtggcccacaagcgtccccactgattggagagtgtgtccagggcagtgctggggctgccctggccgctgcctgacgtgaccgactaacctggttctcggctgaaaccgatttttctgcagcctgagctgactctggagcaggaggatttggccgaagggaagcacgggaaagctgccaagcgaagtcacaagagaaagcagaagccagaagaggaggcgggtgctccggtgcccgaggacgccaccttcagcgaatactcagagaaagagacggagttcacaggcagtgtaggcgacgagaccaattccgcagtacagagcattcagcaggtagtggtgaccctgggtgacccaaatgtgaccacaccatcgagctcagtcggcttgaccaacatcaccgtgacccccatcaccactgcggccgcgactcagtttaccaatctccagccggtggccgtggggcaccttaccacccctgaacgccagttacagctggacaactcaatcctgaccgtgacctttgataccgtcagcggctctgccatgttgcacaaccgccaaaatgacgtccagatccacccccagccggaagcctcgaacccacagtctgtggcccatttcatcaacctgacgaccctggtcaactccatcacgcccctggggagccagcttagtgaccagcacccgctcacgtggcgggcagtgccccagactgacgtcttgccacccccgcagccgcaggcacccccacagcaggcggcccagccccaggtgcaggcggagcagcagcagcagcagatgtacagctactgagctgcgttccgggagactcggggcaagaactgcagagggatgtttgggatttgtttagatgtgtttgctggataccaaacaaacaaaaagtcatacattgcaatgtaaggttgacttagctttgcagagtatctccagatcccccgccagcaaccattacggtctgtcagcttaactctagaagggacctctggcaggccagagttttaaactggatggggctccacaccatgccttaccaaggcagtaagtcctgggccggggccgcatctgcctccccttacagaaccagtgttcgcccgacacagggttcgggaaagtgaagctgagagagaagcaggattttaagaggcaggagataagttattaggaacacaaatggttcattttcttttttcttttagagctcggttcctatgagaacacagacagtattcacaggtggcagcaggcagcagggaacattttctcctcacttctggatttttttgcaagcgagcacatagaagttaaagtaacgtgtattctctttgaactaggagtggagtcggttcttatacaactatgggctgaaaccatgaggcgtgctgagccgcacctgatcctgcaaccttcgaggtcatcacggtcatcatgtgcaaggggtcacgtgaggtcactgactccagctcaaaacgcatcttagtaatatccatgaatcgatttccaatagagtttttttccttttttttttttaactttatttcaaacatacattatgtgttcaagactgttatggccaatattgtgttttagttttatgttaacatgataaagtcatgtgcactgtaggaccatctgtccctgtccacccttcacagctgcccagatgcagagggtcgcgcggctgtgtgtgaggagtgagcctccctgctgcccccaggggctcctccgggttgtctcaggattctctgcaatccaaatgtatccattctggctgaagcccagccagaatcccgagtggaagaaacgggggaaaagtcatattttccttctgtttaaacttcaattccaaaggtgcacagatgtattcataaaggaagacattagatccagccattgtggccaccaggctctgtggacccatctcagtggagaattcgttttggacccgtggctccgtgcagctgtggactcgagtgccatccactggtgtgagtcttgcggggaggccacaggaaaacgttctgtgccaagtgccgcctcgctgtgtccggcatgggactgcgctggagggtccggcgtggaaggcagacctcctgtacctctatcgttcccatttgtggcatccaaaggcggaaggctcatggcttccccactagaggcggcgtcttgggctttcccattggattgtgaaaggcattaagactgtttggagatgttggctgtatttcctgtcacatcaggttgtatgatgacgaataaaaggtgctgtgacccgtgttttcaa

SEQ ID NO: 394245 - DNA, 354 bp, Homo sapiens
agcaaagccccactggaatcttggggtggggcctgggcattggaatttttaaaatgcgcctcaggtgatgcggttgtgtgggcaggtggagactcactggctttgatggagactcttagggaaactttaacgaacatgtgggaatgctttgaggaagaagcaaagggcggcatgaggcactgaaagaaatgagtgcagctgcagaggaaccctcagatctgagttaggttttgaggacttctatgaaaaaatggaattagaagtcaagtaagccagggtgagtgggagagcagcaccagcctgttggttttagagcagggccaggagggttaacagcttcaggatatgccaagg

SEQ ID NO: 394246 - DNA, 366 bp, Homo sapiens
ctatgttgcctaggctggtctcaaaactcctgggctcaagcggtccttccgcatcagccttctgagtagctgggattacaggtgcacaccaccacacctggctaattttatcatttttctgtagagacaaggttctcactatgttgcctaggctgatctcaaactcttgacttaagcagtcttcctgcctgggactcccaaagtgctgggaatacaggcatgagccatcgcatctggccttgagcctcccttcttggcaggctgttagttggggtaaaatatctactgtttgtcgctcctacctattgcaagtcctgtggttaatgaccactatcgcctttgagagtttcattttcttttcttttt

SEQ ID NO: 394247 - DNA, 265 bp, Homo sapiens
actgctgagaagtgttgccttctcttatatttagaagaggttctgtagagtgtgtgctcattgtttgaatgtttcctggaattttccagtgaaaccatatggacatgtcaatttctgtttttgaagcttttaaatgacaaattctgtatctctggttgttagagaaccgttcatattagttcaccgcgagtcttggctgtgtggggttttgtggcattggcttatttgagctaacttgtggagtgtgtgtgttgagttgtttctg

SEQ ID NO: 394248 - DNA, 485 bp, Homo sapiens
actgtaaatgcctggcatttattctagactctttgataggagagatccttgctattccaatttaggtggctcacagatgatcaatgaatattgcatggttgggtgcgtgaatggaaagataaatggatagatggaagatgaaatgaacgaatgggaagccacactaaatatatgactgatttttgctgaacattctctccctatcctctcccctgcccaacctcaagaaaagataattacaaacactaggcaacagcaggggaaagaagaccaaaaaaaaaaaagaactttgataattgtatcagcaggataagagtgatcattatgaattttgaattaatgtagacacatttttttgatgtgagagcacttgtcaaaaatataaaacacacccagaataaaagtaggatgcagtagtggcttttcctaataaaaataaaatttgctgaagatgcatcttttattttttagagaaaaacatttta

SEQ ID NO: 394249 - DNA, 519 bp, Homo sapiens
aaataccacactccaccccaggagagtggtcaacaggcagcaggaaaaggcttgccccagctacgggtgcagctgcaaaccatgttgggttagaaaggtgagggtatcaggtgtggtggtagaagagttaagaaggaagaagaggccaggcgcggtggttcatgcctgtaatcccagcactttgggaggccgaggcaggtggatcacaaggtcaggagttcgagaccagcctgaccaacacggtgaaccctcatctccactaaaaatacaaaaattagccaggcatggtggtgcgcgcctgtaatcccagctattcaggaggctgaggcaggagaatcgcttgaacccaggaggtggaggttgcagtgagctgagattgtgccaccacactccagcctgggtgacagaccgagattctgtctcaaaaaaaaaaaaaaaaaaaggccgggcacggtgggctcacgcctataatcccagcactttgggaggccaaggcgggcggatcacgaggtcaggaga

SEQ ID NO: 394250 - DNA, 1225 bp, Homo sapiens
  misc_feature (1225)..(1225): n is a, c, g, or t
gggtatctcaagcctgtaattgggaggctgaggcgggcagatcacctggatcaggagttcaagaccagcctggccaacttgatgaaaccctgtctctgctaaaaatacaaaattagctaggcgtggtggtacgtgcctgtggtcccagctactcgggaggctgaggtgggaggattgcttgagcccaggaggtagaggttgcagtgaatcgagttcatgccttatatgtatacttgtgcttttccttaggatttcccctgaacagttctgttaacctgaattcctgtcctcctcatcttttgtataaagagccactgatggaacactgtgtctttcccttatgtgccatacctgttcatgcctctcaggaaccagaagtgtaaccctcgctcctactctcgacctagcaatctaatccttcttaagagatgttggaagaaaaattattgacactgaaattcataaaaacatgacatcccagaggttgcagtgaaccaagatcgtgccactgcactccagcctgggtgacagagcaagactctttccgcaaaaaaaaaaaaaacaaaccaacaaaaaccaaacaacaatctgggttagggccgcccgccggggcctctagaaaaaggcttttcttagaaccaatttcggtttaggcgacagcaggccaccccagataggtaaactgcggaccctcggcgccatagacggggtccccaagggagaacaccagggagacacaaccatcggggggttgggatctccaccccgaaagtaaaaaacccccccgggggggacacacagtcgcgtttcttggacacaacacccaggcagggactccagcgacgaaagacggggggcaataccacaagggggagccacaagggcgctcccagaaataaaatataacgccagccggggagaaaaacagacacacaagccaacaacaaaaacaacatacaaccaacccaaacaagcacacagagaacgacatcaaacaacacacatagcagcagcagaactacaacaccagaaagcccaacacagagagaatagcccaacgacacacacacaacacagagacaacaaacaaagcaaccacaatagcaagaacaccagtcaaatcaagataacacgataccacaccaaacgcacaaacactcataagacgaaggcgaaccaaacacaaccacgacaccacaaccacaaataaaaccacactacgaan

SEQ ID NO: 394251 - DNA, 259 bp, Homo sapiens
caagtctgagttcctgtcacacgggggtgtgggtgggccactctgaggtctcaatgactgcttctctgtggtcactccccagaaacagggctgggctggttgggtgtccccgagcagagcagggaatgggccagagaaggtccgtgtagaactgtgctgacatccacgtacccacctgacgcccagccccaccacctctctccccgtgagggtcctgtgtggagggcagccctggccccatcagaggcccccaatcatg

SEQ ID NO: 394252 - DNA, 758 bp, Homo sapiens
ggcgccggccgctaagaagccgaaagatgtccaggtcgggcgcggcggctgagaaggcggactccagacagcgaccccagatgaaggtaaatgaatataaagaaaatcaaaacatcgcttatgtgtctctgagaccagcacagactacagttttaataaaaacagctaaggtctatcttgcccccttttcactcagtaattaccagctagaccagcttatgtgccccaaatccctatcagaaaagaattctaacaatgaagtggcgtgtaagaagactaaaataaagaaaacttgcagaaggattatacctccaaagatgaaaaacacatcttccaaggcagaatccacgctgcaaaattcatcctcagctgttcatactgaaagtaacaagctacaacccaagagaacggcagatgcgatgaatctcagtgttgatgtggaaagtagtcaggatggagacagtgatgaagataccacaccatccctggatttttcgggattgtcaccctacgaaaggaagagactgaagaacatatcagaaaacgcagacttttttgcttctcttcagttgtctgagtctgctgcaagactccgtgaaatgatagagaagagacagcctcctaaatccaaaagaaagaagcctaagagagaaaatgggattggatgtagaaggtcaatgcgattactaaaagttgatccttcgggagtttcattaccagcagctccaacaccgccgacattagtagcagatgaaact

SEQ ID NO: 394253 - DNA, 784 bp, Homo sapiens
ggcgccggccgctaagaagccgaaagatgtccaggtcgggcgcggcggctgagaaggcggactccagacagcgaccccagatgaaggtgagaaacggactggtgcttccaaggtaaatgaatataaagaaaatcaaaacatcgcttatgtgtctctgagaccagcacagactacagttttaataaaaacagctaaggtctatcttgcccccttttcactcagtaattaccagctagaccagcttatgtgccccaaatccctatcagaaaagaattctaacaatgaagtggcgtgtaagaagactaaaataaagaaaacttgcagaaggattatacctccaaagatgaaaaacacatcttccaaggcagaatccacgctgcaaaattcatcctcagctgttcatactgaaagtaacaagctacaacccaagagaacggcagatgcgatgaatctcagtgttgatgtggaaagtagtcaggatggagacagtgatgaagataccacaccatccctggatttttcgggattgtcaccctacgaaaggaagagactgaagaacatatcagaaaacgcagacttttttgcttctcttcagttgtctgagtctgctgcaagactccgtgaaatgatagagaagagacagcctcctaaatccaaaagaaagaagcctaagagagaaaatgggattggatgtagaaggtcaatgcgattactaaaagttgatccttcgggagtttcattaccagcagctccaacaccgccgacattagtagcagatgaaact

SEQ ID NO: 394254 - DNA, 344 bp, Homo sapiens
attattctggggtggggtgtgacctgggttttggaacactgaaaaaatcccaggtgatcctaaagtgtagatgagtctggaaaccacacacctaaggcacacttgaatgggggagcagtgaggtggtgtgggctagccggccagaacccaggggtgggaaccaacattgcagatgccataaaggctgggaagcatagtgtctggggcccataacaatgcttggacatgaatgctttagacctaagacaattggctcctaaatgtgaaaactgcaaggctgaaatgaatgcatgtttaatgctttgcaacattgtcaagtggtcagctgcaactccgttctgagg

SEQ ID NO: 394255 - DNA, 362 bp, Homo sapiens
atctaggcaataccattcaggacattggcatgggcaaagacttcatgactaaaacaccaaaagcaatggcaacaaaagccagaattgacaaatgggatctaattaaactaaggaacttgtgcagttttatttgggagtgtgcatgaggtacctctgagtttcaaaaatgaagaaagtaagtggtcatgctttcctgactctttggtagacacagccttttaagacggtgattctgagctgttacggttttgggtttcctataatactgaagcttactgctgacatgtaatcaagagcttgaattaatttaaaaaaatcacccaaatgcacattaaaaacctcttacaacacatgtgcacatt

SEQ ID NO: 394256 - DNA, 320 bp, Homo sapiens
ctactgggtcttatgttgccatagacttttgtgtgaatgttcatagtagctaaattcgtaatagccccaaactggaaacaacccaaatgtccattgatatggtttggctttgtgtccccacacaaatttcatcttgaattgtaatctccaggtgttgagggaggaacctagtggaaggtgactggatcatgggggcaatttcctccatgctgttctcatgacagtgagttctcatgagatctggtggttttataagtgttcgaaagttcctccttcactcttctttcttgccaccttgtgaagaaggtgcttgcttcccc

SEQ ID NO: 394257 - DNA, 312 bp, Homo sapiens
ggtggctgctgctgctggcatatcattaaaactattcctagaatagacttattatttacgtgggagagccctcactgaatttccaccagaaacaagtctattctgtagctcattcgggttggtttggagtgtttgtgtgttccagggtgcatgcttatgtgtgtgcatggtgtgtgtgcgtgtggtgtgtgtgtgtgtgtgtgtgtgtgtctgtgtgtctgtgtgtgtggttgtcctcctgcagcctcagttcagcccagagccctgctggggactcttcctctcctggctaggagtgaggagacctctgcc

SEQ ID NO: 394258 - DNA, 381 bp, Homo sapiens
agtctaatatacccaagacaaccattgaaggaggacagtacctcgtatccactcaatcctgtacattcatcatatagtcagaattcatgatagtattttttgtgacagatagttcagactatcaagattttcaagaaaaatctctaaattggttttggtataaatgtagcagaagaaaaactaaattactacagtaatttatggctttcatttctggggtttccaagaaagttcctgtgaatcctggtatccgatttacttctcacaaggttattaccattcatttaattcacacagctgtaatagttttgttataaaaactagaattaaagttagggatatgataattatcttatttctcagcttgtttttaattgtata

SEQ ID NO: 394259 - DNA, 651 bp, Homo sapiens
tttgggtctcagctgccacctcccttccttggatgctgtcccaaccaccccattccaaaagaggttatcgcttgtgattctctatcactgggccaaatctgcctgttgcctagtgctcctagccctttctatattaattcatttcattatttcagccctgtctcctccactaggatataagctgcacgagagatgggctatgtctcttactcactgttgggcctcccaggacctcagcacagggcctgacacacagtaggtgggttaatagatactgattgaatgaaagaacaaggtgggtactaaaatcccccttttaaagaggaggcttggagttatgaggttgtacgagcaaagcttattccctaactaccacagtcccccccctgcagccagggccgggatcataccacaattccctgcccatcaagctgtcatgaatagccctaagatatcaggaagcacaaagatatcaatgccaggagggataggaggaggcggccaagaaaccccggaatttgtacttaaaattctggctacgcaaactgcttgcccaactttagacaccatgatgaatgatcaggtgctgcaaccatgaaacatgacgtaattagtgctgcactcttggctgggggttggcttggaggcccc

SEQ ID NO: 394260 - DNA, 421 bp, Homo sapiens
aacttcctctgggcacagtcttgcctaacttctccagcctatcagtgcttctcttctcagacagtttaacattcactttctgtttcatttgtggctattctgttgccccaaatagacttcgagtcctctgagtaccaagaccacatcatctccttctttacagacccttatctacaggcacgcttccaggatcagccctatacaagttttgcctggttgattgggttgagtctctagagtgaggcctgcaagatagcatctatgcgattcagggggtcagggtctctgtgagggaggaagggaagcaccttgtgtgcctgctgaactcctggcagctagcccacccacccaagaccagggaggacttgccagagcaagcaggtagtttggttggcgtttgccatgggcggttgtattttcc

SEQ ID NO: 394261 - DNA, 151 bp, Homo sapiens
ctcgagctcagtacgtagcgctgcatggtaactgccaggcaaaattaaagctcaagatgtctttaagcttctaatttagaagatgtttagaatagatattggagtcatctgtgtaaagccatggactcaccaggaagagaaccaaaaaggt

SEQ ID NO: 394262 - DNA, 226 bp, Homo sapiens
aaactgcctaggttcaaatccttactccattccttacaactgtgtgataatgggcaaactgttagcctatgactcagtttcttttcccagaatgggaatagcacctccctcagggttatgtgaagataaagtgagataacttgtttactcaaatatttattcatcatctgctatgtaggatactgttctggatgatgaaaacattagtgcacaagacagagtctct

SEQ ID NO: 394263 - DNA, 106 bp, Homo sapiens
gggtgtcaggcacatttcttcattcacattgcataccagagaacagtgtagatgctgggcagtgcctagaagatgcgagatctgactcgcagtcatgtctcagcat

SEQ ID NO: 394264 - DNA, 302 bp, Homo sapiens
ctatacctcagccacctgagtagctgggatcacaggcgcatgccacaacgcctggctagtttttgtatttttagtagagatagtgtttcaccatgttggtcaggctggtctcaaactcctgacctgaaatgatccgtctgtcttggcctcccaaagtgctgggattacaggcatgagccaccgtgcccggtatcatatttatcatttttgtatatcataataattagacatgatcctgttggtctcctaaatactttttgctactacatgaataaaatcagcatcattgagaggataagtaa

SEQ ID NO: 394265 - DNA, 207 bp, Homo sapiens
gccgcctgtaatcccagctacttggggggctgacgtaggagaattgcttgaatccaggaagcagaggttgcagtgagccgagaccgtgccattgcactccagcctgggcaacaagagtgaaactccatctcaaaacaaaaaagagattctcaatgcagtggtaatttccgacaatcctagcatctactcttcacttttcactgccca

SEQ ID NO: 394266 - DNA, 554 bp, Homo sapiens
ttctaacaaaatgttttcaccttctaatcctattgtgttcaaaccctgggtgcaggggaacacctgaatgcttttgagggcaaggcaggtaacataaacatgtgttgaacaggctgcttgggaactttggcaaattagagaatggaaatctccttagaagtgggcgtctctaggaatgtgtaacctaccatgcatactgtgaaccactgtagcttccacggtagagtatgcctggagtgggggtacagagggaaaaagcaacatcttgatattttcagcacctcaccagagacatgaggttcaggttcgattaggagagggggctagatgtggtcttaaacatttgacacgccagaccacaacaccatttctgctttcaagatacctttcaccaactgactgtagttgaaggcttccgaccatttcatccagctcaaagagcaatttggacctaaagggatacctcttgaagaagaaaaatataaactaataagtaaaaactaaaatcaatgaaaagtttcttttcagtattttatgcttatgtttcgactctg

SEQ ID NO: 394267 - DNA, 684 bp, Homo sapiens
aaaaagtttttctggagaattatttttgttatatgctacaagctaggcctactgggaaggccaggatccaaagacactcccaaagttgtgcaacgctcagcctgtgcaactgtacctgggagccctaagcagaggacagaagatggtaagtgggcagaagtaactaattgcaaaaagtcttccttattgggtaagttatctgggtgaataactttgggaaaccagttcttctgggggggcaaaggcccatgtgatcaatgcagaagttacccacagaagctgtgtgcagccactgttaaccaggagagagggtctcatagagagggaagaggcaaacaggatcccatgtgcaagctaagaatcaggacagcaaagctagcctaacaagggccaggtgtcaaaaggcagtgggctccaacagggctgctacctcactagtgtaactgacagtgtaactgacaggctgctgcttcaataactgcacgctaggcgtggtggctcacacccgtaatcccagcactttgggaggcggaggcaggaggatcacttgaggccaggagttcaagaccagcctggccaacatagtgagacccccccacgtctctaagaaaaacgttcaaaattagccaggcatggtggtgtgcatgtgtagtcccagctacttgcgaggctgaggtgggagga

SEQ ID NO: 394268 - DNA, 752 bp, Homo sapiens
aaaaagtttttctggagaattatttttgttatatgctacaagctaggcctactgggaaggccaggatccaaagacactcccaaagttgtgcaacgctcagcctgtgcaactgtacctgggagccctaagcagaggacagaagatggtaagtgggcagaagtaactaattgcaaaaagtcttccttattgggtaagttatctgggtgaataactttgggaaaccagttcttctgggggggcaaaggcccatgtgatcaatgcagaagttacccacagaagctgtgtgcagccactgttaaccaggagagagggtctcatagagagggaagaggcaaacaggatcccatgtgcaagctaagaatcaggacagcaaagctagcctaacaagggccaggtgtcaaaaggcagtgggctccaacagggctgctacctcactagtgtaactgacagtgtaactgacaggctgctgcttcaataactgcacgctaggcgtggtggctcacacccgtaatcccagcactttgggcagtttttaaggctgggtgcagtggctcacatctgtaatcccagcacttgggcagggcaaggcgggcagatcacctgaggtcagaagtcggagaccagcctggccaaacatggcaaaactctgtctctactaaacatacaaaacctagccaagccatggggccgggtgcctgtaatggcagctactcagaaggctgagccaggagaatcgctcgaacccggcaggc

SEQ ID NO: 394269 - DNA, 368 bp, Homo sapiens
tcccatctctgccagttgtcttcctgcttcgacagaaccaaccccaggcacaggcaccgaggaaggtgaccagacctgcagtcacttgctttagtttcctggggttgctgaacaatgtaccacaaactgggtgttaaacttcacaccacaggaatgtattctctcgtagttctccaggccaaaagcccaaaattcatgtggactaaatgaccaagattgtcagatggtggctcacatctgtaatttcagcactttggaagcaaagcctagaggatcgcttgagcctgggagtttgagaccagcctgggcaacatagtgagaccccacctctaaaaaaaaaaatagccgggcgtggtggtgggcgcctg

SEQ ID NO: 394270 - DNA, 269 bp, Homo sapiens
gttggtgggaggaatgagaacctggaggctgtcctagctgtctgtgacttgatttagcatagggggaaagggctgacctttttcctgccagcagtactgtcaaggcctgcccaggtggcagccgaagtagctcccttcatgcccactgcacaccacagcatggtggcaggggcgcctgcagtctgtgcacatgcacacatgatcgttctctgcaccccttatcggaactgcgggttgggcaggaagcagcatgaccgcagtgggttcct

SEQ ID NO: 394271 - DNA, 404 bp, Homo sapiens
ggctggctgcagggaagggacccagggtggagactggcaagctatgggcagtgagcctagaatgccccagagaggccagagcaggctcagcactgactgaagttggggcatgtggggccagagggcctggaagccaggggtgcccggttccacaggtgccaggcgcgtcccccaccaccgggggaagtgctgtgctccctctactctggagatcaggaccaggctggcctgcacccccaggggagcagatgcgactcactggctccctctaagagggcttcctcctcatctctctaatcaactgtccccatcctcaggggctcagagcagaaaggtggcccaggacacctggatgtaagggacgagcccacccctggaacccaggattcctgactcagcttgtg

SEQ ID NO: 394272 - DNA, 314 bp, Homo sapiens
attgtctgccatgtacccggcattgcattacgtgttagagtacattgatgaacaaaaccagtcaaggactactctgcaaggaaattatagaccagcatgaaatacattaaacatgatctcaaatgattaggcaactacagtgattgaggactgtggtaaggatgccttaattgttgagttttcatactcagaactctgacgttcagcacttttttttttttttttttttttttttttgacggtgtctcgctcttgttgccctggctggagtgcagtggcgtgatcccagctcactgcaacctctgcctcctggg

SEQ ID NO: 394273 - DNA, 218 bp, Homo sapiens
cactataaagttatacagcaattccttctacatctcaattattaagtattactattgggagaggtgtatctctacaaaatttaagtaatattcataataaaattaccaaagagaaaaatagaaaaaaaaatttttttgaggcaaggtcttcctctgtagcctaggtggctttatttgtctgatccctatcctgcctgccaccctcactccttcaccca

SEQ ID NO: 394274 - DNA, 411 bp, Homo sapiens
gctcggtttccaggaccagtcttaacatgtggatcttgttgcttacacattaagacaaaatgccaattttgggggctgggggaataaggcatcaagtttgccccatgtgtagattcactcgtgtctgaccaagtgcaccctcggagtgttgcctacacagaggctggcttttccctaacgtccttcttttccgcagatcttcagaaaggctttctctgatagggcagtatgttaattcctgtgattgctgtaacaaaatacctcaaactggggggcttaaagcaacagaaagttgtgctctcacagttccggagtccacaggtctgaaatccaggtgtgggcagggccgtgctccctccgaaggctctaggggaggatccttgctcaacttatttttaagactggtcctgc

SEQ ID NO: 394275 - DNA, 135 bp, Homo sapiens
ggattcagtttcctgaagtgtcaaatcaatgaggtggaccagagcttctgcagctctagcttcctaccctgcatgattctagaacctgcgtaactccagcatggctggaaatggagcccgtgaatggtgggttgt

SEQ ID NO: 394276 - DNA, 187 bp, Homo sapiens
aaaaacctgtagtcggcagaaatgtcttctatattctgatgatcagctggctatcactctggttttagcattgtcagttttcatcttttttatatgccttcatatgtaattatgatggaaagctgggagaaactattactggggcaagatgtatttttcctgtgtaactgagatgaattgttagttt

SEQ ID NO: 394277 - DNA, 132 bp, Homo sapiens
gggtatgtcattggattccattttaattaatggatgaggctgacccatttcagagagcctttttaaaaggaaactttagactacccactggagagattcttaggaagattcccataggatgagtacaaagtt

SEQ ID NO: 394278 - DNA, 223 bp, Homo sapiens
cacacctctcttccccacaatagggtagccttgacagatgatcctaattctcctttgatgacattttcaaacttacaaagttgtctaataaggatcattatgcacttcagtgtgagctccattcaccactatactgctcacatagctatcaactaacaagaaatgttgaggactcatcttttcaagaattacaatctatacaacccataatagtgttaaagct

SEQ ID NO: 394279 - DNA, 477 bp, Homo sapiens
  misc_feature (2)..(3): n is a, c, g, or t
gnnacaggagttttgttacccaggctggatttcggtggtgggatcttggctcactgcaaagaaatgaacaaaaattcaggcaacgtagtgagactctgtctcctgcggttgatacctgttctacctcccatggctactcttgctcccttcccatttgcaggggctgttaggactccactgaacagttcagtgcctttttattgagtgcctatgagatgccaggccctgtcctgggtattgtgggcactgtggagcgagatgtctttgaccctaaagagcttttattccagttcagggagagagactaggcgagacatgaaatatacagggtcacaggagtctcagtggactggggtcaggagaattgcttgaacctgggaggtggaggttgcggtgagccgagattgcaccagtgcactccagcctgggcaacaagagcgaaactccatctcaaaaaaacaaaacaacaacaacaat

SEQ ID NO: 394280 - DNA, 512 bp, Homo sapiens
tcagcattgtgttataatctgggaatacaaaaagtatttagaaaaaaatgcctatatatttgtctccctcagcagaattgagttcttctagagtggataccctgcctgccttattcacaactgggtctccaacacctagaaaaatttctggtatacagcaggcactcaattaatgtggcttgattagataaatcaggacaatcactgtcttcaagaagattaaagtccagtggaggagaaagatatgtaagcacaatgaagtgtggtaagttctgtgacacaggaaatcataaaactatatgtcaacaaacagagggtgggcgtgagggaggagtgaataaggcttccaaaagatgatgcaatgtgggacattaatggatgaacggaacattgcccatttgtgccatggttctcctcccctattcttctctttgaggattctagatttcatgtgttctcttttgatggcttgggacaatgggcagagatgagcactctgggcctgctgtgtc

SEQ ID NO: 394281 - DNA, 248 bp, Homo sapiens
agagtttgcagggttcagaagaagacaggaagatgagggaaagtctggaacttcttagagatttgttaaatggttttgaccaaaatactgatagaaatacgggcagtgaaggccaggctgacaaaagtctcagatggaaatgattaaagatagtaccttttaaaatttcaacttcagttcttcattactagtatatagaagtacaataaactgctatataatgaccttgtagcctgtgaaactacttc

SEQ ID NO: 394282 - DNA, 297 bp, Homo sapiens
cccccgctccaggctcaagcaatctctacctcagcctccctagtagctgagactatagggacatggcaccacacctggctaattttttgtactttttgtagcagatggggttttgccatgttgcccaggctggtctcaaactcttggtctagtccagtcccctcaaaccccaggcatgcggcccacaagggtaagagacttggtcaggagtagagttcagaccagagttcagagcccttgatttcaaattcaaggcaagtttgtttacttttgggaaattcctagagaggagaatga

SEQ ID NO: 394283 - DNA, 528 bp, Homo sapiens
tatcaggaaggccgcccctctcttggtggctgactctgtggctctgtaatactaggaaggccgcccctctcttggtggctgactctgtggctctgtaatattaggaaggctgcccctctcttggtggctgactctgtagctctgtaatatcaggaaggccacccctctcttggtggcttgctcaccagtccttgaggttttatttttaaaatgagccctaaagaagcacatgctaacacttagactataggggtggcttttccatgaaagcaggatgttttgatctagctcttatgatacctaacacttgtttcctctgccacgtgtaggaacacttagtacacaattcacaaaatgatcgagagcagatggaagaattaggttagcaaaagattagatccgccctggacaatgggggaatcctggatatagcatagggacattgccctcaatttcataatgggttagctaaagatacatataagttagcattagtttatgcaattcataatgaatattgccaattga

SEQ ID NO: 394284 - DNA, 1054 bp, Homo sapiens
attagggagggccatgtgctgtattcagtctactgactgaaatgttagtctcttccaaaaacaccctcacagacacacccagaatactgtatgaccaaatatctgggcatcatgtggcctagtcaagttgacacataagattaaccatcacaatgaggaaaaacagaaatgatacatgtatacagagtgctcctcatcccaattaagtttcaccaagttaataatgtgtctctatgagaagtggttcaccatgttggtcaggctgttttcaaactcctgacctcaggtgaccacccgcctcggcctcccaaagtgctgggattacaggtgtgagctagcactcccagccgacaggtgcttcttaaatgttttctttgagcaggaattggtccaggaattggttctcaagttagaaggaaaatttgaggggaagaacttgttttttctccaatcagtctctgattaaatagttattaggaaaaactccttgcttatgtctttgtattgcacatttttatatatgtatatatgtgtaaatagagatatttatatattcacagacaaacacgtgtatgcacatttcacaatggaggaagaagggatatggtgtgcactgaggtaaagtgagcagggatacagaagagagctggagcctcacagtctgattctctcattgtacataacctttagggtctttgtttccctgagttctctggtatggggcactgttggcttgggctggtaccctgttattctctgtgatgaagggattcactggaggtaaaaacgtaatcatttccaaaggttgagaataaatgactttgaggaaagggtgttcattatccgttgcttctatattataatcagttgaactacaatacggttatctattgattttttttaatttttctgacaaattattgacaccaaattgaataattcatgacctgcatgcttcagcttctttctccctggtttccaggtgctattccctcaagaaatgcaaattaaatatgtcggtcttaataaatcaggagggaagcataaaaaaaat

SEQ ID NO: 394285 - DNA, 887 bp, Homo sapiens
cctcccaagcagctgggattacaggcacctgccaccatgcccagctaattttttatatgtttagtagagacaaggttttaccttgttggccaggctggtcttgaacttcctgacctcaggtgaccacccgcctcggcctcccaaagtgctgggattacaggtgtgagctagcactcccagccgacaggtgcttcttaaatgttttctttgagcaggaattggtccaggaattggttctcaagttagaaggaaaatttgaggggaagaacttgttttttctccaatcagtctctgattaaatagttattaggaaaaactccttgcttatgtctttgtattgcacatttttatatatgtatatatgtgtaaatagagatatttatatattcacagacaaacacgtgtatgcacatttcacaatggaggaagaagggatatggtgtgcactgaggtaaagtgagcagggatacagaagagagctggagcctcacagtctgattctctcattgtacataacctttagggtctttgtttccctgagttctctggtatggggcactgttggcttgggctggtaccctgttattctctgtgatgaagggattcactggaggtaaaaacgtaatcatttccaaaggttgagaataaatgactttgaggaaagggtgttcattatccgttgcttctatattataatcagttgaactacaatacggttatctattgattttttttaatttttctgacaaattattgacaccaaattgaataattcatgacctgcatgcttcagcttctttctccctggtttccaggtgctattccctcaagaaatgcaaattaaatatgtcggtcttaataaatcaggagggaagcataaaaaaaat

SEQ ID NO: 394286 - DNA, 858 bp, Homo sapiens
attagggagggccatgtgctgtattcagtctactgactgaaatgttagtctcttccaaaaacaccctcacagacacacccagaatactgtatgaccaaatatctgggcatcatgtggcctagtcaagttgacacataagattaaccatcacaatgaggaaaaacagaaatgatacatgtatacagagtgctcctcatcccaattaagtttcaccaagttaataatgtgtctctatgagaagtggttcaccatgttggtcaggctgttttcaaactcctgacctcaggtgaccacccgcctcggcctcccaaagtgctgggattacaggtgtgagctagcactcccagccgacaggtgcttcttaaatgttttctttgagcaggaattggtccaggaattggttctcaagttagaaggaaaatttgaggggaagaacttgttttttctccaatcagtctctgattaaatagttattaggaaaaactccttgcttatgtctttgtattgcacatttttatatatgtatatatgtgtaaatagagatatttatatattcacagacaaacacgtgtatgcacatttcacaatggaggaagaagggatatggtgtgcactgaggtaaagtgagcagggatacagaagagagctggagcctcacagtctgattctctcattgtacataacctttagggtctttgtttccctgagttctctggtatggggcactgtgctcgggacgatggtgagaatagacacattgagtgatattctaatgtgtcagagatgggaggatccacgctataaaatagacatgccgctctatatctctttcctgagtgtacacactgcctgttatac

SEQ ID NO: 394287 - DNA, 671 bp, Homo sapiens
atggaaggtagttgcctgctgtggtctaatatgtgaatccctgctgggattacaggcgtgagccaccacacctggcctggtgccatgcccggcctggctggttatttgttaaagcactggctttgctgttcagtagagccttggatttgccggcttctccctgcagcccctggctcagtgagcaggcacacgtctcggtcccttcaacatacgttgagtggagtctggtcagggtagtgtcctaagtatgtttctttcagaaaatagcttgaagaaaatgtcagagtaacatttgtttctccattaaaagcaataaactctcaaaagtaggatttctggagttgaaaagtaaactgaaatgaaaatatcactagacgagctcacagcagaattgagcaggcagaagagtcagacaacttgtgaacacaggtcacctgagatcatctcgcttgaggaacagaaagaatgagtaaaaaaaattaacagaaatctgtgaccccctcaagcacaccgacaccaccccatacagtggcattccagaaggagagcagaaacgatgggtgagaaacagcctgaccatctcagtggatcagaaacacggatcttacatccagggagctcggtgaactccagacaggtgaactcggagaagagctgcgcttagacaagtg

SEQ ID NO: 394288 - DNA, 539 bp, Homo sapiens
aaatcatttggggccattactgtaacatgctgccacaactaagtaggctttgaaatctgaggtagcctgctagcacactctgaacacattgctttttttttcttttctttcttttgagatagggtctcactctgttgcccaggctggaatgcagtggtttgattacagctcactgcaacctctgcctcctgggctcaagtgattcccccgcctcagcctcccaggtaaccgagactactgcacatgccaccatgcctggctaattttggtattttttgtagagacagggtttcactgtgttgcccagactggtcttaaactcttgggctcaagcgatcctaccaccttggcctcccaaagtgttaggattactggcgtgagccactgcgtccagcacaaattgctttttttaaaagtgtccttacatatactgaggaaagcttcagcataccaaaggatataaaggtacagattgcgtcaggcacagattggggtgaggaagatgcagtcggggatctctagagtgaccgctgcatccc

SEQ ID NO: 394289 - DNA, 229 bp, Homo sapiens
aacgatgagaaaatcaaaccatatgctggacatcattctgcccagctgggctgagtcagaattgcagttcaaactacttctgctctccctgggtttcgtgtgctttcaatgtggggatatcttccagatctgcagttctccagagctagggacccctcagctccagctgctctctggacaatacctgaacatccctacaatatctgaaattgaatgtttgccatttctt

SEQ ID NO: 394290 - DNA, 207 bp, Homo sapiens
tctccttaaatcttgctggtgacataaagaatacttagtgccttataatacagacttctgcttcacagaaaaatttttcatttgttttgtactggaaaactgcaaatggatacccctaatcatgcagttgggggaagtcacttcagaacagggagatggccttattgagacctaatatgagggacccaattcaagtggtcctttgat

SEQ ID NO: 394291 - DNA, 250 bp, Homo sapiens
ataatagagagcatttgggggacattagtggcagcacagcacaaatgaagccagtgcgtggcctgtctcctccttgcacggtgcttctggctttctgctggttaatacaagatgccatggatagatgctcttggcaaatgtcccttgggctgctggctgttcacattgcccttgaaatctgaaatacacaccctagggattgaaaactgctggaggcttcatgttcatggagggaagctgagctgtattg

SEQ ID NO: 394292 - DNA, 424 bp, Homo sapiens
tgtaatcctcatgttttgcagacaaggtagctgaggctagaagagattacgggacttccctaaaggtgcacagctaggaggtggcagagttgagataagatctatccataaaatctacaaaggtagtatggaataatgaaatgaggactgaaggaggagtccagaaacccacaatgtagatttagccaccacttaggtgagctagatgtgttactttatttaacttttcggtcttcagtttatctttttactgagaagattggttttaataatgcaaacaccattctacaaaagtagggataatctacacgacagatttttaagattctgaggttctttcaagctctgaaatgctgcatattttgcctcaagcttgaaaatgaaaggtctatataatgattttcaacagtcacgttactaatgg

SEQ ID NO: 394293 - DNA, 352 bp, Homo sapiens
aataaattactcgtaactgtgcctgagcatgtttcctatagaaatgggtcaggacaggtggaatcgttggtagccgtgtctgacctaacactatactaagaccagcctccagccccagcccctcaccaacgctaagcatgaaaccaattttccgtctacctaggagcatgtgtttgatatcactgcacacccagggcacagagcttcggcattacaattcttggagcgtgtctgtctcctcgtgggtcctgtccagacctccagtcactcacagagaccctcacatgaccagcacccagggtccgactcccccagccaagcccagcgctgaccacaacctgcagccagcgcc

SEQ ID NO: 394294 - DNA, 539 bp, Homo sapiens
ggctcaccctgcttcagaacaagggccaacatctgtccatacccctgttatagtgagatgggaaaccttgtagatgttggcactgtgtggctcttttcttttatatactgggctttagggtcaatcccatttaaccaaagggttcaatagctataaaaaggcgttgaaattgtatggttatttgagttatagctcagtaaaggcattaaatcttcagcctagatgaccctattcctccccactctaaccagctgtgactccagatggagacattgccctgcatcctctcacgtccccatcccccacatcccacccagaaacaaatgtgtgagtttcatacaacaagaatggggggttaggagtcaaagtaagctgggaatacaaaaatggggcgggcgtctaaaatcccagctactcaggaggcaggagaatcacttgagcctaggagacagaggttgcagtgagccaagatcgtgccactgcactcccgattacagtcctcattgccctgggcaatagagcaagccccgtctcaaaaa

SEQ ID NO: 394295 - DNA, 354 bp, Homo sapiens
ggctcatgtgatcctcatttacttgaaggaaggcgctgagaagcactgcctggccgggtgcggtggctcacgcctgcaatcccagcactttgggaggccgaggcaggcggatcacctgaggtcaggagttccaagaccagcctgactaaaatggtgcaaccccgtctctactaaaaatacaaaattagctgggtatggtggcacatgcctgtaatcccagctacttgggaggttgaggcaggagaatcacttgagcctaggagacagaggttgcagtgagccaagatcgtgccactgcactcccgattacagtcctcattgccctgggcaatagagcaagccccgtctcaaaaa

SEQ ID NO: 394296 - DNA, 395 bp, Homo sapiens
atatgtttattcttatgtgtattttaaaaataattagtgagcagaacacaaaaagcactagtcataaagaaaaagattggtaatttgaattgattaaaatgaagaactaatcaaaagacaccattaagagggaaaaaaggcaaaccatagagagggagactatatttgcaatcctcatgttaaacttcgagcccttgtcaagaatacatgcaggctggtggctcatgcctataatcccagcactttgggaggctgaggcaggtggctgtctgaaataataataataatttttaaaaaccaaccttctgctggtctatatttccttatgattgaagtcagtttgaatcatggtttctgtcccttttaactgaaagcacctcactagtaggacctta

SEQ ID NO: 394297 - DNA, 361 bp, Homo sapiens
tgaaactgtctctattaaaaatacaaaaattagccaggtgtagtggcacatgcctgtaatcccagctacttgggatgctgaggcaagaggattgcttgaacctgggaggtggaggttgcagtgagccgagatcgcaccattgcactgcactccagctggggcaacagagcaagactcctcatctcataaataaataaataaacagacaacctagacatggcaaaaactagtataaacaaaattgggactccagtgataagctgggaagaaatagttgccatgcagcatgttcaaagggctaatttcctttaaaaagcaggatcgcttgctgatagaaaagaccaacaactcagtagacagg

SEQ ID NO: 394298 - DNA, 264 bp, Homo sapiens
acaaatcaatacacattttcttaaaatctattgtggagctgtcatgcttgactgctttgccaagatttaacctgcaagctccaactttgagctctacattttgtgaaatatgtttttttgcctcgaacaccaaagactaatgtttatacacattcagtgttaatattaggatgtctaaagtttctatgcttgctatagaatatgtttttacagtttcatttaattcatgcatataaattattctcatcacttgctttaattaaa

SEQ ID NO: 394299 - DNA, 527 bp, Homo sapiens
cggctcggacctgattgctgtctcaaggaagagtggatgtttgctgagtagacaggtagggaaagaagagacgtcctgcacaccgagaagcatactgatgtgctttgtggaataactcactgcaggtcatccagtgtgcttgaaactaaggtgaaagttgtcaggagctgggatggaaaggcctagagccggtccaggaggcgctcccagcctgcagaggcgggctgttgtagctggcccctctggagcacaagcttctctgtgaaaccaggtttgtttcatttttccccaagactttgttgcagactgatagtttataaaatgtaatgcagccctataactagaaatacgaaaactacagccctcaaatttctttaatattaagatttgagagacataaaattagtctatcgaattgctataaaagttttaaatgttcattctcagtttctgtacctagcttttggggactaggaacacctggtgctcgaacccctctggatcacacttgggtagcaccgtgctag

SEQ ID NO: 394300 - DNA, 191 bp, Homo sapiens
ggtacggttagttgtaaggtatgtgcagtcgatctcaggcaagcgtttggggagaattcttgccaaaagctcccacactgagggtctactccagtccgtggttttcagcgcattcgcagagttgcgcggccaccaagtcaacttcggaacattttcctgactctagaaagaaccccctagctcttagtcat

SEQ ID NO: 394301 - DNA, 689 bp, Homo sapiens
  misc_feature (689)..(689): n is a, c, g, or t
tggattatatgacagattggttaaaatcattatacaagggaatttcttgtaggtttttaggatgtaagagaaaagacattataattttatttttgtttcacatcagctgatattgatggtttaaaatatatttttattccttaataacatttaatgataagcttatgtataatttgtaagtaagtcaagaagagaatgattttctgccagtgaatatacaacataatactatagcagtgtagttaggtggatgtgtctctagcatggcttttgtttaaataaaggacctcagaggtgttgcgtgtaataggccttgtggctgggcgcggtggctcatgcctataatcccagcactttgggaggtcgaggtgggcggattacaaggtcaggagttcgagaccagcctgaccaacatggtgacaccccatctttactaaaaatacaaaaagaaagacaaagaaaaaaatgttgggcgggcggccatgagcctgagaaagagggtctcgagaccattccgttgggggccgggccccgtatgttatggacactgggccaagctgggccaagagaacccggcagacatgggctgcgttcccacaataaaaacgccggggaaccggggttctgagcacccagggggtccgagcaaagggtcaaacaggggaaggggccgtatcgcgcgggggggn

SEQ ID NO: 394302 - DNA, 673 bp, Homo sapiens
caaaatgactgatcgatgttcttcagagccattacaatcaggaagttttaggaagaacaactgaacagctatggggttggtctctggagtccctcctaatagctcaagggcattttctgcctcttcccaacctgtaaatggaccacaagggtgaccataggcctatggcaggttcagatggttgagggaagccttcggcatctgtgcaatgcagccactggccacccaggagcaagctagatactgcatttactttgttgctgagaagcacctgtctcttaggttagattttcaagagtgcatttgtttgcttcttggctaaagtcttctgcaaagaccatgctgaaaagagtattcttgccaaggaaaataattagtggttttggcttccacaaaattatgacagaaaaatatgaccccactgtgtttgcctctttgttctcagagaaactaaacatgcaaggttttataacagatatttcaactttacagattccaaaggttgtcttcatgtgtaattattcagccttatgttttaaaaccaccttaaccattctttaaaagagaagtcagcaaactttttttttttttttttgagacagagtcttgctctgtagcccaggctggagtgcagtggcacaatctcggctcactgcaagctccgcctcctggg

SEQ ID NO: 394303 - DNA, 509 bp, Homo sapiens
tacaacccaatacacttcatctatatatgtatcaacccaaacagtacagtatttgagacaaagctctcaacctagacttgggtttgaacccaaattttgtgggctagtatacgaccttgagtaagttatttaatctctataagctttaatttccacatttgtaaaaggtggttatttaaaggagacaatgtgtgtaaattaccctttgcttaaaataaatgcccaataaatgttagctattattgactgaaaaatcatatcaggtggccctaaggtaggtcagatttaaacctttgtccagttatgtaattctcataaattcctaatagggttggtatgagaacaaagtttaaaataaaacaacaacaatacaacgaacaagaaagcaagaaaattaagaagacagaaaaagagatgaattaagcagtcaacctagagtcagaattggtatctggagaatgttggtgtcatccaggtgactccaacaaaacttcaggctccatctgaca

SEQ ID NO: 394304 - DNA, 268 bp, Homo sapiens
tgtttctgctgatacaatattttcaaaaattttgtaggtcttctgtgtatgtcatggggagtcacacaatgagccaagagggtcctccacagatatttcttggattatcccatctcttttcctggcttctgctgaggtgtttgagtggatttataaatcttataaatcctataaatgcttgtctagccgtccattttgctttttctccagagcacactttcctaacagtgaggttaaatttagtgttctttgcaatctggctaggctg

SEQ ID NO: 394305 - DNA, 420 bp, Homo sapiens
attgtgccattgcactccagcctgggcaacagagtgagactccgcctcaaaacaaagaaacaaacaaacaacaaacaaacaaaccgtcatcctgactggcatggcgtggtatctcactgtagttttgatttctgcaacccatttcttgaattgagttgatcttgagagtttccttggacacgggaagccacttaatccagatttcctatttctgttgatccacattcctccagcttgaaagcctttttctgggggaggaaaacaaccttcttcttaaagctgcatgaaattttgctgctcccaaaggcatcatttagtagctctgccccaattattgttggccacttttcctcctggaaactgtttttctctgtcccacccttccccctagttccaaatgttaggctgatgttcttcttt

SEQ ID NO: 394306 - DNA, 309 bp, Homo sapiens
ccatagttttgcctttcccagaatgtcacacccttggaatcatacagcatgtaaccttttcagattggcttcttttacgtagtaatatgcatttaggattccttcatgccttttcctggattgatagctcatttctttttagtcctgaataatattccattctatggatataccacaattgatccattcacctactgaaggtcattttgattgcttccaagttttgataatttaaaaaattttttaagacagggtgtcattgtgttttccatactggtctcctgaacacctgggctgatgtgaacccct

SEQ ID NO: 394307 - DNA, 210 bp, Homo sapiens
  misc_feature (15)..(16): n is a, c, g, or t
gaggactttaggatnngtagatcccaatacagatgatccaaggaccactctatgagaagtctaccctgttgctttcctcagcattcctgctctcaatctgggaatcaacctgaaagttgacactttctgtacctgagctgcattttatctatgtcttcgtcagaggtaaaaggaaacaaaagaaaacaaacaaacaaaaaaaaacacaga

SEQ ID NO: 394308 - DNA, 335 bp, Homo sapiens
tccagcacaattctaagcccatggtagagagatagtaagtggtagcttttgtataggttcagttaatctagatgtttcttcaataaatgtcagatctctctggaaaccaaagtaagcccatattgttcaagtttcctgtgctgtggaaatgtcagcattcttccagaatagcatgatgtcctaagcatgccaatttgccaattgctgcaaaaaacatccaccagctggctcctctttcttccgcatttaattttagatgagttattgtaatcgaatacacaagtctgggtatagttacgtgtccctgccctcctgtgtggatcataagtagcatg

SEQ ID NO: 394309 - DNA, 147 bp, Homo sapiens
cctgagtcaatcactgttgactgaaaggggatcccatttcctgagccatctggaggtggggtgggtacctgaacagagtggaggctctgtcaggaaggaaggagcaggaaccagaggccgggaaggttcccagcagggcctgaggtg

SEQ ID NO: 394310 - DNA, 487 bp, Homo sapiens
cctcatctaaccacctgcatgtccatctagggaaaccacggcccagaggcgtcagactgaaccccagatctctgcacacccaacccaggctcacaacataatacaacttgctctcctgtgggcttaacagctacgctgattgcaaattctttcctattcaccacaaaacatcctttagggaaataaactttatttctttgacgatgggcagtaattcagaggtatccgaatttcagcgcaagacctgatctgtttccacggtacatgtgtttccactgactcctcctgggtgccccgtctattggaaaaggcatcagacgtatgagcaaaccacaaagacacgcaacaccacggtggaatctcgcaaggatgatgaaagaatctgaggtcacatggtagaattccatttatgtaaggttcaaaaggaggccacattctgaagccaggagatggaacggcggttatcgtggtgggtcagggagagtgg

SEQ ID NO: 394311 - DNA, 397 bp, Homo sapiens
ccccccgcggtcattgcccccctgccccagccaagccaatgcacccagaaaataaattgaccaatcatggcaagacagggaatggcggggcccaatctcagcaccagaatgtgaaccaaggacccacctgcaacgtgggctcgaagggcgtgggggcggggaaccatggggccaaggccaaccagatctcgcctagcaactcaagtctgaagaacccccaggcaggggtgccccctttcagctcgctcaagggcaaggtgaagagggaccggagtgtgtctgtggactctggagagcagcgagaggctgggaccccatccctggattcagaggccaaagaggtggcgccgcggagtaagcggcgctgtgtgctggagcggaagcagccgtacagtgg

SEQ ID NO: 394312 - DNA, 472 bp, Homo sapiens
aacaagcccctactttttaatacaaactgacaactgaggcaaatataataattccacaagcatttaatgagcacctataatacgactcctatcacaaggatcgtgcagtctagttgagtatttctcaaaagcttttgacctgatctacaataacaaataccttgtttttactttgttttgttttgttgttgtagttgttgttgttttgagatggagtctcactctgtcgcccatgttgcagtgcaatggcacgatctcggctcactgcaacttctgcctcccaggttcaagcgattcttccatctcagcttcccaagtagctgggattacaggcaccctccatcatgcccagctaatttttgtatttttagtagagacgggttttcaccatgttagccaggctggtcttaaactcctgacctcaggtgatctgcccaccttggcctcctagagtgctgggattacaggtgtg

SEQ ID NO: 394313 - DNA, 395 bp, Homo sapiens
ttctcttttgtagatggcctaacttactaccttcctccaggaagcattccctggctgttccatgtcatggtcatcttgacctctcctttctatcccactgtgtgaggacctgagtctaccctgtggagataagccaggtttcccttttctttttttttttttaaaatgtaaactatttggacgaccaaatggcttacaacatctacacaggtggctggtccggttgggtttggtacaaagtcccaaatattggcacacagggtgtattattctaaatagtctaaataggaagaagatgcttttaaagatggtatacaggccatgcatggtagctcatgcctgtaatgcctgtacctttttccactatgtgggccacgctagtgaagggaagtccg

SEQ ID NO: 394314 - DNA, 230 bp, Homo sapiens
tatgaagacacttggaatatttattcagtcttggttaaggatgtatggggttggggtcaattttaacaaatgtgaatgcatttgccaagtgtttttcagtttcaaaattatccaagcaccaaatgatgaaatagtccttaaaattatttaaaagtgtttttagtaatatgtactgaattcaattacagtaccattgcatgctgaaaaaatcccttgatgtgtgataaatt

SEQ ID NO: 394315 - DNA, 337 bp, Homo sapiens
cactgtcattttcataaatctgcccattgcaatagcttcttggtatttctgcctccagactcagcctccgccaaagactttttcatattgctttagaataacttttagatctcagaaatgccacatgattccatgcccactttagattaagggacagggatcccaacctactttgggctcttgttctgtccttcctccagctctgcccctcacagtggtgcaaggaatgtacaaggccttcagaatctggccacccagggcctaccacacatttgctcacaaactataatcccctcagcacgcctcaggaagcatctaacatctgctggagcctctc

SEQ ID NO: 394316 - DNA, 237 bp, Homo sapiens
gaggaaaaatcagcaggacaagctgagccaggaggagccagtgaggtgggaggaaagtgaagagtcttggaagccaagtgaagaaagtataaagtaggaaggaatgaccacattctgatgatggagaattgaccattgtatttaacaatagggaaaagaccatgacaggaggggtttgggttgagtggtagaatccaaaccttattagaaaggattcaaaacagaatggaagaagag

SEQ ID NO: 394317 - DNA, 348 bp, Homo sapiens
gtagatgactggagtgataggcacgttgtaaatctgatacatgaaaaaaatgaaaacttggagaagccttgaaatacacaaggatggcaagtactcagtatatttaggcagtgccactctagtgagagttgacagctatacccagtactgaagaaaagtaatgtcaaattattctgaatacaatgagacttggaagggacattgaatgtagttaggaacataacgcctgtccatcagagagcaatactgatgcatgcaggcgccctaaatgaagggaaccagatgaacgtcaacaagtatcgttcataaaagctaaaactacgtttcggtggctttctcatggaaaat

SEQ ID NO: 394318 - DNA, 441 bp, Homo sapiens
tgccaagtaggatctatctatagcaggccagaaacaaatttggggatatatatataaacttaaaggtagtagtatatattggggagagaatggactatgcaataaaatggtgttaggataactttaataaacacacaaaaagatactaaaatttattaacagaatagatgaaaaacagtagtaaaatagctttttaaagactatctatttgccaaaaatttaaaaactggcagttctggaaagtattatctaacaaaaaaggtagcacaagggtgaaaagtagcaacaaaaaagataacactacagtctcgaagaggaaaaagcatgctgaagttcctgtatctgttcaaagacaatgtgtgcgtgttttgtatcagagactggaatagttgtaaatagcgagatagttgtaaatcgcgagatagttgtaaattgggtacc

SEQ ID NO: 394319 - DNA, 218 bp, Homo sapiens
gaggcaaaccatccattttatttagagggtcaactgcctatcctttgcatatgagtctaaaccttacagcatataaatcttttcaattgacagtttaaagattagatttactacagatgtacacaaagcagtcaatgtatgtaactcctgtgactctcattttaagtcattggacaaaataatttcactgaagggatgccgtggaaggaaaccttcct

SEQ ID NO: 394320 - DNA, 550 bp, Homo sapiens
accccctccttcattcccaaagcccttcgctgataccaatatccttgtccatttcagagatggggacactgagggttaagcaaggaatgtcattagcctgaggtcatatagtgagttagtgatagggctgggccacaaatccactttttgggttcccaggtcaatgctcagcccaggctgagagccatcgatggtctctgagcagaggcatgactgagtcagttctgagatatagggaaaaaaatcctggaagatatttgaagagaaagttaaagacaggaatgggagagaaacaagagtgttcaaagaagagttaacatagcaggcctggaattgttatccttagaaaaggcctgcttgtaaggtcagcctgtggctggtgtctgggaacttagctgggaaacagttctctgcactgttgtaaatctttccctaactgataagagtggctcgctatgcctggactgtttgtacaaacaatctggtttatgctgaacatctgctttccttctggaagtgtgaaattctggtgcatgctaggcaaagggta

SEQ ID NO: 394321 - DNA, 441 bp, Homo sapiens
ttcagtatttgttgcgatatttaatgtgagactttacatgccactgttgttggtactgaagatacagcagatatttaatgtgagactttacgtgccagccactgttgttggtactgaagatacagcagagaaccacaacagacaaaaatccctgctctgggctgggtgccgtgactcaagcctgtaatcctagcattttgggaggctgaggtgggaggattgcttgagcccaggagttcacgaccagcctgggcaatatattgagaccttggctctacaaaaattttaaaaactagctgagtgtggtggcacacacctgtagttccagctacttgggaggctgaggtgggaggatcacttgagtctaggaggcagaggttgcaatgagctgagattgcgccactgcactccagcgtgggtggcagagcaagaccctgtctc

SEQ ID NO: 394322 - DNA, 413 bp, Homo sapiens
aacataacagggaagcaggtttttgtctccatccaaggagcaattttcatataacccgacccatcagtggatttggcatcattcaaaggagtgagctgcttttcagtattgtgtccagaaaaggcttgtaagtcacttgccaggaacttcaaggatgagatggctgcatggtgaggaagaaaagctggcgaaaggaggggtgttaaggctccttctaaacagaagatgctgtgatttatgctgaaacacagaactctatcccgcacctcatcctttgccactgactattgaagctctttgaaaattgggaaaaaaaaactgaagactgaggaaagagtttggtttaatgaaggaatcatttacggtctcttgactgaaagaaatgataaatttttaattttttcatggccttt

SEQ ID NO: 394323 - DNA, 216 bp, Homo sapiens
aatttgatgcatcttagatccaatgtgagtgattgaaacttacaagcagacttgttctcctcctccccagccccctgtctgtctgtctctctctcttttcctttcttctactctgtgccagatactgttcttggcactggagatgtaacacatacatacatctctgccttcatggaacttagattctagtggggcggacagactttaagcaaatgc

SEQ ID NO: 394324 - DNA, 371 bp, Homo sapiens
gtaagaaaaaagctacgaaaaatacgaactttcaaaataatttgaaaaggtattatttgcttattttctcttcagttgagaaattgagtttttaaaaaatgttattaaaacaaaacaaggcaaaagaatgttagccacatggcatcttatctacccagaaatcatcagttaataccctgctataaatccatccagacccttgtgtgtagacatagaaacaaaaatgagttcttcctacaggttctaagagtttgtcactaagattataattaacatctttccatgtgaatgtatacatatttctgaaataccattttcagaaatacacatttaaaatacacattttaaaatttgtatttcaagctaaccct

SEQ ID NO: 394325 - DNA, 479 bp, Homo sapiens
ccagcttggtagccactaaccatatgtggctatttacatttaaattaattaagtaaagttaaagaaatagggtacagtccttcggttacactggccacatttcaagtgctcaataatgaactgtggctacgactgccttacaggctagtgcagatatagactgtttccctcatcacagaaagttacatggggtggtgctggatggtaatttctcggaaatgttcaaagactggctaaatactgttatgatggctgtaagtagtgtgaggccaccttttaataacatgcaaaggtattgccactgacttagtacaaaaaggagacaggcatcacctgatttttaaaaaatgttttgttttcactctgtgcctatttgcaagctagtcaattcatctcttcagaagaagagtattcttgtgtgtggtgaaacagatacccctgtcgacttaggaaaatagttttgaaatataagtttttat

SEQ ID NO: 394326 - DNA, 462 bp, Homo sapiens
ttatgagaaataataagtatttttctatttacatgagaatttaatctcaaaacaggaatcagaaatatattaagtccagggcataaaacctaaaccactgctcatatttattctttctaaatagagcaaagtgtaaaatcttctccataaaatgcacattgtgcttatgaaaaggccaaagtcttagtgagaatcattggtattccatagaagagtgaattaaacacagccaagggaagacccaagtctcatacttctcttgtatattccagagttccaggggaattccaggtgatagaggtgatctcccatactgttaaagcaaggttgcagacacttgggaattttggtcccagtactctaggaggtcacacctctgtcctggacaatactacaggaatgtatactcttcctatgactcattctggtcattcttccagcatcacaaaaaccaaaaaaaaa

SEQ ID NO: 394327 - DNA, 316 bp, Homo sapiens
agtctttatttcaaaataaaatactttttaaaattttaacaaactatgtttaggacagtgatactaagaagctcttctcaaaatcaagaatattgtgtaagaagagtgtcaagaaacacctgaattctaaacaaaattcacctaccaacaaattacatgatcttgaactagtcactaatcattcttagccatggtttacttatctgcaacctgggagtaatcatgctcctttaacctagctgagatggaagactatatacaataaaataatggacagtaagcaaaaagaaaaaaaggaaaaaaaaaaaaccacaca

SEQ ID NO: 394328 - DNA, 208 bp, Homo sapiens
tggaaatgttctaaatacgtgctgtccaacacagtagcacacatggctaatggctatcattttggacagtgtaggtctagagaatagcagtttggtcacgaaaaattaaagagctttttcataaaacattagggttttttgtcgttgtctgtttttgagacagggtctcactctgtcacccaggctggagtgcagaggtgcgatctca

SEQ ID NO: 394329 - DNA, 337 bp, Homo sapiens
tggtttaaggaagatggcatagaaaaaggcatgtgtcacagcatgggccaagtgttgggttccttgctataagtcaggcactgtgcttggtgctctacatacataatcgctttaacattcacagagatactgtgaagctggcattgtgatgctcattttgaagatgaagaaatggagacgcaacatcagtgagcgtctccaaacttacaccaatagtgagcaacagttttgagattaggacccagagatatccaagctctccatagtttgtctccctgaaatgcagagttgaaatattgtcacctgacatcctcagagtcagagctgaggactttaa

SEQ ID NO: 394330 - DNA, 342 bp, Homo sapiens
atctccatcttacaaagcttaaaaacaattgccagaactaggccgttcaaccccacatttcctgggcctcccctaagcactcagtcctctgtgtttctgccctgcgccccacgccctcagcgcagcacctcggagcccacagtcccaagctgtccacactctggcgcccctgggcccattcacattcccaggcaccatgcgctggtcagccctctcggccaccacctttgctagagcctatcaagaccctccggagcctctatttaatgaaccactcagtcattccagcaaagcggttactgcctttcctctacctggaggcttgttctgtgtagatgtttg

SEQ ID NO: 394331 - DNA, 575 bp, Homo sapiens
gagctttttctatttcttccccgggcatttctcctcctcgtgtgatgacagacaaagctaccaagccagaaaagtgtcatgtgcttgtgaatttacgagcagcacagatacatttaccttaaaggaaaacaaagctatatgatttgaagtataaagcgttgagctcaacgctttatacttccctactccttgaattttggcttgagcagccagataggtagtgggtgtcatttctactgaaattgaggagtagggaagagaagcagatttggagcgggggtggggggagatagttcacttttggggttgtcaaggttgatggtaatggggaaatccagagtttggactggataaagccattgggagtcagtatctgggtggccagtgaagcccctgaaagactgtgacatgagaagagggggtcaggactagaacctgagaaatgcccttatgttagtagtaggcagagaaagatgttaccaaaaaaaggagacagagtaaccaaaaaggcaggaaaacctttgtgtcatgggaactttgggaagagagtattgttagaagtataaagcgttgag

SEQ ID NO: 394332 - DNA, 506 bp, Homo sapiens
ccagtgtttatgacatgattccctttagatgaagtccaagaatgcgacaaagttatcaatggtggaaaatatcagaatggggattacctttgaggcatactcgttgcccgggaccacagcaacttcactggtgctggatcattctgtctcctgcactagttgcttatgcagttttccacctatatagaaattcatggagatgcttcctgtctcagtgtgacctcatttgtctgagcatcatcactgtgtcattgcaatgtccacatgcatgctccccaataacccttacccctcagtgaaccagtgtatctgtcagtgtgattaacctgtatcctctccagtgtgcaaggcaggagaagagaaaagtgtctccaaactagcaactgcagaagaggagccttccagtttagctacacagcagaacttccttctttaggagactgccgatgaaacgcctgccctcccaactgtccgatgtcgctgtgacagagctcgctatggacgtg

SEQ ID NO: 394333 - DNA, 338 bp, Homo sapiens
tggattaagaaactgagcataactcaaagactgagcaatgtgctcccaatacaggcagaacactcatattctagaagagaggagagcacagattaggatatccaaacccactgactggaatcaggagcctagcatttccttggtaactatcaactggccagtataattttaacatggaattcatcacttaatacaaaacagaagtgtcaacaggactgtccaaaaaccaaaattaactttcttctaagtcatgcagagaaggtactcatgtccacaatgcagtgtccttctcaaaaaacttgttgcagaattggacttctccattatcaatttctcct

SEQ ID NO: 394334 - DNA, 561 bp, Homo sapiens
aggcacatggacaagaggctgtgtggccacaggacgtcacttacaaaagcaggcagaggagcaggcttgtcccgagggcagtagcttgctgactcctctctagtgttatacaagatctggtacacaccataacccacgtgacatgtctaccgtgggatatctaaacatttttggtgatctaagagggatggagatagagactcccatcccaggtgaccatctacgggtctagataagccgcatcactgtcaaagttgtcgtttccatttagcagcaggtcatcagaggccaaccactaggacccactaggatcttgcaagatagaattgtgaacgggaaatatccctgagagtgcttttccccagcagaagccatgattggctgcatgggacctctcaccttcccagggccaacagctgctgctttagtctgtggccccttcctggctgcagaaccaatcatcatttatagctccttcaaatgactgcatgtttggaatgagttcaggtaaatataattttaaaaaataccatgggcacagcacacggtaagccctcacac

SEQ ID NO: 394335 - DNA, 259 bp, Homo sapiens
cctgccctgccccgcctcctcagaggccccatttcctttaatctaattcttatggggaaagaaacgccacgtgtattaaagtgcaggcttatctatttcatcacagatctaagccacggtgataaatccctaagctaaacacacacaaagggaaatacgaagcttgaatacagagcagaataaagaagcagggcagggataaatgtggccttcgcccagctgctagctggcggcccacccacagcggggtcttgatctg

SEQ ID NO: 394336 - DNA, 379 bp, Homo sapiens
actaactttatattatagaccgtgattcaacttcagttctgccctgacctgtggctctgctccagactttttctcatttgggaaccaaggctgaaggaacaggcctcgtaagatatgtgccagtctcttcacaaagtactacagcaagaaggctggctgtaactcagattgctgcttaaagcttttggtaacatgcattgtacctcacttctattcacattctattggccaaacatatcacatggctgatccccaaagcaataacctagggatgtcaactcctaacacacacacacacacacacacacacacacacacacacacacacacacattctctctctctctccctctccctctctcccttcctctctccctct

SEQ ID NO: 394337 - DNA, 499 bp, Homo sapiens
cgcagagctgttctagaggatccctcataggttcgcaggggggagcctctgctgtgtggtttaagtggaggtctctgggattttcaccctgacttttcaatgaggataccttggggagcaagagagaggaagccagctcctgtaaccgctggactgaacagctgggcctctaactgagacattattagcatttgaaagcccctctgaagggaccaagagcttcccagggtgggcgcaggggcctgagtgctgagaccccacagtggctccaacagaatgggtctgagcatccagggcataaagaccagaccggactcaagaatgaactcattgtggctttgtcccatgcttgaaaactgtgaccagggctctttcattgttaagaaagaccatttcttgtccacagaagagctcataagtctagttccttcatcaggcagagctgcggaagaccctgcccctcactagaagtttctgttagtgtcctgcgaacctatga

SEQ ID NO: 394338 - DNA, 428 bp, Homo sapiens
tagctgggactacaggcacccaccaacacgcccggctaattttttgtatttttagtcgagatggggtttcaccgtgttagccaggatggtctctatctcctgacctcgtgatccgcccgtctcggcctcccaaagtgctgggattacaggcgtgagccacagcgcccagcaccaccagctaatttttaaatttgctgcagagaggaggtcttgctatgttgcccagactgatctcaaactcctgggcttaagggatcttcctgcctgggccccccaaaactttgggattacaggagtgagccactgtgcccagtccaggactcggttctaactggtttcttcctgccttatggctgctccttctcacctctctccccgcctcagtctccccaaatcctctcaggcttgcacgctcaaatgtctgtcct

SEQ ID NO: 394339 - DNA, 126 bp, Homo sapiens
aagttccaccaatatctgggtacagtcataagcaaacattcctcaaacatgcctaaaacataattcacgtgtaggaaaaagaattaacagtggatctgtcacttgttctttccctccttgggatgt

SEQ ID NO: 394340 - DNA, 343 bp, Homo sapiens
cttgactgtcctgtactcaagctatgtccccggggtgatgacagggaggaagcgcaactggagacaatgagggggtggtgggagagtttctagagtctgggcccaagacattcaccactgcccatctgaatcccttcaaactcccattcaatctccaccttctccagcccacagtgacctgtcccacctgctaacagcctgtgtcactgagccaggcttttgctcagtgggtatgtctgaggactaaagcggtcaaaagagacttcctccttcccaagatcccacaacagcaccacgaacagggaccacctaagagactggactacgataaggacgggcatga

SEQ ID NO: 394341 - DNA, 586 bp, Homo sapiens
gtgactctagagatcccccttcgaggtgttcagagatcggatggtgggaggacacctgactccacagcaacctgctgtcaggagccacgttgttcctgagcccaagctctccaaggctgtaccctggggacccggctgtgggaagtgtctgtcctgttaagggaatcctggcctctggagccccagtggaagctgggtgcggtacacagccccactgagcttgggactgcagatgctgcctttcccagcctccctgcagcaagggcgtcctcccagagttgggggtggggagcagagcctgcaggcagccactggaacggtgcacttggtggcatccagggacaggatggcaggtgcagctgtgcagacaagcgtggagtctgcttcccagccagcacggagggtgcagcccaggctctgcccctcgtctgagccctgttcacaaactcttcctgtgagtcagctactgtggcttcttcatgctctgtccagaggcaatggctttgctcccacttccaccagggcccaggaaggacctgagaatgctcacccatgccacacagagcaccggccaccctgctcaccc

SEQ ID NO: 394342 - DNA, 376 bp, Homo sapiens
tcaggtgctaaacacaagctattactagaacccaggtgctctgacccctggcctgtggttttggcccaaaacagtgtcgcctccagtggcaagtctgcagtgggcagggtctggatgtaggcatgttctgttgtgccctagcagctggaaaggggcggaggcagggcagccttccaagagagcagacacacaagccctgtctggacctggcacagcccggccccttccggagaggaagggttcattctcttctgtttcattttacatagcagccccaaattttccactcaatgagagcccagctccaggaaggaaatgactctggccgagatgccaaacccaaagttagaaactgtcaagagttgcacaaccaaga

SEQ ID NO: 394343 - DNA, 357 bp, Homo sapiens
agaaataagaaaatttataaaatagtttgaaatcaaaggaaacaaaacacaacaaaagaaaatatatatgtagctaaaagagttctttgggaaatttatagctgtaaatgtccatattaaaaaaaggaaaatctcaaatcaataatctaaacttttaccttaagaaaacagaaaaacaaagcaaagctaaatcaagtagaataaaagatataagaataaaatgccaataaataaaataaaaaatacagaagaaaaataaaaatatcaaaagctggttcactgaaattttttgtttgtttagtgacaggccaggtgtggtggtgtgttcccacactcccacctactcaagatgcagag

SEQ ID NO: 394344 - DNA, 363 bp, Homo sapiens
tcacatctgcttagatgctcacctcaccgaaagaccagttagatattcattcatgcttaggtgtaatatccagagagaacttcaaactctcccttcttctctgatacaaaacactttgtgaggaatacagagaatgaaaaaataatggaagaaaagcaagaatctagatgtatgtctccacaaaaaagctcatgagaagaagcataaggagaactagaaaggaagggctcatataaaaccaaactgaattttgggagactgggcagaagaatcaattgagccaggagctatgactgcatcactgcactccagcctggacaacagagcaagaccttgtctccaaataaaataaaaagtaaaacc

SEQ ID NO: 394345 - DNA, 284 bp, Homo sapiens
gagaaacatcgtttaagtgtttagagtgagaaactagtctggaaaatttttctaaatcttggaacttgattgtggttttcgtaaatttgataatattcctaagaatgtatatgacattatcagtaataagttataaagaagttataaagctgatataaactctctacactgcctttttttttttttttttttaagatggagtctcctctgtcacccaggctggagtgcaggggtgtgatctctgctcactgcaacctctgcctcccaggttcaggtgattcttt

SEQ ID NO: 394346 - DNA, 244 bp, Homo sapiens
atagaaagtacatcactagtctctaaaaccaaacgtggttttgattgaaccagacttacatttatttctgaagctcgtttgctaacaatagaactggctttcccatttgccaagatcaatgttgacctgttttcacctaaattttatagatgtcagaaaaagaaactgttcactattcagtggcataccctggcctttctcagccacacttgcttgcatttttgcagctcctttaaattcccct

SEQ ID NO: 394347 - DNA, 380 bp, Homo sapiens
gcttagctcatgagccctaggagcctgatttactcagtgctttatgttttagacgttatattttgctgttaaaggaccttttgaaaactttcctccttttgggattgtcccactatctgatttttcagcctccatttctcccagtcatttctgtcctgctcagttttgtttgtttccgagtatgtttgtatttttcagttttctcagcatgtatatctcagttctggaaagtcataggaggttggagagggatttcctatttcactgatttccaagttccagacttcccagcattctgtgacttctcccaggtgtgcacactaattttcttgcactcactttcatcttggaggcagtgaagattttgcccagggtcccct

SEQ ID NO: 394348 - DNA, 459 bp, Homo sapiens
acactgaacttcattttgaaagtacagcacagctctcataatgtcagttttcaaaatttactcacatgaagcaattagattttacagttcaggctctatatgtctttatataagcccgaatattactgtttatgttaagcaatgcatggaatctattctctgattttccccctaatatttcagtttccaattataagacaataagatggataattctgtatttagttgactcatactaataaaaatctaaaaggaattaaaaaaaataatacatgagcacaaatcagtaaaggctttattactagaggaaaagtcagtggatcgctcctaccctcttacttgaagaccttacgtgtcgcatggggatgctgtaatctttggaaagatgctcttatttaaacctctggagctctctctgttttctcaaccatccattattagctatctagaactaattac

SEQ ID NO: 394349 - DNA, 234 bp, Homo sapiens
cgccttggcctcccaaagtgctgggattacagacgtgagcctccgcgcccggctgctttgacatttttcaagactacagccagttattttgtagatcgtctcacgctttgaatttgatgttgcctcatgactagttgaggttatgtaattttcaggcgaaataacacagaggtgatgttgtatccttctcagtgcatcgtgttaggagatacgtgatgtgggtttgtgtcctta

SEQ ID NO: 394350 - DNA, 492 bp, Homo sapiens
ctatggccctggtgaacccttcctctatggtctagactgagcctagaaagccagcccaaaccctagtcattcttcaaaatatctgggccaactttgattaagttagacattacttaacgttaagctccagtttttttcacctgtaagatcgggttgttgagtgattacctgagaaaatgcttttatccataaggcattgagactttgttaactttcagcaaatttgagctgtggttactctggtttcctcaactgctccccatcctgagttcccttgcctgtgctgcctatggcaccacttcacacagggtattaaaatcagagggatgggctggtctctttcattagattatatattctctaaccacaggaactgtgtcttcatcatggtcacacaagatagtggcggacaatgtgggccttggacccagactgcctgggaccttcctggctccatcacttactaattctgcgaccttgggcaaattactt

SEQ ID NO: 394351 - DNA, 660 bp, Homo sapiens
ccaggaatcaagacacctggattgtgtggaaggatcttgagctagtcacttgccctgtctgggcctaattttctcctctgtgaaaatgagcggtttgaactagatgctctctaaagtcctttttggctcaaacgttctggattttctgaccacatgaactgggtctgatccagggtacctggcatttcctgcaggaagggcctggaggttgaggaggaaagacagcagccatgctggtctaggaaaggagagaagcgccccacattcatgcatgaggaactctggaagacacgggcattgctaatggtaaagaaatccattgcctggacctggacccaatgtcactgtggcttctaaacctgtggccaaacaaggccactctattattaatctttcttgctgttaatgttctaaagcaagtataatagtacctgcctcaccttagatcactaggttatttgaaaatagaataaactcatggatgtgaaaatgctttgaaaacttctacacagagactggaaattattttcttagacatctgtcaaggtcacgacagatgattccctcaggattcagtagggtcattgggggatctgggagcaggtttttgaaagctgggattaaggatgtggccaggtaattccccattgatcctgccac

SEQ ID NO: 394352 - DNA, 500 bp, Homo sapiens
agttacaacagctcagtatgagcacatttgcctagcagaggtcagtaaactctaactccctccaaaccccatccctcttgcctttcagtcttgcatccagcaagtagttaattcaggcattgtcatctgcaacttccttttgacctcctctcttgagtctaaatatcctttggttttagaactagacttgtttctcatttaatttcctttacatctctctaaactccgtttcttctttcctcagtattcaacacattttttattctccaaagccttgagacattttgggaacaaccagtggaggagaggaaagtagagcaccgagttttaaggggatggcgtagatgtcagggacctgagttgttgggggagtagccacacgttagggacgcaaccttgaaatacacaaaataattcaatagtttttttgtctctgttatgtcgggacagatttttccaagttacttgagacttaatactgattcagggatcttcattaa

SEQ ID NO: 394353 - DNA, 188 bp, Homo sapiens
cggccaaaagattgacttcttatctttatggagctcacactctgtttggggagaaaaataaccagatgaaactttcagaatgataactgaggtaaaaggcactgtggggaagaaaggaagggttcaggctggggaaaggctggagatagaaaggcatccttagatgacccctggagcgttgagggtag

SEQ ID NO: 394354 - DNA, 258 bp, Homo sapiens
atgacgttcacctggaaactctacagatgggaccttgactagctaagtctaggctgactggagagttcctatctgtctattacctatctatcatctatcaatcaatttatctatctactatctatctatgtatctatatatctaacatctatcatctttctatcaatcatctatcatctatatatcaatcatctatcatttatctatatattcatctatcatctacctatcatcaatctatcatctatgtatctaaca

SEQ ID NO: 394355 - DNA, 447 bp, Homo sapiens
cataattacagagtcttatgtgtggaaatgctttgcaacatgatacacggggcttggatgcattcgataagtgtgatctctatgagtgaaaaatacatatattatatacatgatctctacaagtgaaaaattcagatcagcttagtgaacaccaattattgtgctattatacaaaggagtatgagttgataggaaattcaaatacacatacagatatgtattacatacatacatatatcatatacaacatataataaaatgtacatacatatttttattccatcaaactaaaaaattagagttgaaagtaatatatacttatcatagaaaattaggaaaatacagaagtgtgtaaaaatgaaattctgaaaatctttcccaaatgagcaattttctcattttttaactacagaaaaagtagtaccgggattttttaaaacctgaaaa

SEQ ID NO: 394356 - DNA, 310 bp, Homo sapiens
ggatccaccttcatgttctttgattcacaaaagaccaggaaccttccgtatttggggagggaggaagtaagagagagaggagtccaacttatttatgttggacagtaaccagccaaagtttttatacagagagagagatgaggtctcactatgttgcccaggctgatcccgaactcctgagctcaagtgatcctcctgcctcagcctcccaaagtgctgagattatagatgtgagccaccacgcctggccccagacagagttttgaaatacagatgagtgtcacagccagtcatctggggggacctactg

SEQ ID NO: 394357 - DNA, 382 bp, Homo sapiens
taaaagccaccatgtaacccaaagatatgacatttgttttttaatatccgtctgagagaaaggattgggaagcctataatgggagattcttagtgataagagaaacctggcagtgcccagacggtcaaataatttaagggtccccgatatatatgatcagccccaaaacccagacatagtgaatgtcaaaagacacctgcagaatagaacttgaaattccctacggatcacaaatttgtcccaaggttcattttacatttggggagaggaaagaaggagataaggaaaaggaaaaaaaattcatacaaaaggagaaagaagaaagtcaaacaccttgacacaaggtgcttagtcctccaaggtagaagtttataaattatca

SEQ ID NO: 394358 - DNA, 2578 bp, Homo sapiens
  misc_feature (2002)..(2002): n is a, c, g, or t
cattgcaaatgtccttaatgccactgaactgtacacttaaaaatggctaagttgggctgggcgtgagccaccacacccagccagatctgcctcttagaacaatgctatggaagttgattttggggaatgggtggaagaggcagaggtcaggcagagtgttcaataaagaggatcagacaggccaggtaggagaagctgatgcctagcctaggacagggcaggtagctcagcaagtgtgagcacctctcagtgtaagagctgaggtgggagaggggcagatgggctgtggagctggccacactaaaggcagctgtgtgtttgcagggctcaggaccaaagggaggctgagtcaggaaggcactcctgggcttctggcttgagcaggctcaaagtcaacagatgcagctgcatctgtgtctagcgattgggaaggtccacagcaggactccagctcatacctgggagtcagggcaaagtccagcctagggaagagcccccaagagccaggctgggtgtcaggtggggcccttgtcctgaagggagaagagactacaaggtagagcaccaagcacacctggctctggcacctttacgtctctggccacttctctcttatggctccctgtaacaatgagatacggacacctggaggcacctggggctagtttcttcctcatacctgccccgctccgatgaggctccctccaggctccgcatcttgacttagttacaacctgatcctgagctgggacccaagggtgtcctgctcctggctccaatctcctggtgaggatgaactttggtttggctccacctgctcaagtgccttcggaagtgtgcccaccttgccagcctcgtcagaatgcagtctcaggatgatgaaagagttcaggaaatgccaccccaaggtacgtcactttggacttcaaactgagagcatttgaggaacagcaaatgcagggagggactttctctgaacttcccttatctgcttcaagataaatcctccaaaaggaactcaatggttataactcccctccccaggaacctcatcaaccagagaagagtaaactcagatcacaggacaggagactgggggtcaacaccacccccagacagactttatcacatatcacctattcttctgaaggcccattcatctttcctccaaatcatttactctctcctaagttgcctgaaccctccctccgctcaccccctttaagaggtatatatgctctcactgaggtttaggacatttgcttttctttcatgtgatgcccccatgcatgtagtatatttgtgtaccttttcttctgtaactctttcttctactgtcagtttatttcatagagtcaattaccgaaccctcagagggtagaggggaaatcttccctcccctgcagtgatgctctgggactgccagacacctggtgtctaatagacaccagaactcactcccaacagcccatttgggcaattagtcgctcatatgataaacatttttttaaacccccaaagtgtaccagtccttggactgaaagctggatttacaaggtcaaatcagattcagtccttgtgatagaagagttcataatacagtggagccaaacgcatgaaacataacacagcctattacaacacaacgcgacatgacagcttcacacatcccaacacaggatacaagggctcaggtctggtttctaacttctggggcctcagctgagaaaagggcagctcccagtgaaaggaggcttattaattagggagggagcttattggaatgtcagcagtggaatgcagaggggaagagactctaagtcagactagctgcttcagtcctggcaccataatcttggatggatgacagaactctctgtgccttagtttccacatctacaaaatggagagaataatagtgtgtatgtcatagggcttaaggattaattgagataatacacgcaaagtgcctggcacagtgcctagaaggtatagcaagcanaatagcattagctgtgtggttcttgttgccatagaattatagaacctgattatactcttaggttcttggagtcagagaactgtagaatcatagaaccctaggaccttagaaccttagacatagaggtttataaatatatataaatataacgtgcaccagaatattagctaggagggtgaagaagggagatctccccattccttcagattgaggcgaaatgtcctctaatgcctgagttccagggctgtcacattcagttgctcaggttgtacctaatatacctctaaagaaggccattcacatagacttcgatgtgaatggagttccttagacgcagcatgacatgcaccattgcgtgagaaagcccacatttctcccagagaagtcggctaagtcccagggggcttacacttagtaccataatctctgcctccagcaaaacatgctggctttgtcctgagccacactgacctgaatgtgatgaaactgaaacttggattccatataaaaataaaatcactcctgcacgttgtgcacatgtaccctaaaatttaaagtataataataataaagtta

SEQ ID NO: 394359 - DNA, 538 bp, Homo sapiens
ggaggtcgaggaggcggatcatgaggtcaagcaatcgagatcatcttggccaatatggtgaaacctcatctctattaaaaatacaaaaattagctgagtgtggtagcacgtgcctgcagtcccagccactttgggaggccaaggcaggtggaccacgtgaagtcaggagttcaagacaagcatggccaacatggcgaaaccctgtatctactaaaaatacaaaaattagccgggcatggtggtgggtgcgtgtaatcccagctagttgggaggctgaggcaggagaatcacttgaacctgggaggcagaggttgcagtgagccgagatttccactgcattccagcctgggcgatagagtaactctgtctcaaaaaaacccactagatcatctctagaacattgctactcccaagtatgatttgaggaacagcagcctcagtatcaccagggaacttattagaaatagtctcagcctcaccactattcccacttaattgtaatctgatattaacaagatttcccaatgtgggtcaggtg

SEQ ID NO: 394360 - DNA, 343 bp, Homo sapiens
ttacaggcgcccgccaccacgcccagctaatttttgtatttttagtaaagatggggttttaccatttcgtccaggctggtcttgaactcctgacctcaggttatctgccaacctcggcctcctaaaatgctgggattacagttgtgagccaccacgccatgccatgcacaaggaatttcaagacatccccatttactgtgtccccttatgtgtctgtgcctttgccgatttcttccacattcaatctctatcctcctttctctatctgctgaatgattttttcttcaagaactaattgaaatgtcacttcctccaccctcagataattagttccttcctcctc

SEQ ID NO: 394361 - DNA, 482 bp, Homo sapiens
tttggtagagacagggttttgccatgttggccaggctggtcttgaactcctgatctccggtgatccacctactcagcctcccaaagtgctgagattacagacatgagccactgcgccccacctgaagtacattttctaaaaatggtaactgttcaacagttgtttaaaggtgattgtttaaacttaatcattgttcaaagtgtggaggaaaagatgtctagcaatatgaaagcaagaataagaggccaaagagaaaggccaagatgggtcacctttctctatgccaactcccctggtcacccaaagcataggccccaatcccaagtcagaatttgactatatctgtgccctgcaatagaaaataacttcatgtgttttaatctgggtacctgtgaatgtttttgtatgagtcaggatagcataggttatgctgcataacaaacaattctcaaaaaactctatttggccataacaggtcagtg

SEQ ID NO: 394362 - DNA, 426 bp, Homo sapiens
cagaagggaagagtggaaactggcagaagatagctgtgtctgccacagatgggtcttcagaaactatcaagttgagtagaagtcaccagccactgacaagcccatgagtctccatgagtcacaagtatttctttggagcagggttgtctcactgtagtgtcagatgaaccctactcaccgggacataccctcatgctttgaggaacccttttcacttcagggatgttgttcaggatagatctgccacatactaattgctgtctcaaaactgaaaattgttataataatggtttcatgtcttcgctagtatcatatttctagtcaagcactggttttttattattatttacagaaatgactttgctagaaggataaccacacacattaaaattttgcctaagtgtagaacaaatgctattgtacatc

SEQ ID NO: 394363 - DNA, 393 bp, Homo sapiens
agagcctcttccagcatctgccgcccttcagtggcctctgacttagagcagtgagtacgcccgggcaccatatgtgagccaaaaaaaaattccaagcccctagttgactgaatggagccccctcttggccaacggtactcaaggaaatctgaaaaacaagttcagcccatgacaggaaggtgggggccagacaggcctcgtgagaccctcctccttttggagttcaggaacgactgaccagcgttaacattaaaatcgagctcttaagcctgacaaaacaggccaggcgcagtggctcacgcctgttatcccagcactttcggaggctgaggccagaggctctcctgagctcaggagttcaagaccagcctggggaacataatgagacctcat

SEQ ID NO: 394364 - DNA, 257 bp, Homo sapiens
aatgtctgaggttggtgcgctggttcccagtgacctttcctcaccattagctcccaggcaagaaagcagtgagcatgaaatggtcacaaagtttaatgatcagctaaggatgtaagcatgagcctgaaggctccaaacaggaggccatgtcagggaggcgtggcgggccaggaagctaagtcctcacctgcgataacaggaaaccaacgtccaaacacaccagccagggaaaggcagggcacggtgtcctgcagggg

SEQ ID NO: 394365 - DNA, 409 bp, Homo sapiens
accctgttccaccccatcctgaaacactttctcctgcctcttaacaattacagcagtttctaacagaccaattcatgtagttttgttcactttctactgaagtaggaatatgatttctaatgcgtattttcttcttacttttaaaaacattttgtgtgtttaagcttattgctcagttaggttataaattcctttaggggaagaagaaatatttcatctctttcctactctcaccagatacttagtccaattctcactcatactattagggtatcttgattttaaaattacatcagattaatgatgcaattccgatccagacaatcagacttcatgactaccaattcagacacacaactaccagcatacacctgattaatctgattccgatccagaacccaaaggggga

SEQ ID NO: 394366 - DNA, 157 bp, Homo sapiens
tgtagatgtgtgtgtggtgtgtgtaggggtgtgtgtaggtgcatgagtgtgtaggtgtggtgtgtgtgtaggggtgtctgtgtaggtgtatgagtgtaggtgtgtgtggaggtgtgtgtggtgggtgtagatgtgtgtgtggtgtgtgtgtaggtct

SEQ ID NO: 394367 - DNA, 788 bp, Homo sapiens
acaatctgtttttatttcggggcacagcaaatgttgagaaccactgtcgcaggcgggcaaaagcggcactccccatgtggttggggatgcggggaatgaactgaagacattgttagtcacctgcctccatttaggcctcacctttatgtcatcagcccctctgagactcagaaatgatgtctctctctgacatgggtaagtacaacagtgagagagaagacatccctctgagtttgtctgtccttgagcttgctctgcgccctggggaaggaaggcctccctcctatggggccatgaagctactgcttatcacacactggatcaggggaaggaacatgggctgggcttcaggagactcgagctctactttttaaaaaccagcgacttacagaccctgggcgagttcgtcgccctctctgggcttgttccccacatgtaaaaggtaggtcatgatggccgtgacgtgccatactttccgtctcctgtctgctctggaggacttgtgctgtggaagctgtttctccatccccccagatggatcccttcttcctagtttgcacaaaggtgccgaatggactagcaggcagccttgctagaggggctgatggcttgtcctaagaagatggaataaatagaagagtccttaacaagcctcgttctcctgaccacgaggatagaaaggctcagttggcacactccaggagccaccagatgactggcaggatctgtttgatgactaagtccttcctttggcaaaactccacgtgacgctgatagggagtgagaac

SEQ ID NO: 394368 - DNA, 147 bp, Homo sapiens
aattatttgtgttttattcttctcactacattaggtcaaagccttccttagaacttcaatctcacacacagatttgagccagtaacccctgtcgctctccctcctgagagcaggtgttttctcttcccggcgcccagcagagtatgc

SEQ ID NO: 394369 - DNA, 432 bp, Homo sapiens
tgtacatatgagggtatgaggtaagagagtcgagcaaaggatcgttcagtgaaggggacctaagacaggaacatgcctgattttatcaaggaacaaaaaggaggccagtgtgaccagagcagagcaggatgagagtagcgtaagaagaagttgtggatcactttaaggacttaggctcttgttgtgagtgatatagggaaccattgggggatttttgaacataggagtgctatgatccaacttaagttttttaaaaaatgattctggctgctgtgttcagagtagcctatagagagcaagcatagaaacaggaaaaccagtgtaataggaggctattacactaattaaagaaggagatgggtggcttggacctggttacagcaatggaaataatgagaagtacttagattctggatacgctttgaataactg

SEQ ID NO: 394370 - DNA, 400 bp, Homo sapiens
ttatgtgtggctcaagacaattcttcttccaatgtggcccggataacaaaagactgggcaccccctgattaaagtatacaggaggatgtgcatagattatatgcaagtactacacaattttatataaggaacctgagaatccgcagagtttgatatggtggcggggaagggaagtcctggaaccaatcccctgctgataacaagggatgactatatctaattttgtttatccattcatctgatgttggacatttgagttgttctcactttttggctattgtgaatggtgctgtgttgagtattggtatataaatatctgttcaggttcctgctttttcagttcctttgagtgtatacctaggaaaaaaattactgtatcatatggcaattctatgttcag

SEQ ID NO: 394371 - DNA, 420 bp, Homo sapiens
tttcctgagccctgagtcacttcattatggtcccatggagtctggtcatttccccacaatctgagcacctcatagctggtttacttctaaacggcagcagtcaccgtttacacagcatttttgttttaagcatggttgtacacaatgattaggtcatcacggcaacccaagggcagccagggctccagctatggaaggctggcttagtggatgttaacagactcaaatcctatacttgctgaccacatcgagtagccccctaatctgaaatcattggaacttttgaaatacaacagagcacagcagtaacacaaggaacaggccccaatgccaagcacaacgggaagacttctgctgtccttacaaactgctcaaggaaagctgacctgcagaggtgagcacagagccaccccgcacacg

SEQ ID NO: 394372 - DNA, 442 bp, Homo sapiens
actctgtgctatagaccaactggacctaatagatatttacagaacatttcatccaacagctgcagaatacacattcttctgctcaacacatggtttattctaaaggacagaccatatcttaggccgcaaaacaagtctcaaaacattcaaaaaaactgaaataatatcagatatcttctctgaccacaatggaataaaactagaaatcagtaagaagagaaattttggaaactatccaaacacatgcaaattaaacagtatgcctctgaatgaccagtgggtcaaggaagagattaagaaggaaattgaaaatatttttgaaacaaatgataatggaaacacaacataccaaaacctgtgggatttaaaaaaaaaaccaaaactgtgggatacagcgaaagcggtactaaaagagaagtttatagctgttaagtgcctgcat

SEQ ID NO: 394373 - DNA, 237 bp, Homo sapiens
gcactcctgccagcccagtgtagcctcaggcctgttgggtctacccaggagcatggcagaattatatagcacttggtacttaggaaatgtttttatggtcagttttaaacttataaaatcaagattgaaatataacagacaagaaaacataggtacagaggtaatttggcagaggtcctacatcaagctagctaaggtgtcaagtgaacctgttctcccatgtgttgttattgatct

SEQ ID NO: 394374 - DNA, 322 bp, Homo sapiens
gggaagaccctagtcggaggcccccacccttgcccggaactggactttggggcagcagcaaactgcagtgagtgtgagtcacacctgaggacaggtgggctgtcttcaggctcccaacaggtctgtcgcttaaggggctggggaatgggggctggaatgccacggcctgcccacctgggggactctgggcagagctggagcagccaggcaggaaaatatcccccagtttccagagagtaaaagctgatggtcctgctgaggtgtgaaggacagtgacggacagtgatggaaggtgatggacagaggaggacagtgatggaca

SEQ ID NO: 394375 - DNA, 395 bp, Homo sapiens
ttttgtttaagtccttggttttattcttctttataattttcagccaactccctggttcaataatcttgccaggaagtttgtaatgatcccttaaagtgacaacttccataaatctttaaagatgaatatttaatgaactcccaatagccatccatacggtaacatccagttgttgccagtcaaaatgcaaactggctgttttcaggaacagcatagagcaataaaatacgtgtttgcttgtactgtctgttctgttgaaccgttgtcttggccttcacaagcactatttgggacccagcatcttgctttaatttggctttgaaattctaatgcagaaatgtgatcacattcttcaacttgtcctgtgctgttgatcacacagcttcttgtcttgc

SEQ ID NO: 394376 - DNA, 526 bp, Homo sapiens
gggtcctggcaacacaggttatgggaggagggagaagagaaattcgattgagggaaatacacgattattagggaggattcagtgggcttgaggggcattcagtggtctaggacaaggtctgtctgttgcccataaagtggacagtggtttgtgacaaaagtctgtccaggtttgtcgacaaactctaatcctccttcctgtgatatgcgttcagttcatgaaagcccagggagggaactagaggtcactggtttctctggttagtctggtctttaggcaaataaggcaacttcagcccctgctttgggagaggtggaggactgagaggcaggagggggaggggaggaaaaacacttgttctcctttgcgggtctctctgggtctttatgtagatgggggaagtctcttctggcatgtgttgatctctaagagcctttaattcaacatactcattatagtaggaagccatattttgggatgaagttctctgtgctccttcaatatgtgtttttttttttaaatgcat

SEQ ID NO: 394377 - DNA, 327 bp, Homo sapiens
ccccatattaaacgaacaagacagacctaaactattgactaattctccaaagcgaaaagtcaggaaaataaaaaaatctcgttaagctgtaacaagaagggaatcgtgaaatacgtaaattgggctctttcatattgtgaaatatatatttggtgtttgaccctctctcccagtacataattcctaaaattcctggaatctccaaaatgatgtctttttgtatgcttaggcactgactgatggctggcagcccctgggctgcttcaatggggctggtcaccagaaagaccaaggcagggttagagggttgggactttcagcccctcc

SEQ ID NO: 394378 - DNA, 579 bp, Homo sapiens
tggcttttccacagggcatgactacaaggcctttgggcaagtttttctttgagtcacttgaactctgatgcagtgaagcaccaacctcatctctgggcaatacctacattaggctgttcttcctgccaattagtttctaaaacaaaaactagacatacagacctcttaatctttcattgttactgcttccattttaggacactttaagtgcaaacccagatgcctaaaataaggacaaatgcagtcacaacatttacaattcctttaaagaacattgtttttaatgaatcatttgttcaaagcagaagtgaatcaatagtgtgctttggtctctttcatgctaaacctttgttgatggtacactgaattttgtttcttcactgaactcagagaccctgtgacatgctggggagatccagggatttagggaggtgaagaataaaaggatgggaggtaattcatcactgtccttccactaatcactcccaggttttacataaaagatgcctagttttctttgttcaaaccatatagtaacttaacagaaaaaattgtcctcgtggatgcaatctcaaattc

SEQ ID NO: 394379 - DNA, 375 bp, Homo sapiens
aaaaaaattctttttttgtagagacgggaatctcactgtgttgctcaggctggtcttgaactcctggccttaagtgatcctcctgcctcggcctcccaagtcgctgggattgcaagtgtaagccactaccccggcctaaaattcaattttaagcgtataatttgataaattgtgacaaacatatgcagctctgtgacaactaccacaatcgtgatatagaacatttccattacgactaaaagttgcagtgggcctcttggcagtgacttccttcacctgcctctttactccatggtaataatgatctgctttttatcactatagtctggcttttctagaaattcatatacatggaactttatagtcttttttgtc

SEQ ID NO: 394380 - DNA, 585 bp, Homo sapiens
ctgtttaaagtctatgtttcatttctgagtgcttgtaaaatttacagatccctgagttccatcccaaaattaccaaatcagaatctctggcgaatgggtccctgggaatccatagagcaactagacactcaggtgatttaaccacagaagtttgagaaacattagcaggtcttaaagcaaaagcttaacaggtaggccagcaaattttgaaaaacgagaataatttatttttagctataactgaatacacatcctataacataccatgtttgtcaggcaaaacactgaatatagtgagtttcacaatactatgtaatgtgaggtataattgctaagaataagaagctagcagtaaaagtcaataagccagcaagaacaagtgtgcgtttagtaaaactttgccttaaacacgtaagtgcatgagtagagttcaaagatgacctaaggaagaatgtggcaactgaatttttttccagttctctgaaacaattttttaaaagtcagcttttaataccttcatgaatgtcacaaacattcaagagtgaagaatcactgttcatggttaagagctgtgtatcactgact

SEQ ID NO: 394381 - DNA, 237 bp, Homo sapiens
agttcaacaccagcctgggcacaacacagtaagatcccgtctctataaaaaaaggtaaaataaaataaaattagaaggtacagtggcatacacctgtagtcccagctacttggtaggctgaggcaagaagacagcttgagcccaggagtttaaggttccagtgagctatgactgtgccactgtactccagccagggtgacagagcaagaccctatctctaaataaataagcagatag

SEQ ID NO: 394382 - DNA, 124 bp, Homo sapiens
caggcagaggtggctgtatggtggccacatgggagaggctgaaaggccaccatccaggtggaagctgtatctgcccagcaggcacttttttttttttttgaaacagagtctcgctctgtcaccc

SEQ ID NO: 394383 - DNA, 498 bp, Homo sapiens
gatgtgcagtgcgctgcccttccgaacaccggtgtgcacagcaggcggtttaggtgactctgcttcccgccaagaaaggcagattgccacatgcagcgcctcatttggatgtgtctggaatcttgactaccctaccttctcctacaaatggaccttgagagcttgtttggaggttctacaagggaagcccagctcttctattgggtatggtcgttctcttcgactgagctgcagcttcgggagggacgcacatgaagcagtgaggaaggaaggggacacccgcctagccagccagatcagccgaatcaaccctggcgatcaatgggatgacaggtgtcgcagccagatcgccctcatatccggtagttctacttttaaccttttgtggaatctccatagttttctgcggtgctgcgccatttacattcccaccaacagcgcacagaggtttacacttgtacatgtttccaatgacgaactaaaaactttcatgttttc

SEQ ID NO: 394384 - DNA, 462 bp, Homo sapiens
aggacatgacaggcttgaaaacttgcccccggctactcaccttccagctgtgatagaaaagggcttggttcttcccctgcttgtggagtctgcacaccggatttgcgccctcccctgagttctgatcaggaggcttcttgcctgttcaaattgttacaaagttcatctagagatttccttctccctgtggagctttaccccctgctcctctggtcatcatcccgctggatccctgtggtgccaggcaggaatagcctgtgaggggacgcagccagctccccgggcctttctgctgcttcctctacccctatatttcgctcggctctctaaattgactcaactccaggtaaagtcagaaacttgtcctgcaaacagaacttcagcttctccaatgggagtgtgtgttcaggagaggagggtctccctttcccatttccgctgttcgggcgctcacagtatttg

SEQ ID NO: 394385 - DNA, 316 bp, Homo sapiens
ggcacgagcccacctcagcctcccagagtgctaggattatgtttctgtaattgtaatacatttattgtttttagaaactgtctttgctttagtggtaattttcaataaaaatagaaatagcagtggagttattaaaagagcattagttacatttttccctttttcattatcttcaaatattatatatagtaagtttgacctttttaaaatgtatacttgtatcagttttaacacatacatagattcctgtaactgtcaccactataagggtaaagaacagttagttccttcacctttgaagtcaaaccccacctct

SEQ ID NO: 394386 - DNA, 173 bp, Homo sapiens
gacagttatatttaccagtagaactagaagggaatgcttcagtctatcctgtgtttagagtcatggagttggaggaggtttgggtgggaatctgagtgacagccaaggagaaggagatagggccgtcttggggttttctgcagtctcagactctgggtctttgtatgaccctt

SEQ ID NO: 394387 - DNA, 210 bp, Homo sapiens
ctacaggcatgtgccaccaggtcgggctgatttttgtatttttatgaatagtaggatggggttttaacatgttggtcaggctggtctcgaactcctgacctcaagtgatccgtccacctcgccctcccaaagagttgggattacaggcatgagccaccgccctggccctcaaaaaaacgctttcatctgaccttgatataaagatatgtg

SEQ ID NO: 394388 - DNA, 174 bp, Homo sapiens
ccacctcagcttctcaagtagttggggttacaagcacataccctccaggtgtatatcaccatgtttggctaatttttaaatttttctgtaaagatgggggtctcactttgttgcccaggctgggagtcacaacttttttttttttttttttgagatggagtcttgttctgttgc

SEQ ID NO: 394389 - DNA, 120 bp, Homo sapiens
tccatctcaaaaaacaaaaacaaaaacaaaaacaaaacagtttctgaattttaaaaactttaaaaagtgcataatagaaaaaaatggagcagaaaaccggttacatttaattaaatctta

SEQ ID NO: 394390 - DNA, 693 bp, Homo sapiens
gttcttacaacctgcctgttgttcttcagaaaccaaattccgaaatatcatctcacaggcagttaaaatgctaaatgaggagcactgggttgagaatggtgtagtaaggtgatggttgggggatgtcagcaggactcaaagacctgggcctcagctgtttctctcatcagtttgctattttacacattgacttgagcatggacgagagtgttcaggagcaaataccttttaggtagcagactgagcatgtgcaggtttgactcttcttgtgctcctaggacagagcaagtttcattttgagggatgggaggaggtgtaccttgctgtatctgagatggcaaatgcaaggcacgtgttcagctatccccatatctggcagacattgctaatctatgatggctctctttctgagctccaatagcctcagaatcctttcaacagagctttctggacagccattatcaaatggcaggtgttggcacaggagatgaagtctgtttgtcaagatttgggctaagtagtagattctttcttgaaaaaaaaaaaagtgtgcatccgtcacatttgtgggtaatccaaagcccttttttagtttaagtgcaggacaggacttgactttatagaaggacacagtggggatcatttttcttctacatctgaagttatccatgtcccaattctacttaaccacgt

SEQ ID NO: 394391 - DNA, 368 bp, Homo sapiens
attcgggtactcttaaatacaattcttaaaggaattaaagtatattcttcataacaaacttaaatacatacttaccttcacttttttccaaatacgttatactttttttctcacttaactctcatttgacattgtttcctgttaccattattttccctttagtctgcttactgtcagtttctgtcaaaaactgtgtccctactcttaaaaagtgctgttctcaaaattatttggtctactcccctggttttccctgcccttccccatctccttctctctcctctcccagtcacccttccttttacacactcttctaagtgatcttgttaatactgaaggtttccttttccttcatcacttatgaaata

SEQ ID NO: 394392 - DNA, 240 bp, Homo sapiens
gtgcccagcccaaccattttttattttaaacagtcttgtcattgaagctttaatattattaatttctaagctccaaaacctgagggaggaaagggaaggctgaagtctcaagaaagagcaaagtagtgagatgactgaaatgcaacttcctacctcacaagtttgtcttgggttaattctaaggcctaaaaactaccaagtatccactcagtaaatagctgttgaataaatgaatgaaca

SEQ ID NO: 394393 - DNA, 437 bp, Homo sapiens
aaaagcccactaaaatatacactgtatatgtgaatatatacttttaaaataaaaaatgccttactctacacattaataaaatgcttttgtgacgaatacaatagaatgtttaataattgggctacatttgacatctttaggcataacctatacctaaaacaagtgaaaaaagttgatgaattcttaccccatcctgctaagccttgcccttgcttgggtggtaaatgattttcccctctcgccctctatgccagcatctatctcttggtagtagctgcacagagcattgtgttaagaaggactttgcagctgagtctgcattcaggggaaagattgccgtgtttttagctgtgacttctgggcataaggcagggagagcacagcatggacattgtgtttgtcaccccttagtgatagagaagagttaaaatcaagag

SEQ ID NO: 394394 - DNA, 378 bp, Homo sapiens
agaaactatgaagtctgagtaagttatttcaacattttgccttgatatataagcaaagactaagaattaataggaaaatgtaattattttttggcctgctttgaaaatgatgctcccttggctaacttaactactatatctgggaaagtaacccaaaaaaaaaatttttttttggagatggagtcttgctctgtcacccaggctggagtgcagtggtgccatctcagctaactgcacctccatctcctggcttcaagcatactcctgcctccagccatactcctgcctcagcctctgcgtagctgggactacaggcatgggctaccacgcccgctaatttttttgtatttttagtagagacggggtttcaccatgttg

SEQ ID NO: 394395 - DNA, 260 bp, Homo sapiens
agaaactatgaagtctgagtaagttatttcaacattttgccttgatatataagcaaagactaagaattaataggaaaatgtaattattttttggcctgctttgaaaatgatgctcccttggctaacttaactactatatctgggaaagtaacccaaaaaaaaaatttttttttggagatggagttggaagtctaaaatcactagttagtaatatccctagtaggtagacagtcccacaccagactggccaggtggccttc

SEQ ID NO: 394396 - DNA, 146 bp, Homo sapiens
cagaaacaataacaaaaataacaatcaacctcataggaaaaagttcattcttcaaagaatgtaagaaaattcttactattcctgagagatatgtaagaagatattttctctatagttaacatacacaaatttcaatgggctggttg

SEQ ID NO: 394397 - DNA, 408 bp, Homo sapiens
cagatggcagctcttttagagggagttgtcagggaaggcctctcagggggctgcatttgagcagagggaagggagggagccatgtggttctgtggaaggaagtgttccaggcagaggaaccagcaggtgcagaggtctgaggctggcagtatgtctgctgtgtctgagaggcttggagcagaaggaatgaggagcgtggagaggtgagggcagagcggggagtagggagcaggtcattggaacctggaggccagatgagggttttgatccaatagctcaccacctccaggaagttttctcaagtcaacacttctcccagcagttgatctgaaccaaccaatggcttcttgcaaactgtcctcacctcctgcgtgtgtctatcttgctggaatagaaccttcccaaagg

SEQ ID NO: 394398 - DNA, 259 bp, Homo sapiens
caggggggccttgggagcccaccaggcagggatcagcaaggggtctcactcagcgagggactgcaaagcctcacttcagtctctaggtccagggatcaggctcaccaactccctgcagaggccccagcagcaggggaccgcaggctcacagcatggacagtgggtgatatctgttgtaagctctcctcttccctctcccgctccccatggcctccgctatcagaacatattctgcctcttgcaatatggacagagtggg

SEQ ID NO: 394399 - DNA, 317 bp, Homo sapiens
atctcagggttgactcagtgaaactaaattaggaagtgttataataattttccatctcacgtggttcttacattgaaattacagacatgcattcacagcaccacaaatttctgtttttcctataagcaggttgactctagtttattatacattttttcaagttttcctccaactaaattattaatctttgactgatggtgatgtcactcccaggattctctacaaaaaataaaaccctcaaataaaaatgccaccaatgagttccaccatgtagtttctcatgctaatatccatatttgattctaattaactgcatg

SEQ ID NO: 394400 - DNA, 276 bp, Homo sapiens
tggatagtggtggtgattgcacaacactgaatatacttaatgccactgaattgtacacttaaaaatggttaaaatggttaattttatgttatgtatactttaacccaataaaagagataaacagagagtgcttatgaggcaagttaagtgaaaaggcaggataccataggtctaaaccatataaaactacatttgcatttttttaaaaggcgggaaagcagcatactaaaatattcatggtggtttatctttgaggggtagtgttggggataacat

SEQ ID NO: 394401 - DNA, 583 bp, Homo sapiens
cctggtcgcgctgtgccgggtgtgacactacggagagcagattacattatcaaaagcaccaagttgaaacatttgcaaggtgtgcatcatttcacaattattggcaatggttcaatggtttcatctgctttgaacggtttcttctctatcattaagaggtgaggaaactgagcactaagacactaaataacttgcccagggtcatacgacagacatgagaggtttatatcaggcagtctccacccctgttccgaagtcaagaggctgactcgggttgctacttcttgacagaccggaccccagatcgccgaagaccatttggacacacttctatcaaatcctggcggtctccttctaacaggtatgcagttttctctgtagacccttaatacacagataagacttgaaggaatttatctgcattccctgattggtgtggcaatggaagtcccgccctgcatcccgacactgagcacagctgcagctttcgcttgttcattcattcagtagatattattttcatgcctactctatgccaagcactgctgttctttgaaataaaccttcgcctcacctctcacca

SEQ ID NO: 394402 - DNA, 1572 bp, Homo sapiens
aaagtatcaacgtcctaatctcatgggcacctcttgggtctttccatttttgccttcatttgctaagtggcatgcttttgattttttgagatgaaactttttcccagcaaagtcttttccccacagtgatgctctgaaagccaggacacctagcacaggaccctgggcatagtatgcactcagtacatgtggagcatgttgatcaggaacaaaaggagtagcaaaggtcagttcctgcaaaggtgagtagataatacaggtatgactgaaaggctgcaactcaggagtaaacattttacattcattcaagagacaatttgcaactagtacaccaaaaaattttggcttgaagcagtactttggggacttggctaaactctgtaatcacttggagaactttaaacaatactgacgtctgggccctactccagggattttgattttattggtctgttgcaatttaggttttgggaattgtagggcctccgcatgtgactgtaatgtggagccaggggtgagacccactgtttcagggtgagggatgcattagctgtgtgtgatttccatgtgtgctgcaagtatttaacctatgaccactcctgcatttggagtcttggaaattgcagcaggaggaaatgtctctctacagatctattttttatgtcacttgcttttagagtaagaggttatttcaggcacagtaatttgatttaatctgttttcaaatactaaatctgaaaatactaaaatgaaaagaatttgcaaatgtgagaatttgcaaacatgtggagtgtgttcttatgtgctttccagtttctctgatgataagaaatgagtaatgttgggccttgatttcctaaactcagccctcagtcactttctcaaattatttgaagaccttccaagttgcttcagaagcattgtccaaaggagattattcccagtagtgaagaataatagatggatgagaatgtctaaggaatcctacttctgtcgcagaagtggcactctccagaacctcaagggcccatggagttcatgggctttggagtcaggcagagttgaccctgagtcccatcccagcctcttaatagactagttacttgacttggaacagttatgcaagacaaagcacaatgatactgattgcagtaatgggaacaattcattcctctctgtatccatgccctttgcaatgcatgtttttagctactcccatggagggaaagattctgtttttccagtccttggatctgactggccttatttgctgtggccaattcatacttactgttctagtgaaacaattaggcatgttttgctcctcattctagactttaattaaaattaaaattttatgatattttatttctactgtattttgctgtattcattctgctcagtattctagttcactggtcctcttatctctgtttaatttagtggtgaacctatacattgtctggtaacttaattttgtattttcgtattctattgggctgtcgttcaaatgtggcttttaaacttcagttacttgttctttctacaaaaataaacattgattttctactt

SEQ ID NO: 394403 - DNA, 394 bp, Homo sapiens
gaaggaacaaagaaatccatagctggttgtgatcaattaattgtaaacacaaggaatttatttcttaaagcaagaagatatattaaatgacaatctcaagtttcccaagtcaagctaaaatcagattatatgacaaaaccctcttctttctttgctttaacacagagaacaaaggaagatgctagtactaataaataaacattaacagatccatgggggaaaaaaagactacacagaaccagttgtactttagtggctaacaatttattgataagtccagactaatcttaacacagtgagccagaaaactgagaatttagaggatgctgtgtggctccaagagtgtttcctcaaccactgtcctacagacacacaaacagtttacctagacacc

SEQ ID NO: 394404 - DNA, 205 bp, Homo sapiens
atctgctattaatgactgaattcagggattctgtgtaccctcttcccacagagcatggaggggttgaataacagaaggctgggctgagctggttttttcctgtgtctgactctgggctccctctgagcgcccctgtgtgccttccctcaggcccctcttctgctcggagccttccctggctcgctgctggctgcagtgcctcgtc

SEQ ID NO: 394405 - DNA, 273 bp, Homo sapiens
cagtaacactagtcagaggagaaccgttctgaatggataagtgggttttcagggcctattagtaagttacttcagtagctggtgctcactggattgtcgttcattgaccttattctcctagacactgcagctcagtgttgcctgtttgcatctagaaatggtggatttcagtactgggcaaacaaacaaagtatgctaaatgtcactgtaaatggaggaggaaatgtaaccgagaagctagatcttaactggtacttaggaatttattcaggt

SEQ ID NO: 394406 - DNA, 443 bp, Homo sapiens
gcggggtgacataatatgaaaagtgctttgtgatttgtaaagtgttgagttatgttagaagttttaattcgtgaatggttccacctttctacaaaatgtattaggcagctattaagtgccacatgctctggtatcactgggaaaggagatgcttcaaatgagctgcctgcccttaaggggtctactgggtgaaacagaagaaaactgcagaagagtttggcaaaactttaatagtgatatgaacaatatgctgtaggagcacagctttaccccaaggggatgagagagttgtcactgacaggcatcatttgagatgagggatggctaatgataggacctgggtggactgggaagcaaggaatactcaacagcaataacaaaggcaaagagttgtgaaatatcatcatatgtgcagagattaatgaattctgtgtgattgtgac

SEQ ID NO: 394407 - DNA, 492 bp, Homo sapiens
gtgtaaagtaatttgtatttcatagtttgtgttattatgtgacaagaaaatggtttccaaagtgcttctatcaattacaaactgggaaatgactccaggtaggcagctacctttagtggatcttgttttcacagataaatgacctaattaatgaaaaaccccaaaaccacaatggaagaaaaattagacaataagtggcttagagagaaggttgtattgatttggggggaaaaatgggttttttggttttgtttctctctaactttttgtttagggtatctttgagttgtgggaatagaatgttctctagttaatgaggcatattagatatattttcttttgtggtagtgacttctggtaatgtttgttcagagtagtatatgtttacagcactaaataaataataattctgagcattttatgtgttctatcttagcatacattaattttttattaatttggctagtgtgtttgtttgtttgtctgttttgt

SEQ ID NO: 394408 - DNA, 171 bp, Homo sapiens
ttctaaatgtataaaacatttactttcttttttaaaattctcaatggtcatttcgtgctttattcccctattaaactgaaataactttgcttataaaagtaatataggccgggtgtggtggctcacacttgtagtcccagtgctttgggaggcaggaggatcacttgaggc

SEQ ID NO: 394409 - DNA, 535 bp, Homo sapiens
tgacttggcctcccaaactgctaggtgagctaccacacccagctaagttttgtatttttagtagagagggggtttcaccatgttggccaggctggtcttgaactcctggcctcaagtgattccccctgacttggcctcccaaactgctgggtgagctaccacacccagctgagatcatttaatttttgatcacaactattgggagtattttaaaattgtaattgacgtagactggtatgacattggggactgatgatatggaatgttattgctgattcttcagtatgtggacttcttgcattatgttccatatattcttaaaagaatggggctctcatataattttatttcagatatgtccattatttctggactgttagttatgccatttaaattaggtatagccttgctacctttttccagcttatcagttttaagaaagatatggtaaatttattcaactaatggtaaacactttttctaaacattgttctaggttctgaagaatcgacagtgattgaagaaacaaaaacat

SEQ ID NO: 394410 - DNA, 346 bp, Homo sapiens
gagctggtgatgaccttgaggcgcctagccagggcacaggcagggttccgaaaccgatttctgtgtggtcactgcattattgccttcttactatgactgcgtgtcaagcggcgtggaaaccttgggacagtcttcccttcgcatagccgtgcgctactgtacacacatggcctgacgcttgggcggagagagtactggtcaccacgtggaccctgtccttgcaacgtgctgtagccagaattcattttgcatccaccggtctcccacggagtagagtccaggacccttcttatcccagccacagatcatactgcccatagagaggcccaagccacggtcaacccac

SEQ ID NO: 394411 - DNA, 234 bp, Homo sapiens
tggtctaatggcaaagattagaggtactaaaatacaatgttcgaaaagtaatggttggttgaatccaggacatagaatccctgggttttggaaaaattgtcttccttggataaatgccaaagcaacttcacattacagccaaggagaatggtaagatggcaaaaactgaagaggcttttaggtcgccaagagggctgatgtaaaggaaacacggcggtgtattcaggattgaag

SEQ ID NO: 394412 - DNA, 437 bp, Homo sapiens
ctgtagtcccagctacttgggaggctgaggtgggagaatggcttgagcccaggaggcagaggctgcaatgagccaagatcgtgccactgcactccagcctgagcaacagagcaagaccctgtctcaaaacgtatatatatagtactgggtggagaggcccagggcactccctggaggaggggatgtccaaggtgaattttgaaaggatggctataggaacccatcagagaccggaagcacagactgaaccagagagaggcggcacagcacacacacgtccagcacaggcgctaatagtcatgcccgcggctccctgaacacctgtgtatacatgtcccccctcagttaatgctcccgccaatgctgaaagctaagataacctgaggagactgaggctcagaaaggtcaagcaacctgtccaaggtcacacagctcat

SEQ ID NO: 394413 - DNA, 329 bp, Homo sapiens
agccacacactgcacactaactatactgcatctttccaatgtggcaccttttctgcattcccatgtccttccttcagacacccatcactctcttggcctacttgtctctagcatcactacctcccaagccaatcttcacactttgccagtgttctttctataataaaatgtacttcttgaaataaaattcaaacccctgagcctgtccttgagactaatctagttgaggcctatctcatcttctaacacttcctacatgcaccttcaaaccagccctctcaaaatattttaggttcattaaacaggctatgcttttcttcttgcttccg

SEQ ID NO: 394414 - DNA, 391 bp, Homo sapiens
tgcacgggggcctgccagggggacttcacatgctcagctgatgcaggtggaggggaagggagaaggctgcctggatgcggggcctgtccaccccttccaccccatacagcatctggttctggtgtgggtcctctcctcctctttctctacacacacacacacacacacgagaaacacgcagtctcacacgtctgatgctgccccacacgtgtcgccaacatcagcctttgtccagcctcagcctctttcctctctgagggtttggccacatccactggcactgcatttcttccctgcaattttgctacgtctaagtattgtctctattatgatctagtttttgtcaccttagttgacttgttaagctgaaatagttatttcaaaaggaacc

SEQ ID NO: 394415 - DNA, 561 bp, Homo sapiens
tttattgttgttaactgtgcatctagttcattagaatatatctgtcaaataaatatagccctctcaatgcagtggatttttattggaaacatgtttaagttagattatgtagaaaatttactgccttatttttaataagatctaagcccttttgaaaaggcatatggtaactgaaacatttatttcaatccattataatacaacaaacaagccttcagcatcatctgtgtgtcacctatcaagcagtggattaggtgccagtatggcaaataagaaagatctacaagacttgatcaatcagtccatttcactcctggagttcgaatggagtggaagaggtcaggagattaaaagactcacactaaactctaccaaaatattataagacattcagtgctatagatccagatcttaaactgtcatggaatgtacccgtacaggagggatgacttttgcttagagtggatcaatgaaggcacctagggatatgtgctgtttgagttgagctttgagtaattaagtcactgggtgtgggaaataaaagcagaacacacacgtatc

SEQ ID NO: 394416 - DNA, 709 bp, Homo sapiens
ctccagatagctttatgctttctttggccttaaagccttgcttcctttactctatgcccaagtctagctcaatttttacctgctggcacatacttgggtaaggggattctgcctgtcttgctataacatatctcagagcctcccagatttgtcacaagaaagtgcaaccagctctgaccctgttggcttctccttcctctgggggctctgtcccttggcaaagctctcctttcaaagcagtggcctgaggacggactcaaagcctttccttagttctcccttcacatttaataaatacagaacagcacaggggtgaatgtccaaactggaatcatacacttgaatttaaataccgaatattccacttactagctgcaccttcaagcaagctccttaatctgaacttgttctctcacctgtaaatgaggacaatagtcatacctatctcatatggttgagataatgctgcaaagctacaataaaatatcatgtacaactttataagctaaagaacccagcaaatgttaatgataacagcatctacaggatctgccctattgcctctctgacttcatctgctactcttttcacttctactccagccacactggccgccttgctggtcttccacaccctgggctgcccatgcctcagagcttttgcactggctagtttcgctggctagtatacccacagatgtccacatggc

SEQ ID NO: 394417 - DNA, 486 bp, Homo sapiens
ccataaaccaaccatccaaccaccagtctacccacctacccacccaactaaccatcatttgggctatatctatctgcatatcatacataatatccttgcaggaattaatccagcatccatatgagtgtaactcatacctaggctgataacaaaatctgaaaggtttttcactgaaatatatcaggtgactaaagaatttcacaacccaaaagaggagggtatatcgatcctagtggaattctatttcatggattttgttctgcctttattgacacagttagacattaaagagaataagtataataacaaaatttataagaaatgcttatggaatattttctaattttagctacaatgatgggttgtttatattctgtggtttgatttttatatcaatctttatgcagctattatcattacccaaacaagtagatattattgcccctttaataacagtgaaggaaactggaatgtaagaattgaggt

SEQ ID NO: 394418 - DNA, 370 bp, Homo sapiens
ccaggcgctgttgggggtacggggactgttgtctcagtggctcataaccaagggcagcggggtcacaggcctgggtattgtcaccagatgggcaaatctggatcctctggcctggaaaagctctcaaaccctcccaactctcaggaagacctcagggcattcgagcaggggaagagatgaggcagcaggccttatcatgggggacataaggagtgggggtcaggagtaaggtgcagggttaacaggactgaatctctgggggcaatgccttagttttaaggctgtctgcattttcactccggcgcttggagggagggcaggagagtgcagacgtgagattaatctctccaacaagcgcctggagcagaac

SEQ ID NO: 394419 - DNA, 216 bp, Homo sapiens
gaggatcttagagaaacagatagcttgccctttctaccttgcatgaaggggccttcgtgttttccggtagatggtacctgccctccaaaccaggtgggatgctaatctacctttcagctctaaagttctacttgcattttacatgtttctaccactggatgagggcatgccactggatgagggatgccactggatgagggcatggggtaccgagct

SEQ ID NO: 394420 - DNA, 545 bp, Homo sapiens
ggcttgccaggagcccagcaccaggtcctctgcagctgccagggatgaagaccccagaaggcacactgtgaatgccctttctccacaattcagaatattctctctgcctgtgtcggcgggtaggaagaaggctacttttggggacctacactgccccacaccacagagagctcctctttaaagagcttgcttctcaaacatccaccttttcaaggtaaagtctctcatcgtggggagctttgaagacgctctgctgcacggctgggtgcccttcaatgatgggctcgtcaaattctcgaagaaaatgacctgatcatttgaaaagcttaacgcctgcttaataaggcaccaaaaaggaacaagagccagttgccatcgttagaaaacctatctggaccaccctaaactgattttggggggtaaatactgacattttaaaataaaactttaacccttttaaatatatccattgaaatctgtaaaccgtcataatttgttacccgccatcatctattaaagaatatattccaatttatttattggga

SEQ ID NO: 394421 - DNA, 353 bp, Homo sapiens
gcccgtgtagacccctcaacctaaaactgctgcatttgagtcctgagttgcttgaagcccctacctgcatatcttgccccagaggcagcaggggtgagttggcagctatttggggaggcacgtgctgcagttgagagcacaacggctttccattattctgaggcagttgactctgcagctgtgactgagccgagggccactgcttctctagatcccaaggacccgagtccattggcagctgttcctgcaacatcatcccctctgagtaattctgaggctgttggtgctgctgtgggtgatactgccaatcattctgctgctgttcttgcagcagtgagagacagaatgagcaa

SEQ ID NO: 394422 - DNA, 623 bp, Homo sapiens
ttctctttctgagcaacttaggcaattatgctaatttaaggtaagagttttaaataaaatcaaatcaaaagtaaatttaaaaatttgtgatgaactgtctttctcccaagaactgtctggcctaggaaggcaatgtctgacaaacagcaagagttcagtgagttctgaaagaatgaatccatgaatgagtgcaggaacaaatcaacttcgaatgacaatctgctctacttctaactgaatttgctacaaatctcaccagcctaatgaagactgctactgaaatggacactcattaatcacaatatcagttcccactgcactccagtttggatgacagagtgagacctcatctttaaaataaaaataaaataaaatcacaacatcgggtgctagagccatctggaaaccatttaatggaaccccatgcgaataaatgcatggtccagggtcatctgagacaacgacatttatgtttttaagcaaccaagatgccacagtcagaggcaagaatccattcccataattaaacatgaaggactactctgaggaagtgtattcttttcttgaaaataaatttttgaatgcaatcaaaatcaatttcctttcctctggtcctcagtgaa

SEQ ID NO: 394423 - DNA, 136 bp, Homo sapiens
gtggatatccagttttcctagcaccatctgttgaagagactgtcctttcccattgagggtcccatcttggcaccctcgttaaagatcacttgacaccatatatgccagggtttatttctgggctctttgttttatt

SEQ ID NO: 394424 - DNA, 283 bp, Homo sapiens
gttgtgaagtaatgggaagtatatggcagtggataaactttgaatgaaaatattaaacaaggccttaggagaaaagtgtaatatgcttattatagatacattaatttaaaaaattctctggcttaatatcattaattatactcaaattagactttgatttaaacacaggtcctaaatttggattaaatataatagattgaccacaaatttatttcgtctccctccggaagcctcatcagtcataaaataaaggttacacccatgaccagcacagaaggttgac

SEQ ID NO: 394425 - DNA, 391 bp, Homo sapiens
tccatccccctcagcctcccaaagtgccgggattataggcatgagccaccatgcctggcgtgagccactgtgcctggcctgagctaatatttttaaggctgcatgccagcctccctgccctttttccctcttgaaccactcttcatgctttttatgctcaagcagtgtccagagcttcagaattatttttcccttactcacaccccattggaatctggagggctttcttggctggcttccccccgcaataggtcagaggtccctgattcccagggaccctgcccaagagacctgcgtctccccagctctgcagaaggttgaggcgtggtgggtgggagttggtgtggtcagcgtggtctggtagggttgggaatagccatggcaatggaat

SEQ ID NO: 394426 - DNA, 367 bp, Homo sapiens
gggcataattctcctccatctgtgcacttgcgaacctagaaaacaagttatctgctcccatgtatgatggtgtgacaggcatacagtaacagctatacacattcctgttcaaaaagcagaaattgggatgaaaaaaggagccatcagcaccatcaatttacaaaaccagccaggcaccctcctttcagtttcaaggcctgggagtaatcttcagctcactgctcagttctctgggcttgtgactgtctcaatcatctttactttttcacaaaaggtagcacatgtttgcagctgagtatcagcttatcagtttgtttcttcttttatattctctaaagcattctgttaaaaatagtggtgtttctgc

SEQ ID NO: 394427 - DNA, 325 bp, Homo sapiens
gctctaataaacttactttcaattcactgttggcccattcatgattccttccagtgcgaagccaagaatgctcctgggctgagccccaatttggggttcacctgcgtcattccttggtgaccatgaagagaccaataataagccaaaaggaactgagggagacctttagccagaccctaaattaagactgattgggttgagcaccgtggctcacgcctgtaatcctagcactttgggaggccaaggcaggtggattgcctgagctcaggagttcgatactagcctgggcaacagagcaaaaccccggctctactaaaaatacaaa

SEQ ID NO: 394428 - DNA, 381 bp, Homo sapiens
cctgttattgcaacattttgggaaaccgaggtgggtgggtcacttgaggtcaggagttcaagaccagtctaggcaacatggcaaaatcccatctctacaataaatacaaaaaattagctgggtgtgctggcttgtgcctgtagtcccagctaccagggaggttgaggtgggaggatcagctgaaccctggaggttaagactgcaatgagccctgggcccatcactgcactccagcctaagtgacagagtgagaccctgtctcaaaacaacaaccacaattacaaagaatggggagatgagcacaacacccaaagttctggctctgcaacatgagagaagttgccatttgcagagaagaaacaggttgagaggaaaatagca

SEQ ID NO: 394429 - DNA, 671 bp, Homo sapiens
agtgggatttctttttcgagccataacctgccttggaatctcatgggcctatttgtgtcagaaaagtcggtgctgcccagatgggcttttagagtattccagacaggcttctacttgccaacacatagcacatctctgcacgtccccaacccttggtttctttctgtctctctctctctctttcttcctttctgtatttctgtttctctctctgttgtttttcattaacacttatcattgtgacccagtatgcctccagtaagacacactgcaagctttggccatgcccacagtggccaccattgctgcccttagaacagttgtccttttgtctgagaagcagtcacaaaccatcttccctggcatggcactcgctgggtctgaagctgcccagttaattttgcagtaatgtttgtggactctggcaggatgtgcagacttatcaagtgttttattaaaagaccaaagaggcttttgaatgtatcaaagccataatgctcttcaatgctcatattttagtagcttttttttcatacataggttctgtgcattatttgtgtctgtctgcagaatggcttatttctcatttggctggtggcttgtgttactgtgtgtgtccccttgggcaggactcaccacctctcaggattctggcataacttatttgaatc

SEQ ID NO: 394430 - DNA, 610 bp, Homo sapiens
cgctctagaggaccccacgcgtaaagtaactctcacaccataattaattagaaatcaataacataaaaaatttaaaaatccctacaattagaaatgaaacaacatagtttcaataacacatagggcaagtaaatagcctcaagaaaatctttaaaataattttagctagagaaaaaccaaaaatacacctaccaaaatttgtaggatgcaacaaagtctgattttggaggaaaatttatagcattggaaacatatactagaaaaaaataaaattctaatatcaataaactaaagtaagcctaaatcaagaagaaagtgaatagtaaaaattaaagcaaattcaatgaaattgcaaatagaaaattaggaaagacattaaatgcaatcaaaagctgtttatttgaaaacagcaataaaattaataaacttctatccaggacaaccaagcttaatagacgaaatttaattgctttgtaatataccagcactggataattgaaatttggaatttaaaaaaagaaatactttggtatatatatctaatatatacaggacctatatgagtataaaactctaatgaaagaaattaaaaatgatccaaatatggaat

SEQ ID NO: 394431 - DNA, 295 bp, Homo sapiens
gaggatcacttgaggagcccagaagtttgagaccagcttgggaaacatagtaagactctaccttcataaaaaaattgtgcacacttgtatgtatgctttagatcctgtttgttgttgttgttgtttttgttttggtttggtttggttttttaaagcataagactgatgctttgttacaaagcattcctttgggagcatgcctgggaccttattagaattaacattcgttatacatattggtaggtaattaatgcagtaagaactcttccctttgtatttattagatgcaaagaag

SEQ ID NO: 394432 - DNA, 260 bp, Homo sapiens
atcagctcggtaccggtgtgtcatgaaacaatatccaacaaatgagaataagtagataagtactgtcttttaaaaaagtgtacttaaccatttccccactctccttatcccctggtgtggtgacggctgtaacccactaactgctggtaactgcccttcagagaaatgcatcccaggtgctgaatctgtagagagtgtgcattattctctggccccttctccactacattctacatttgtttcatgacacagattttttt

SEQ ID NO: 394433 - DNA, 471 bp, Homo sapiens
acctctgagtccaaattgcccctttttataaggacaatcacattgtccttagtcacattggattggattagggcccactatacagaccttgttttaacttgattcttctatcaagaccctgagaatctccaaataaggccacattctgaggaactgtgggtttggacttcaacatgtcttttttgggggccacaactcaacccataccagcttgcttgatggatattcatagctgatgtcaaagtaaatttaattctcatcctcagaagcaagaaagattccacgactaaggccaacaataacatccagggagttcgtttcttgagcaacgaccagctctttgcatagcacgaattgccaaaaaaggccagcgtagtcatttctcggccatgcacacctgtgatgtggcaagccatgttgacgtgccaaaaatgagaattctccagtaaaaataaaatagagtaaattaga

SEQ ID NO: 394434 - DNA, 325 bp, Homo sapiens
agttcgacggagactctctactcgcctaattaggaaatggtgtctttaggcgagtagagagaaaataaaatagaaacagattgaaaacaagttgcaaacatgagcatctgtgcctcatttcactggtccagaagtgacaggtccttggctgtgggaagcaagcctaaaagtgtagagtcagtgtggaattcacccacagtacagtgtttctgtcttttttaaccgacttccaacgatattctcttactctaggctggtctgaaggtagtgagttatctcaattgattgttcaccgtcagttacagattgaattcctcattctact

SEQ ID NO: 394435 - DNA, 237 bp, Homo sapiens
taggagaaaggacctggggtgtctcaaatgggtgcaagcatgacaaacagaagatgttaagagtagatatttggaatgatgaagacaatttccagttttctctaagaaggtgccgaattgcttgcaaaatagtctccaaggacaaatcatagatctccaactaaagataattaaaagagttaaatataacatgcaaaacaaacaagctgatgaatggaattggaaatttccaaccat

SEQ ID NO: 394436 - DNA, 305 bp, Homo sapiens
gaaatgctcctcacccctgggcccccataccagcgtttctaaactctcaccctgtcctgtggggctgtggtggtctggtctactgactcttgtcctgcagcagtttctagcagcaggcagaggaggcgctggtcctcactacccctggtgggtttgcaaaatggccctgtctgcatccttctcgcctcaggtatatgtgttgttggggccgcacaggcctgggcttggtcagcatgtacctctgagtgggctcttctattggttgctcaggcctctcttggggtgggccagtcaccttgtgggca

SEQ ID NO: 394437 - DNA, 167 bp, Homo sapiens
cccctcttcccaccagcacagacaccaatgggaattaaccccttcacttttcaaactctgcagggtcttgatagccatgcaaagaacttgaccttgttaggtggaagaattggtcatcactgctttaggatgggatgatcaagctagtgtctgcttacattggacaa

SEQ ID NO: 394438 - DNA, 317 bp, Homo sapiens
caagatggctgactagatgcagccagatggaacacctagctgcatgttccatctaagatgactggcgtgctcctaacagatcttcagaaggaaggcactgagagtggatggaggaaagacacaagaagctgggctgaagggggaggacaatgggaaccctgcatgaggctactatgcattgggattcattcctggtccccagcaacttcaagggaatgagtgagttgaactagtaaggagcaagcccttcttggcacaggcccctggaactctggcaggaggagacccatcagccaccacagacacaagttggcagg

SEQ ID NO: 394439 - DNA, 270 bp, Homo sapiens
gataaggctaggatattcattatatgaaaattctacttttataaaggcttggaattatccgtaattaaaacatttcaaaaatcttccacgagctcaaggagactccaagcctatggccctggatcacctccctgagacagctggagcaaatgtcaagcccagtgttgggatggcaccagatggggtgcatgtagcttgggagaccttccttggccctaaaagggagcactgtctcccccacacctccccctgctgggcagcatgggcact

SEQ ID NO: 394440 - DNA, 537 bp, Homo sapiens
agatacatatcaaagaggtccatacttaattttcatgttcattcactgtgccaattgagttctcatttcaggactgttacttattttgtgatatatctttgtaatacttttcttattccactgttgagttattttttcttctgagacatcagttaacatttgttgggctctctatttttgtcctccatatctagtagtttctttatgattctttaagcacctcatgttatttgcattactgtaattatcacaatctttttctaaatgtaagtatattgattttgttttctgctcttttgatcttatttaacttgtgtttttagcttgcttaattttgatgacattattttggttcttatttcctgtttcatactacagcattctttatattctaatctttttgctctcattttgtcaaattcaagtggctattgtaagcttgtcctattactcaaagcttttttgaaaatgttccttcttactgcagtcgagtcatataaatgaataaacaacaaaaatatacaagagaattttttt

SEQ ID NO: 394441 - DNA, 423 bp, Homo sapiens
  misc_feature (419)..(419): n is a, c, g, or t
ttgttttcaggaaatgagaattctttcggcaaaaggagaagctgatttgcagaagtgctgagcatgcctgagagagatgggagtgatcaagaccaagagtgccatttggatgtgcagagttgaggtgacatctgcctggagagattcaggaggcagctgaaatacactcaccagggagataccagggttcgtcatgggcagcaatgactacgatggacaagaagatagaggccctaatcctaattttctgagcaccatggaagccccctggattctagggagaccttgaggagaaagaagactcctgtaaatgcctgacattgaaattcctgcaagtctaggagcatgtgaactcaaaatggaaattaatttgatttaataaaaataaagaagaagaattgttttgggaaatgggtttntggg

SEQ ID NO: 394442 - DNA, 376 bp, Homo sapiens
  misc_feature (372)..(372): n is a, c, g, or t
ttgttttcaggaaatgagaattctttcggcaaaaggagaagctgatttgcagaagtgctgagcatgcctgagagagatgggagtgatcaagaccaagagtgccatttggatgtgcagagttgagcagggagataccagggttcgtcatgggcagcaatgactacgatggacaagaagatagaggccctaatcctaattttctgagcaccatggaagccccctggattctagggagaccttgaggagaaagaagactcctgtaaatgcctgacattgaaattcctgcaagtctaggagcatgtgaactcaaaatggaaattaatttgatttaataaaaataaagaagaagaattgttttgggaaatgggtttntggg

SEQ ID NO: 394443 - DNA, 188 bp, Homo sapiens
ggaagacgtcacctccatcccaggtcccgctcaatccacaatatcaccagacatctccacaagaaccgtcagctggttctctacatcccctgtcatgacagaatcagcagaaataaccatgaacacccatacaagtcctttaggggccacaacacaaggcaccagtactttggacacgtcaagcacaa

SEQ ID NO: 394444 - DNA, 325 bp, Homo sapiens
gcataaaggtcaaagcattttagtgtgctcacctttcattataaccacttaggcttcttgataaaatgcagattcctatgaatctgaattgctaagggcaggcccaggaatatgcattttttaaagttctttatttggttatttttgggacaggatcttgctgtcacctaggctggagtgcagtggtgcgatcgtgactcatggcagcctcaacctccccaggctcaaacgattctcccacctcagcctcccaagtagctgggactacacccagcatgcaccaccaaacctggttaattattttttgtatatttttgtagagatg

SEQ ID NO: 394445 - DNA, 705 bp, Homo sapiens
gaaaaaatattttctcagtgtttggtgccaccagtggttttataatagcccttgtattaggagctgcaactttaaaatatcggcttatttagcatctacaaatgacactttgttttaatttgcatttcttgggttattaataaggttggacattttccctgtacttatttgctgtctgaatttagaggatcattttcagcactgaacttttggttattaataaatcttcaagtatgataccttatggtatcccaaaagatatttgttatgagtgttaagtgagatatgatatgttagtgcctgacccatttgtgtctggaaggtataaaatgcaaaaatatattgtatctttcatacctttttttttcctcaaccttgggaactgagaaagtatgcttgttttctcattgaaaatactaaaaataaatttttatttcaggtaatttgatacaacttcagtgttttcagatgaattaataaccacatgtaggagatattagaccctgaagtttaattcttttgtatggttttaattacataaagtatgtatgtagacaagagtcttcagatacaataagaaaaaaaaaagaagttaattgcattatttcaatttcaaaaaataatttctaatccctgtatgcctttaggtgtaattcaaaaagatttttgctaatgttaataaattccattatttttagcttatca

SEQ ID NO: 394446 - DNA, 437 bp, Homo sapiens
ctttgtgcctcccaaatagtgcagaggataaaactgttgaaagcatcaaggatgggtagagagcgccagcctccaccaaccttatagagctgaaggtgggggcggggtggtggtctcagtgcagctctattgttaaaccagtgggtgtaatgggctactcgaagttgggtccctctgtgacgaaaccccccccgccccggccaagtccacttagatatggtttcttaactgcttaactgcttgactcttagttgctttacaagttaccgcttagagggagacaggatcaggtgtcctccatcctggccacttgacacaggagtctgtcccaaggaaacagtctcaaaccaggcagcagagttacatcagaacgcttggaagcactttttgaaaatatagagtcgcctccaacatcgctcccattctcaggtcccctg

SEQ ID NO: 394447 - DNA, 242 bp, Homo sapiens
tgcccattcagtatgatattggctgtggtataattttaaatagatgtctatttccttagctaaactttacacatgtgtactaagcgttctgttaaccaagagtatggattctgaggacaggctttggcagaaatttcatgacaaaattagaaattgtataaaagcctccataggacctgatacaaaagggactatactgtgaagaaatgtttatgtttactgagcaatattctgtctcatta

SEQ ID NO: 394448 - DNA, 466 bp, Homo sapiens
actatgttacacagctctcccaggagcagcaattctgaaggtgtcagtattgttaggcccactgcagactagagaattgagtctcaaagaaaggtcagagaacccaagtggggtccctagcatgctagagtgcagatttccgacctttcaaaccttgtgataccctgttatttgtttacttagtattcctgtcctttccttacctcctccctgcatacaactgtccccaaaagtggctcatatcatgatactttttcatgttaatttaatttcacactgtttcttgagatagctggtgataccctgtgcctgagcatcacagaaggtttataggagaaggcattagacctcataacatctgtctgccctaatctcttcatcaaagcttttaacaagctaccatcacagacaatcctttctcaatggatggaaaatatttccagaacaatattcaagcactccattt

SEQ ID NO: 394449 - DNA, 380 bp, Homo sapiens
gtgtcagcagaaactgccaactggtactgaaaaagacacatgacacgatgaaggaaggtgttcagactcctgacagaatccatgcacataggaaaggtgatgtgaaaacaaacacagagatttgaggatgttgatcttggagtgaagtgtccacacaccaagaaaccttggcagccaccagaagctggaagaggcagggaacagattctcccatagaacctctggaggaagtgtgtccctgccaacacttttgatttttgttccagtgatactgattttggacttcttgactccataataaatttcatccagttgcagtttgttacagtggccacaggaaatgaacacagttggaaaaagaacagggtatcttatagtag

SEQ ID NO: 394450 - DNA, 261 bp, Homo sapiens
agctcggaccagacttctgtcaccaggggcagttgctttgggggatggaggagaaggattttggtgaggtgtttgttttgttttgttttaactttgggaagagctggtataaaattcctcagatttaatggcctcacgagtgagcactggaactgtgttgtctgctctggataatccagagctacgtcattgatcctcatctgcttttctgcacatctgctttgggttgtggctctgtgtctcatgggaaaccatttcttg

SEQ ID NO: 394451 - DNA, 269 bp, Homo sapiens
acgaagtaactatttcaaagagggaaatgttagtatttctattctatgctttggagtagaaatgactgacaatactaggaagacccaatcacacctccatcaccccactggagacaggttcagggggcagaccccactttgttctttaataccaagagctagcgtgcacaacattcagacagcaatttcttaaaagagctccacaatcacttaatgttcataacgcgtcaaatgtatcggtctgaaaaaaggtgcatactcctcttggt

SEQ ID NO: 394452 - DNA, 374 bp, Homo sapiens
ccgacatgagcctcctaaagtggcgggatcacaggtgtgagccagcatgcgcagccagtggcatcattcttcaagtctacttttactccataagccaatctcccattgaaaagctgagaaaaataattctcaagtttcaactggttacagctgaccctctgaagtgtgggataatattggcttgatagggcagtttcagttcagcagaagggctggtgtggctcattggagcttatggaagggggttctaccagggtaataaggtcaatatgtgaatcctttgatcaaaaagacatgggcacaagccaacatggacccagagagagaatacaagtcttacaaacttgcagaactgaacagtcttgcctgggtcc

SEQ ID NO: 394453 - DNA, 208 bp, Homo sapiens
ccatggtctctttccttggctaggtttggcttcatttgatttggtttgaatgtccaactatttaacttgatttctaggagtaggcaataaggcaggagtgaaatgagaaccaaaagacagtgacctattttaaatactaggggatttcaaagagtgactactggaagggggtttaagcctagctagagagaagaaaattactacacgt

SEQ ID NO: 394454 - DNA, 231 bp, Homo sapiens
agtttggaattgtgggatacccccctgggatccagattgtccgaaaatcagtgtagaaactccacatgcacatttggttagaggtgtttaaccataactactattcacgaaaaaggtctactcattagaactgaaaatcataaaattgtaagttctacaaaaataaatcaaccttatctactgcccagtcctaccaaactacagaatgtgagaacagaaggtctgaccgtg

SEQ ID NO: 394455 - DNA, 320 bp, Homo sapiens
gtgcagcagcgctagaagctctagaaactgcttgctgggtttcgtgccatagcctgtcggagggcgtctgggtgggtccagtctggctgtgtcggatggtgccttggtgcagaaccgcgtgcctcccatctgcggccagcggggctctgtccacttccggtattggaatcaccaggcgtgttgcgtgcgtgagcatgtgcggtcttgtggacacctccaggtcctagacatgagaagcctgttgattcagaggctgcgtggtctccaggggttggtttggcctctgcctccagcttcgagtggacggatggctttccctg

SEQ ID NO: 394456 - DNA, 325 bp, Homo sapiens
aattggagtgaattctgagtaaataaaatttacaatacatgagcaatatagccatttgctagctatgtaatctggtacaagtaagctatatgtctttgtgactgtaatgccaggaaggtaaattcttgtaatcagtttctgagataatgtataaaagctcttagtgtaacctattactcataatcatcttcagtattatcaccagtactgttatttactaagccttgctattaacaaaatatgcaaaaaacctactctttatctctgaaaatttatgcaccttaatattaatctaaaactgggttttctatatttcaatcaattt

SEQ ID NO: 394457 - DNA, 164 bp, Homo sapiens
agagtaggcatctgtaggaaacatcttgggtttttttaattatttgctggattcatttattcaacagttgtatatgaaatggtttttacacatgaggtcctgctaagggtagtgcttgccaccttcgtggagcttacatttggcaggaagctgtattacactag

SEQ ID NO: 394458 - DNA, 482 bp, Homo sapiens
aagcattcacgggtgtgaaatcctggccctattttcaccaacactgtcaagtaggtttcttccacattcagtattttgtccatataccatttgtgtttttaccatgaattgttcgggaaaaagtagcaggtacacaggcttccctggagaggaagggcagcgtgagacgcatgggcccaggagcacaggccgcattttcattcccacactggcacctcagtcacctgcgtgggcgggactgtccaccccactggccccaggagcagccttgctggccatggggtccactggctggtccatggcacgtggcactgcatgtcctccctccaaggaccgcaccctctgtggatccctcagggttcccccgcccaggcaccttgtctgctccacgccctgtcctgggtctctggtctggcaggagcaggagggatcctgtcctctcagggccaggtcctccaccccatgaacaggaaaatgttatc

SEQ ID NO: 394459 - DNA, 122 bp, Homo sapiens
tttttcaaggtgggatacccaggggagtctgggctgtctgcaggagtctggatgccccttcccaggctctgcagctgaggcttacttcctgaccaggctctggcctgaactgctgggcatag

SEQ ID NO: 394460 - DNA, 341 bp, Homo sapiens
tagcatattataaagacggccaacctcttaacatggtatatagaattctactgttctgttctcaactttgatccagtcaattctgtgttttagggactatcatttgtgccactcccacaaaccaatttctaatcatatggggttctttaatttgcaagcaataataatctactctggttaacttcgtttgtagcagcaagtcccaaaccttgttgaatatcagaatcgccaaaactgtatacaaatttaaggtccagacgattttccttactaaaggaaaaggttcttgagatatgtctctaaccttaaatcttttttttttttttttttttttttttttt

SEQ ID NO: 394461 - DNA, 213 bp, Homo sapiens
gttggaggctttctgaggtaagatggatccttggaacatatgagctatggttactaagaaaaaataaaaactagtagtacactttattggctgtatgctggaggtggaaggagcatacactgtttgctaaacaccgtgccagcaaatgggatttcaacatgagtaaaacagtcttaacccttaagacaatcacatttgagccaaggaggcaga

SEQ ID NO: 394462 - DNA, 334 bp, Homo sapiens
gctgaacctttaaaaaaaaatttctgttttgagacagagtctcactctgccacccaaactggagtgcagtggtgcaatcacagctcaccacaacctctgcctcagcagctcaagccacctcagcctcctgaatggctgggaacacgggcacgtgccaccatgcctggctaatttcttaatttttttatagtgacaaggtctcactttgctgcccaagttggtcttgacctgctgggttcaagcaatccacccacctcagcctctcaaagttctgggattacaggcatgagccaccatgccccaccaaattaaaattttttattttatccaaact

SEQ ID NO: 394463 - DNA, 421 bp, Homo sapiens
taccctcactgtatgtattagagactccaagctcaaagagattacaatgctactgaatggcagagcaagaattgcaatttaggctggattttttaaaatccagatagtcaacaatatttcacattaccactctgactcgagaggggatcacgtggaaaaggggcaggctgcgaactgtttcaggagcttcagtggaatgcgtgctagccgagggaagacgagaggacactgcaggccggggagcaggagaagatgaaacagcttctgtggaatgcagagattatccttccttacagttaccaaagccgtatgtcgaggagtagcaaggaacgaggccagaaaaatttgacagatccgtaccacaaagggaatgcacagccaagccaaaaagagggggaaccccagtgagatagtaggtggc

SEQ ID NO: 394464 - DNA, 260 bp, Homo sapiens
aaaaaaaacccaacaatttattctgttacagttctggagggctgaagtctgagccgagtctcacagggctaaaatcaagatggcagcagggtttgttccttctgcaagttgcagcagcagagaatccgccattcgttgccccttccagcttctggtggtggcctgtatccccctgcttgtgaccacacgactgcaatctctgctccttcctgtcacgttgccttctcctcttctgtcatctaatcttcctctgcctctct

SEQ ID NO: 394465 - DNA, 286 bp, Homo sapiens
gtagctggcaggcactacaaaagcccatagcaaatacaaggagaggacaagaagagaaaacatctcagacgaggctccactgaatttatgaccatgctctataacacgtgccttaggaactggcatgattggttcttcaactacactcctcttttgtttttaagctgggctttggtataggactgtttcaagaaagaatatcatggcaaaaaaaaaaaaacctttaagttttaactaatttaaacctaaggatgaataagttagccaggccaaaacaaaacaaaag

SEQ ID NO: 394466 - DNA, 481 bp, Homo sapiens
tcgacctgggccccagttctgcttcttgaaacctttcctaccctgtccccaggtaaaccgaggtgctccttccagtaggcacctgttccacctgaggctgagcctaatgatcgctgctgtatgctaatttttataagaagtgctcttgccctgtctgtctccccacaggaatatgtttcctttctttcttataccaaatcgactcagtgctgactcaagctaggaaaacattagagatgtgttgactagattaatccagctgggcctctaacccagtgctgggatccccctagagtagccactcaccctccagaccctgtttcagcctatcaaggggcgcttagtttattcccaccagctggttcccactagctttagatagcaacaattgttacagagaagccagcttccctttcaagaagcaggaactggccagttcctgcttcttgaaactggtctttttgcgccagccggcccaacc

SEQ ID NO: 394467 - DNA, 387 bp, Homo sapiens
taatgcaggaaggaaatactgtggctatctctaagttaatacggtttgtaaagactgtttcctctacactttctgaattacctaaactttgtgcagtgatcatctatttctttcataaccaggtcctacagaagcaatgcagattgagatgaaggcctgcacgagcagtggtttgcatttcaggaaaaggactttgaatttagggaacttgaatcttttatactggacagccagcatgccctgcctttgcaccaaagggagacactatctctgtcttcaaagactgtttgctgtacaaacttcatcaaagacattcttgggcaacagatagtcgatgtctctgctcctaagatatgcagaaatgtgacagatgcgtggaaaagttct

SEQ ID NO: 394468 - DNA, 145 bp, Homo sapiens
ttgtctcccagtgataacccaggcgatgttacaaaaatgagtaactacaagagaaactgctaacaaaactgaagacacagaaatgaaatgggaaaagtagcaacactgagtcaaacgtagatggaattagagaagaaacagctga

SEQ ID NO: 394469 - DNA, 231 bp, Homo sapiens
gctgactagaggaccccatcgcgaatcacttaataaatattaaataaatccaaattgttatctaagaatcattcaggttcttagtatacagaagtggaaaaaaaaattatgacggtcttaacttccccagaagctaacattctaacttttaggctgaattatgtaacttactaggtttctctttctgcttttctttttcttttcctttttctttttttttttgagatggag

SEQ ID NO: 394470 - DNA, 314 bp, Homo sapiens
taatgcaggaaaacttatttctctttctttttaattttatttttctttaatttcccacctcagtatgaaatatctaaagtagctgaaatcatagaaacagaaagtagaatagtgattgcccaggcttgtgagagggtggacagagaattagtgtttagtaggtgtagggtttcagtgttacaagatgaaagagttagagattgttgcacaacaatgtgaatatacttaacactactgaactgtacacttaaaaatggctaaggtggttaatttaatgtcatactatttgtcacacacaaaaataatacataaga

SEQ ID NO: 394471 - DNA, 328 bp, Homo sapiens
ccttgaactcctgggctcaagggatcctcctgcctcagcttcccactagctggtactacaggcatgcaccaccatgcctggctaattttttaatttttatttgtagttagagaccaggtctcgctatgttgcctaggctgatctcgctttcctggtctcaggcaatcctctcatctaggcctctcaaaatgctgggattataggcatgaggtaccatgcccagcccccgattggactttgaggtatttttctcctctgctaggccacgggctcctttgtcatcctgccattctgagagcctagtgctgtgcctggctcagggtaggcc

SEQ ID NO: 394472 - DNA, 140 bp, Homo sapiens
cattgccgtgagagacagagtggcatttaggtaggtgtaaaaggagggggacaaatggagtttcctctggcaggtccctgagatcccaggggagggcagaagttaagagtcagttatgctttccatagagctgcttttaa

SEQ ID NO: 394473 - DNA, 311 bp, Homo sapiens
acacattcactacacccctgtgctcttagcatagccccttttggacagcatgtgctcctaaggtatctgcagaacagaatcaagcaggatgggcctacctgaggcatggcagctgggcagcacctggctgtcagtggctgtcacccaagcctctgcttaactcctatttcttaccttatccctctattctgctccctacctaagtgtgccagctctagttaacagtaggagggtgcttggctgacagaagaatatagattcacctaggtctattaagtgccgactgtaagtcaatgcatacaatgatctag

SEQ ID NO: 394474 - DNA, 222 bp, Homo sapiens
gtggtacctatagggatggcataatctgatagctaactcttattccagatatcaaaaaattaagaataaggaacaacaacaacaacaaaaaaccatttaattttgcttgatataattccttcttttaaaaacagaaataaaatattttcattctattctgtgctaataaagaaagatatttctgttaaaggacaaaatgctataaatattccagccactaag

SEQ ID NO: 394475 - DNA, 995 bp, Homo sapiens
ctttttgagcatatgcgggcagttcatttgaagtgtttgtgtagcacgtgcaatgcctgtgcttcctgaggaatgcattcagttgatttatttctttccttttagtgggtcttgctttcttttatgtttgtctgctttgtaaacttttcttgagatctgggtattttggatgttatgatattgtcactctcgaaatcagattgtctctcttctctgccttggctgatgttgcttgctgaaaggtgctgttattcaattgcgtggtgacatttccaaaatattttggtaaggaccagcttccttgtcagagtgatccatgcagtttctgttcaattatttccatggccagaaattgacctgacagagattattttatgtctctctcttcatcggcacatccctgaatactgcaaatgtgggacaagattctgttgttttatgagagttaatgtcatgactcttgccacttcaagtaatttcacaggagggaccatttgctggagcttcgtactccaccatcttccatgatgccactctgagagcaggtattcttgtcttttttgtgcaccaataaatctccatcacctaaacagtatatgagacagtttagtgaactggtttaaattcatatttgtttaatgtgtaagtaaatgtaattgaatttataatactttttatccatttcccatgagtcaggtgctgtgatagcaatgttttacgtatgcagttacctttcttttaattttcatattttattcaatgtgtatgtcttcaaatttgttcatggatgtcttagccagatttatgatttttaaaagccaaaatataatgtctcgctaaatctactgaaccagtggagggacatcatgtggtcacccactgctcccgtggcatccatgagtgtggctttaactctgcctttttttttttccttgattagtgttggaaaatcataggtgaccttttgtcaggagaataaagtattaagaaccatg

SEQ ID NO: 394476 - DNA, 642 bp, Homo sapiens
ttcttgcacaatggcgcaagtttggctagaggggagattctgtctttgtgcaaattattagagttccatcctaggaatccttatgatgtaataatatttaaatggcattagaagcattttatatattataggtactccaaaaaatcatcttacttggaaaatctaatgagagtttttgggtgctttatcagtgaccgtcatcatttagatgttctgtgttatctaatttgccttttataattattgatgttgtttctttctttctttttttttttttttttgagacagagtcttgctctgtagcccaggctggagtgcagtggtgcagtcttggctcactgcaagctccacgtcccgggatcacactattatattctcctgcctcagcctcctgagtagctgggactacaggtgcctgtcaccacacctggctaatttttttgtatttttagtagagacggggtttcaccgtgttagccaggatgttcttgatctcctgacttcgtgatctgcccgccttggcctcccaaagtgctgggattacagacatgagccaccgcacccggcttatgttgtttcttaaaatgaaaatatagtttttaaagcattatggagaatttaaccttccactggtctgatcaa

SEQ ID NO: 394477 - DNA, 492 bp, Homo sapiens
ctctagaggatacacctccataatgtgagcccagaccagagtgcaatagcacaatttcggctcactgcaacctccgcttcctaggttcaagtgattctcctgcctcagcctcctgagtagctgggactatagacgcccaccaccacacccagctaattttttgtatttttagtggaaacggggcttcaccatgttggccagatggtctcggatctcttgacctcgtgatccaccccccttggcttcccaaagtgctgggattacaggtataagccaccacgcccagcccatttaatgactttttaaattgagatattgtacttttcagttcagacattccatttttatagttttcatttctctgctgagcattcaccaatgtttgcattcttgaaaatataataatgtctctaaagttctttcttgccaaatctaacatttgggttatgctgacatctatttttattgactaatcttgattttgggacactt

SEQ ID NO: 394478 - DNA, 453 bp, Homo sapiens
ggattgtgtagatgtcttgagattatggtaatcatatcatcctttttatacttggggccatggtagaaaatgcagtttatagatgggtgagtctaatgatgcgaagagtcttacataaacataaaaactcaattctatttagttatatacttaacattttgtttttattggaaataataaaattatatggagttgagctattatactaaattttttgctatggaggctagagttttcacaacccttaagtgcagataagttagtgcttagatgtaaatgttaagaatcatggtactttgggaggaaatgttaatttggttgcatttatctgcagcgtcccatgcttttcttctgtttctctatctttccttctccatcttccaacatcctcacatgcacaagagcacaggtatgcacacacacacacgcacacgcattgccctgttggccacc

SEQ ID NO: 394479 - DNA, 628 bp, Homo sapiens
gagaaccccattttacacactggggataagtggcctagagatgaggcagccacggcacttggaataaatgctcccagccactcaagagggcagaattatcaggaatctgtggccctctgcagagagctttgggatcagacagcctcccactgaaacccagctgtcctcccccgagggggtgtggcccccaagctcatagctttgtgaggaccccacagcacattcagggagggctgcgaagtcagatggcaccagggtcctggccagtgaccgggcggccagatctattgcatccaaatagccagcttccactcggctacggcgatcgccagacatgggagtttggtgttgctagatctgatttgtccccctaagagaaacctggatttttaagtgaaatcgcctgatttttgaaaggttggctagcaatttaaattttgcaaaacactaacacctggggaccaccggttggcatccccctccttgtacaaagtggtgctcaggctgtagcgaagggcggaggggcttctgcttccccacccccctcctcctcctcctccattcttctgcccagagtcaccccctcattctggtcactcccgctccctccatccccgcctatcctgca

SEQ ID NO: 394480 - DNA, 247 bp, Homo sapiens
gtttccccactcccaaaggaaattcaaagtagacgaatggtcagaacccagaaattgatttaacatccagcttcaaaggggatgtccagggcaaactgtcttggtttgaaaatcaaaaccattctgcttttattaatgtcagaataaacataagtaatttaaatgtgacccactccagagattgataacttccttttttttttttttttaataaagtttcaggctgggcgcggtggctcacgcctgt

SEQ ID NO: 394481 - DNA, 371 bp, Homo sapiens
acaggctgcgcccagagctgcccaaacagggccagtaacctgggacctgggagatgggtgcagacaggcagatctcagtgctggggttcccccaaccttcagtattttttccaactccctacccacagcctaagtcctcatttctgaggccagaccctgagctcgcacaatgccttttgcatgtgtctagtgccacacttacctgctggtaggagccaatgccatttgttcagtttcagtctctaaggcctaacatcctaggagttggataagtattcatgttaacttcctccctcttccattacccctcacttgcgcctgcttcccaacaccgtatccctttgcgtgtaacctcctattatccctctggt

SEQ ID NO: 394482 - DNA, 462 bp, Homo sapiens
acaggctgcgcccagagctgcccaaacagggccagtaacctgggacctgggagatgggtgcagacaggcagatctcagtgctggggttcccccaaccttcagtattttttccaactccctacccacagcctaagtcctcatttctgaggccagaccctgagctcgcacaatgccttttgcatgtgtctagtgccacacttacctgctggtaggagccaatgccatttgttcagtttcagtctctaaggcctaacatcctaggagttggataagtattcatgttaacttcctccctcttccattacccctcactaccttatcaaatgagtcatccaagtcctcagaattctgccttcataaggaagaaggactcttcccgttgcccccggaattgcccttctgccagccgtgttcctgcatggctggactaatgaacagcatagctctcacctggagtcactg

SEQ ID NO: 394483 - DNA, 768 bp, Homo sapiens
tcggccttatatataattatatatgtaaatatgtaggatgtttgcacgctggagaacttattagccctctcgtgttggaagctagaagttttccttctttttactttccaattttctggagcaatagaaaaataattgggataatttgttctttaaaagtttgataaagtttgatagaacccccactttgtaaccatctcagtgtgttgctttttgtggtggatacttttttggcaactttacttttttcctcttttcttttttctttatttattgatagaagaatttaatgatgagactttttctctgggcacagctttagcaacatcatgtacgttccgatgtgttgtgttttaattgtcatgggggaaggtttttagtaacaaaatcaggttttttaatagagaaccggattttcaggttttttgtttctattgatgtcagttttcacaagttttattttctaagaaatgtgttcatttcaggctggacatggtggttcatgcctgtaatcacagcactatggggaggccgaggtgggcagatcacttgatgttaggaattggagaccagtctggccaacatggtgaaatcccatttctactaaaaatataaaaaaattagccaggtgtggttgtgggcacctgtaaccccagctacttgggacgctgagggaggagaattgttggaacctgggaggtggaggttgcggtaagccgagatcatgccactccattctagcctgggtgacagagagactccctctcg

SEQ ID NO: 394484 - DNA, 369 bp, Homo sapiens
agtacctaccttacgttgatgtaaagaatcaattaataatgtatgtaaaatgtgtaaaaccacacatagatcaataatgtcaactattactgttattatggttcaataaatatttgacagttggtcacacagtgtgttggcttcctggactcttcttcccccttaactttcctaaaaagccaagctattgaagtcattatctttttttgtttcttaaatcacatttgagttcatatggtgagccttggcagagcccccaaaaataatgaaacgaaaggaaacatgtctaaacaggtctacaatttggcatagcactggtttggtacaaacctatgcagcctagggaaatggagaatataatatctccag

SEQ ID NO: 394485 - DNA, 459 bp, Homo sapiens
cccttcttctgaggacgtaagattaaaaaaaaaaagtgtctacatgatgagataccacgacagatctgataactgtgactgacgggcaggcagtgtctacagtgtggatcagctgaccacatcctgggcaggatggggcaggagggtgagagagttcaccacacttctcagaacagcacacaattcaaaacttatgtattattatttctaaaattttctacttaatattttcagatctcagttgaccatgggtaactgaaaccacgagaagcaaaaactgaggctaacaggagaccgctgtaaaatatctgcagccactaagattggcagggagcttttaactggagacaaaagttcattcacagaaatcagttcattcatcttcagcctcatctcattcattaaggactcaacacaccaaacaatactctaggcaccagagacatcaaaacaaagaca

SEQ ID NO: 394486 - DNA, 446 bp, Homo sapiens
atgaatggacagatggatgcatggatgaatggatggttaggtggattgatggatggatggatggatggatggatggacaggtggatgcatggattgatacatggatgacggatggatggacggacagtagatacatgatggatggatggtggacagatggatggatggatggacaggtgcatgtatgaatggatggatgggtgaatggacaggtggatgcatggatggcatggagggatggttgaatggatggatggatggatgaatggatggatagatggatggactggagggatggttgaatggatggactggatggatgaatggctggatggatggacaggtggatgtatggattgatgcatggatggatggatggacaggtagaatgcatgatggaaggatggtggacagatggatggatggatggacaggtgcatgcatga

SEQ ID NO: 394487 - DNA, 301 bp, Homo sapiens
ctccctcaagtctggttatttaaaaatgtgtagcacttttcactttgctctctctttcctgccaccatgtgaagacatgcttgctttccctttgccttccatcatgattgtaagttttctgaggcctcccaatcatgcttcctgtataacctgcagaactgtgggtcatttaaaccttttttcttcataaattaccaagtcttaggtagttctttatagcagtttgagaacagaataatataaatgccaagctttttcagatcaaaacaggttaactagctataaggcttagggcatgcac

SEQ ID NO: 394488 - DNA, 125 bp, Homo sapiens
aatgtatatatgtaaacatgtaattatgacaataatatttacatctgcagacttagacatgtgcaagagatttgttaggaaatacacttaggaataccattgcaggatcttggtgtacgtactta

SEQ ID NO: 394489 - DNA, 505 bp, Homo sapiens
gttgtggaccgtgtctctggttgtgcacgcatgtgataatgttcactcagtgtcagggttgcaccactccagttgagcacctcgtggaaagcggtgaatggaccatgcaccctgcacggcctgttagcgcttgccgatgtcctagtgattgccacgtgccactgagtccaggtgcttgctggccgaagcttgagtgtctctctgaaggtgactagactagaaagggaatagagtgtaaagaggaaatggaggtgttacgagtcaaatggaaaaaaaataacagtttagaaaaaaattaaaagtaactttactgagttgttataagtcaaataatcttaatgtgttagaggcaattatgattcaaaaaacagaaacagcaaaatgtagaaacctaacaacctgtctttgagcttttcataagtgtggaaaatctgcattaagctgcatgaaacattttttattttgcttctttcacattgttcctgatagggcaccattcccaaac

SEQ ID NO: 394490 - DNA, 234 bp, Homo sapiens
acagtgtgtttctttcataacggttgcaagaaaatactgatcagtggattgaattctgtgtttcatccagcaaatttagtgattttggaatctggttaaaagcaagtgacctgttcttaaagcaaagtagcatgtttgcatcacttctatgaatgcagtattcattgccatatttgagacaataagcattcgaacagccagtgttaaactctgcctgaaatgcccttgggaagt

SEQ ID NO: 394491 - DNA, 163 bp, Homo sapiens
tacatagtctggaaatcagaatttggagctttaaactttaacatgggtaggatgccaactatgctttaaagttattttctttgatgcagaaagacataatttttagtatatcataacattaattcacaccattaatctttttttctctgcatattgaatcata

SEQ ID NO: 394492 - DNA, 232 bp, Homo sapiens
tcctcctctcctactgtatctaggttaagagagagtactctttttaacctaggaaccactttaagattttagaaataagaatatgtttctacagacctgaacattagtggttttttttttttttttttttttgggaaaaaaattttggttttggtggccggggtgggggggaaggggaagaatctgggttcacaatgacctcggcttccagggtccaagcaatttccgctgc

SEQ ID NO: 394493 - DNA, 320 bp, Homo sapiens
tgcagtcctcagctctggccccaatagactgtccatttgtattgattttgcctaagtttcttccttttagatcaacaaacttatggagcgcctttctgtttcatagatgggatgcttcttgattcgtgactcgctaatacatagccaattagatcactgaactcttgttgaaatattttctttctttttgagactgagtcttgctctgtggccaggctggagtgcagggcgtgatttcagctcactgcaacctccacctcctgggttcaagcgattctcctgcctcagcctctggagtagctgggacttcaagcatgtgc

SEQ ID NO: 394494 - DNA, 445 bp, Homo sapiens
tctctcccttcagatctcagctcaggtgttacttcaagggaagccttccctgactctctagttagaacacatgttccttccattcccttgggttgcacacatagaggggatcttgtggctaacataagctccacaggagcagaggccaggtctatttttgctcactgaagcagcctagtacttggcacagagcagaaactctgtaaatatttgttgaatatttgaatgaaagaaaggaaggaaggaacaagaattaatagaaacaagtttaaatggggtgttctataaacgtgtgcatgggaacagaagtggggaggagaacagaagcctattaaacattgaaaacactgcaggagtatttagcctaaccttcatctagatgacagacacaaagtttagtttgtttactaaaatactgaaataagggagtagggcaggtaatgct

SEQ ID NO: 394495 - DNA, 530 bp, Homo sapiens
ccagctccacacagtcagtccagggccacggacgcagaagacagaggagaagaagctcatggcataaagacagaggattgattgcccaggaggcttccaggggctttggctcctggggcttcttgtcagcgctgggtcagagcaggtcacccttgtgtgcagacactaggttgctgcacacagcggtgaagaatgggggagaccagatggaattgggtgaggcagggatgctccttggtgtttagagttttcctctttctttgccttgtgggttctctgtagcccatctttgctttttgtaacactagttttcagtaattccgacctttccgaatacctctatgtacatatacctgtctactctcctttcagatacctgtaaagcctacagaaaggtaatcctgcagattatcactctattcagcttaacagatgctcgtcgagtgctgctgtgtgtgtgggcctcaggttcaggtgcacctgcctttgtgggaagagcacagcttccctgcataactgctggagggtgg

SEQ ID NO: 394496 - DNA, 199 bp, Homo sapiens
gggactccgggaccttgatgtaagcaggctggtcgctgagcaacaatgaaggcctttctctgccagggctggtgcgtcaccatctgggggggtgcccagggtacccccatgccagcctctttgtccggacacaggcatggctgggggaccagggatggtccagctctgtgctggccgccggcagggagggagcctggag

SEQ ID NO: 394497 - DNA, 302 bp, Homo sapiens
tagagcacaagtccattcacagtgaaggtagggtccaataaagggtcaaatactgcccacattccctgtttttccattttcctttattgtttaccattctatttttattttacatttagacagctgctaggttctaagatactaactagatacattcttaagttttgagagcatatttaaaaggcacagttgccacagatatagtattttacatactgtagaattttaacagacatttctgcctagaacatattttgttttttaaacatacaacacacaattttgagggcaaaatatacatg

SEQ ID NO: 394498 - DNA, 500 bp, Homo sapiens
aatctaactaatgcctgatggtctgaggtggaacggtttcatcccgaaaccatccccccaccacacctcatctgtggaaaaattgtcttccacaaaaccagtccctggtgcccaaaatgttaaaagaccactgcatatatgtatatatacattcatacagtattattacagggattttatatccatctaagtggattagatttattttgaagaatctattcatggtatctaaaaggtagagatttcaaagttaatttattaacaaggtacatgaaacagttattgttcaaggaatatttttaaaagatgaatccatgcacaatcttgtttctcaaattatttatatattcatgtaaaagccttttaatgaaaataacttccaatatttaaaaaagttggttttgatcccatagccagaaagttgctgctatttatgaaaatcaccactctttgtatagtctctagttgaaaatgctaaataaaataaattctatttccaa

SEQ ID NO: 394499 - DNA, 399 bp, Homo sapiens
caggccccgagcccatggcgctgcagagccggggcaaggggacgcctcgcctcaggctgctgtggacactggacgacatcccacgccgccgcctctgccagagaggcctcccagctgagggcaccaggcaggtgcccagacctgggctgtggcttccagacgagccttacaacagcctgtccaaggacccctgatcccggggaagatgttccagggggccaggccacagggtccagagcccagcagtgacagcgcctcctatgttgccagcagtgccggaatcaaaactgatctgacctcactcacaggggcctggagctactatgattcacttcctcgcagctttctgctattttttttggttccaaaaggtttggtgcccccttgccacccagggca

SEQ ID NO: 394500 - DNA, 323 bp, Homo sapiens
aagatataggatcttgctctgtcacacagactagagtgcagtggcataatcatagctcactgcagccttgaactcctgtgctcaagcagtcctcctgccttgggctcccaaagtgctagaattagaggcacaaaccaccacgcctggccaagcaagcatatttcagagatgatgaaccgagagaaaaacaaaaatcataaggtgtaatttattgttcttacatgtcaatatttgaggtgtgctttaaattaaacattttaaagatgtaagatctgaaaggggagcagacattagcgaagtcaacgatccccacgccatctcat

SEQ ID NO: 394501 - DNA, 268 bp, Homo sapiens
taacagacatctcacaaccaggacatcccagaagaacactcttaatctccacttccttgtctcactgacgagccccagcaccaacgcagtagctgaggccacaaaatttctcctttcctttaccccctacatccaatcccatgaattgacagctccacctctgaaatacatccacttctcactccctccacccccaccgtcatttcttaccaagatcaccagttatcgcaacagactcttaactggtctctctgcttcccctgactgc

SEQ ID NO: 394502 - DNA, 281 bp, Homo sapiens
tctctgctataacactcccatatagctctcccttctaggcattacatgctcttaaagaataatttcccctggagcgggttgaagtggacagtgctgagcccaggattcccagggtcagcttatggaagaggagccaactcctactttacaagcctctgagcaactgcactcaaacgttcaaattcccagagagctgtaatcatcagcagagtcaccagctagtcagtggcagaggtgggattagaacccaggtctgcttactggagggtggcctctacctc

SEQ ID NO: 394503 - DNA, 346 bp, Homo sapiens
agttaaaatttatttagttaaaacatgatacatattttggctgatttattaaaaatcaaattcctggctgggcacagtggctcacgcctgtaatcccagcattttgggaggccgaggcaggtggatcatttgaggtcaggagtttgagaccagcctggctaacatagtgaaacgctgtctctactaaaaatacaaaagttaaccaggcatggtggcgcatgcctgtaatcccagctactggggaggctgaggcatgagaatcgcttgaacccaggagccggaggttgcagttagccgagatcatgagatcatgccactgaacttcagcctgggtgacagagcaaga

SEQ ID NO: 394504 - DNA, 221 bp, Homo sapiens
ctgcagaaggtgaggacggaagcacagagagggggcgacggtaatggtccaggcaggagacatggtgacagcggaggggacaaggcgcagtcaaattctggacataatagcagagcaagagggtttgcagatggattggccaaggagtgtaagggaacagcagagccaagagccctccagcatttgagaaggccgggtgggccaggcagatggtgtcaaga

SEQ ID NO: 394505 - DNA, 608 bp, Homo sapiens
tgctactggaaagtccgctcagcacgctgaagtgtaattgtgaagcaaaaattaaattctcagccttcagccaactgatggaccccctctctcagcctcaggcgttgctcagtcaacctgaaaatgtagttcaggccatggttagggaggtcaggcaggcctcattgggcccctccctttggaactgaggcccagctgaccagcattcacattaaacagactctgacaaaggcggactttttatagcagcgacagcacaccacattccagcctgactctagtgtagcatcacatgacaggtggcaggccctgaaagaaatccgagtattttaccccaaaatagatttctttgacatttttcagaatggctctacaggactgtgtcttgtggggaaagtctgcaccctgtagagaatctcctcccttcccaggtcttttccctggtgcaggagggaattaactcggagtctggcaccttgtgaggtctgctgcctgctgcctggaggcctcatctgcttgataaagccttggtctccacagccccttatcttaagccgaggcattcctttctattgattccaagtctttagataataactctttcaaac

SEQ ID NO: 394506 - DNA, 740 bp, Homo sapiens
aactatggattgagtgatattcctgaactaacatagaagagtaatatttagtatgaaaatatgtggttgaaaatatttagtatgaaaatatgacgtgtactacttctatagatattcattgaaaaatataacacataatatttgtgttatattttgaaaaatataacacagaaaaatacaacacacaaaagaaacacagtttcatccatgtccctacaaaggacatgaactcatcattttttatggctgcatagtattccatggtaatatgtgccacattttcttaatccagtctattgttgttggacatttgggttggttccaagtctttatgtaacaaacctgcacattgtgcacatgtaccctaaaacttaaagtataataataataaaatttaaaaaaaaacacaaaaaatataacacaaaagaaaaacacataatattcattgaaaaatataacacataatattcattgaaaaatataacacataatatttactgtatatgtgacatactttagcaagacttgatatgactgttaggtcaaactggaattcacagcccttggaagcgttcattctgctgatgtgtatgtgtgtaagcacttaaatgtaattcttatgatatagacctaggtgcatggatacatagatcaagtgaggatgatgacagccacatcttaaaggaacttgacatagagacagataatatgtggtgaagatgccatgtaatactggctca

SEQ ID NO: 394507 - DNA, 464 bp, Homo sapiens
aagcagttatacagactcagtgagatacaatgtgactcccttagttaccacctctgtgggggcaggcctaggtgggaggaaaaccttgcacccttcatattgctgttcagttttggtgggcatctaccaagggaaccactctggaggaagactctctgtctgatgaaatacaggggacaggccaggtgcttactagatgagtagtatctacttatataatttctgaaattttgaaacatcctgaactttttacaaactaaataaggagccagaagtaagtgatatgtaagttccaagaaaattaaacaactagcttctaaatatacctcaaaaagtaatgtggtttctcaaggcttgtgctttgcagtgggcaaatctgatttatatatttatcaaagaccataatggatattacattccttttctgtaagcagttgatactcaatgagatacaatgtggactc

SEQ ID NO: 394508 - DNA, 645 bp, Homo sapiens
acagatatggtgaaagttgcatgacattgtgaatgtacaaaatgccactgaattttacactttaaaatgattgatgaattttgttatgtgaatgttattacaactttatgtatttgagtatatgtcatttattaatggacaaagatacattctgtaatttgtctacctccctcttgatctgaaaaaactacaaagcatgtctcaattctaatgcaaagtcttaaccaaaatgattttttctgagctattcatatttagcttctggtgactcacaggaacctgaattttatgttccattcaacactccattatgctcttaaatgagaatctaataattttcccttggaatatttttgaaatccaattctaagtatttagaattttagacacagtcgtatctctcgtttgaatattccaaatattgaactttgttcaacattgtttcaatttgcaatatttatgggttgtcaaaacaaaagtagagatttttttctttatgtccgtgtctaaaaatgtcattttggaaatggcaataaaatagagcattaaactgaaattaatatcatgatgttgaaggtgtgacctaattaaaatgcaaatgtaagcacacttctttaaaattgacattgcagcttatatattccc

SEQ ID NO: 394509 - DNA, 274 bp, Homo sapiens
cacatcagcacgtcttcaggacgcatgcacctgtggccagccccaaatgagaccacatctgcccttcaggtgttcaccacctaactgggggacaagacgattattcagggaaccagatgttatgatcaggagcttttacgatcaggtgctaaatcagagtagcctggaggcactgaggcaccggcagcatgggcaagatcagccaggaagtgatcgcaggacaagtggggttcgaaaggtcgcaggacatggagacttgagggcttccagtggg

SEQ ID NO: 394510 - DNA, 444 bp, Homo sapiens
ctatgtcaagagttaattttcacttatagcccataaagccataaaaagtctactaatccatgttctagacagaaagtaacagacagtaatgattatgtaacaatccgaagaaaatgcagaactccttccttagcagagagtgattcatcaaaatagcttttctccctaaaaaaaaaaaaattcaaaaacaggggctgtgcaattggaattaaaggccctaaagctgctgctcctccatggtcaaggttgcaacacatttgaataactctgaaggagcctctgtcataataaaaaatatgtgattaattagatccgtgttttttacttaaaattaaatacatgattccacataggaaaataaaatacaggtgactcttgaaaacatgcatttgaacaactgcaagggttcacttatacagaatttttgtcctcctctgcatctcc

SEQ ID NO: 394511 - DNA, 686 bp, Homo sapiens
cctggcatctcactaagggcaggggactaaggtcatgataatgtggaggaggctttctctaggctgggaaagtagtcctaggggagcacagactactttgttgactgaaggggactttgttcaatgaagagttacagtgtatactctgggaattggtggtgggtagaggagacacaaaagtggaagctggtgttacaaacccgacataaactgctgctctcaagttggtctggcatcggctctccatagaattcttttgaattcatccttccctgtaacttcttgtccctgactctgccctcaaatctccaggcaaatccttgcctttcaatgtggtttggatagcaatgggcactgagttcatctatccattcatgtactgatttgtggagattcattcagtaccagctatgtgcctggtactgtgttcatcactgagataacaggaatgaaagatcccgttgagtggatgatccagcttcctggtatcaggttgaggggactgggagaagcagaagggatggagagtcggacgaagagaaaagcgttcttagtcaagaggaagcgagtctgctgtaacccaacctgcagaccctgcatgcgtgaacatggtgtgatcagcctgtgaacattcataaacactgagagctgcgttacacagtgtcactggttcaccagaacctctg

SEQ ID NO: 394512 - DNA, 318 bp, Homo sapiens
ctgtaatcccagctactcaggaggctgaggcaggagaatcgcttgaaccggggaggcaaaggttacagtgagctgagatggtgccattgcactccagcctgggtgacaagaatgaaactctgtctcaaaaaaaccaaaaaacaaacaaaaaaaaatcatgcaacagaatgttagaattggaagagagtgaaaagtaatttagtttaacccagaaagcagtgttatttcccacatacttcaaagaacagacttttaagtattcttttaaaagtcagaaatgccagccaggtgcggtggctcatgcctgtaatcccagca

SEQ ID NO: 394513 - DNA, 149 bp, Homo sapiens
gtatattgtgggtgtgtctgtacaggcatatgtgtgcccatgtgtgcatattatgggtgtgtctgcacatgcatgtgtgtgcccgtgcatgtatattatgggtgtgcctgtatatgcatgtgtgtgcctgtgtgtgcacattatgggtg

SEQ ID NO: 394514 - DNA, 244 bp, Homo sapiens
cttagactaaagcatatttgaggtgagaattacacatttttagtagtttgtaagatccatgaaaaaaattatctgtatttattactctctgtcaccctgtttcatcttgttttccaccatccataattccacttagcttaattcatttccctgtgccttaggcataatcaatagttgaattgcatatttctgctccagaactctgctcttataatgatattttaaaaatatattagaacaaagt

SEQ ID NO: 394515 - DNA, 468 bp, Homo sapiens
aattcaataaccagttagagtggatgcccaaccaataagaactgatggcatactgctgggaagtaactgattatatagcttagtgctactcaaagtatggtccatggactgatgccagtgtacagttgaattataactggcctatgaagagctagatagagaagttgagagtatttagaaactttatggcaaaatggcattgctatgacatccaagtaggtgaccaatgcaattatcttgtggaacagggtagtttgggtgtgtcactcttgtgtggtgagtcacatgtggtgtgagctatgtataagccatccaccataggactacatactggtcttgacagattggaaataaaaccccggtccttcaccacagatagtttgagaagcagtaatctgtttatctctcttaacgacctatctaatgtgtctgtcatccatctcttaatcaattcatctatttacttac

SEQ ID NO: 394516 - DNA, 297 bp, Homo sapiens
gagatacctgtgaaggagacaaaaagtggtcagagagataggaaagtcaaccaagagagaattgcaccttaaaagttaaagctagtgaggatttcagaaagtaagaacagttagttggtctgtaatgtcagaatagttcgggatagatcaatttgtacactgagaagtctcctttattttggcaatcaggagatcttagagcatttatggcagttccagaaacctcaatactatatattaaggagtgagtacaagagaaagaaatgtagactaccagtattatgtcactagaagatt

SEQ ID NO: 394517 - DNA, 138 bp, Homo sapiens
cacagagaataccccaccaaccttggtactattaactctgcaatgtttcagaacctccttagtcctgtgaggaatgcaggaagatacatcacactgaaattagtgggatactaaaagtctgggattacgcccaggaac

SEQ ID NO: 394518 - DNA, 111 bp, Homo sapiens
tgtgacagagcaaaagtctgtctcaaaaaatacctagataaatggagagatagactacatttatggattagaagtctcaatgctgttgttatgtcaatctcctaaatccat

SEQ ID NO: 394519 - DNA, 196 bp, Homo sapiens
gtcgttagcactctacgatgttagctaactgaaaaaagtgttgtcaccgagtcatccttcaacaaccttatctctaactaccctctcttcatagtctacttcagatagacaaacttaattatctcatttctctgaaagtgccatgctatttcatggcttcacacattttttttttttttttttttttttttttttt

SEQ ID NO: 394520 - DNA, 280 bp, Homo sapiens
gctttgggttcaaatgtcagctctgctgttcactgcttgggtgactatgtcagggtgcttttggctgtaagtaaatgaatacctgactgaacatggtgccaaaccttgcaaagcaggagaggtgggtaggctttcctcagtagccccattgcttatcagggaggagaagctctctcagaaggcccccagctaactttccctaacatctgattgtttgaaaatccggacacttggctactcctacctgaaaaggaggcagagaatgtagatcctagtattt

SEQ ID NO: 394521 - DNA, 621 bp, Homo sapiens
gcctgcatccccaccgtcccttcatgtccaggtgcggtgtctccgtcccagagaaactgcatggagtccccccacggttcccactggagccagacctcagactcggagctcctcagtctctgctgggtcagaggcagtgcgttcattttaggagcaaagttgaattcaaatttggatgagcacacgaggcccctggtggagctattccttctgcctttgaaagttctgttgagaagttgcacataatgacgttagcagtcttcgctaggcataggatgttttaatgaatagtcttccgtttccagtcatctcttactttaaaacatgtctctattatagaactaaaaaatgcccatcatagagggaaatattggaatacaatgaaataaagaagaaaattcaaataaataatccataacttggttatccagaggcaactcctgttaatttttttggatatatttcattcctaaagttctatctttttaagattgtcatgtagggaacacaggaatcacatcccgtgcccccttcctttcttaaaatagcatagttgatgccttattaaaatctttttttattatagtaagtaataaatttcagccagattgcatgtgtgga

SEQ ID NO: 394522 - DNA, 388 bp, Homo sapiens
attgcagtaagcctcccacccctcttatccccaagttatgacaacccccatcctagaacccctggtgcagtccgtctggcatgccatatttgcctagctgtttaactctttgtaggtattcattgatctgatggggttaggtgggcagagcctgttccatgccccttctttaggcacaaaatcagtgcctaaagtgacatttcaaccagccttctagacaactctaatggcaggtatcagatctcgagatgagcttcaccatttcaccttgggttccttcaagactcataggttccatttagagccagaaggaatcttcactcatatacacatgcatatgtgtacaatacatatgcatatgtatatttatatgatgaggaccagtaat

SEQ ID NO: 394523 - DNA, 295 bp, Homo sapiens
gcacagcttacttgttgtatcccattcaggaataagcaataaaccaaaaatatgtaagtgaggaatagggggagaattgcaggcttatttcactcttgcatgtacacatacacaaaaaagttcccactttgttgggtgtttctagtaggttatcatctgcatgatgaaggctcaaggcagcaggaatgatagggcacttagcacaacaatcagattagaaaagaacagtttagaccctaaacaactgaccacttcatgaagcttaaagaatccaaaggaaaaaatttagaaatta

SEQ ID NO: 394524 - DNA, 440 bp, Homo sapiens
agtagctgggattacaggcacgtgccaccacgcccagctaatttttgtattttttagtagagatggggtttcaccatgttggccaggctggtctcgaactcccaacctcaggtgatctacctgcctcggcctcccaaagtgctgggattacaggtgtgagccactgtgcccggtcaacatctttagatagttacaggagactcttctcctccataaaggggagaggaccccgaggcaggggaaggatgagctggaagtcacccagtaggaatgtggccccaaagccttgtgcactgggcttcctagagcccagataggggtgatgatgccatgggtgggggcatggggcccacaatggcaacatctcaccactggttctccaggagcccagctgcctggtagctctcagctgttgcagatgcaacccagcttcccattcg

SEQ ID NO: 394525 - DNA, 349 bp, Homo sapiens
aatgggcacaccgctaatattgggtctgacctgctaacaaataatacattaagctaatacaaatttgatttctgactgtttttgctctaagaattgtttataagtactgaaataaacaaaaaagggcaacaggaggaattaattcattttctaaacaagaggaatgaaccaaggacttgtacagtccacaaatttgtccttgattattgtgaggtagtagaaaggagcctggattaggagtcaagagactggggtgggggcgccagttgaatcactaaggactttgtacagctactggtatgtcattctctttgagtcctagtttcctcataactgtcctacctgtccc

SEQ ID NO: 394526 - DNA, 167 bp, Homo sapiens
taaagcataatatccaataataataagagtattgtgaatttggcattcatattgcttggtaatatgataaattagcatctgttgttgaaagtaattggatacctgatacactgctggtgggaatgtaaaatggtgcagccaccatggaaaacagtatggcagctcct

SEQ ID NO: 394527 - DNA, 212 bp, Homo sapiens
gatgttcacagacacagagtttcatgaagctgtggtgtccagaaaacctgctgcacatagggtgcacaatgagtttccatcttcttgcctctttttaaggggcgagaactcagtccgggagtgtcttaaactacagaccttcatgggaaaccttctcctccatcctctcctctctcttaactcttcatccttcccctctcccttaacccgag

SEQ ID NO: 394528 - DNA, 395 bp, Homo sapiens
taacatacttacatgagtgcttgacataaagtacgtgttttcgatgatgataaagggcagtcagactgttacctgttggtgaattaatttggaaatagtataggaaagcattgttgtgattaatttgtaagtcatttgggaaatgaatgtttgcttctaatgcatatgcagtataatgcctttattttaaaactaatagtgggataagttatataaatagctcacattatttcaatactacatttaatatccaaaaagtaccctaaaaaagtgtttaaaggtattgaactcttgttaggcccaggtgactgttttgaatacctttaatgcttcagtttgggtagctataaagttgcagagtgtttgttactcttaataagatggaaaatcatcta

SEQ ID NO: 394529 - DNA, 460 bp, Homo sapiens
cagcatctggctccctgctgctgccacttactgattactaatgctgtctgctttcctccctcccacctgactcagaaggtccacgaggtgtggtcttccctctgagtccatgcctgtccagtcaacgtaatctgacagagggagggtcaggttgcctcagccaacagcttctcaaatgacggtcctccttgcctgagtcacacttcagcttcccaagggtggccaagagagctgggagcatcctcccgaactctgggctgggatagaatggccattactctcaggccctggagctgccccctaaacacacacacacacacacacacacacacacacaccacaaaggctgctgggaacccacctgagctccttaagcccactctcgaacataggcacctcatattcttgggcagaaatgtggctttgttccacacatccacactggtcaggcagcccgtgg

SEQ ID NO: 394530 - DNA, 409 bp, Homo sapiens
ctgaagacaatgctgagtatgtgtaactcctcagtaaattttagccatcttcatcatcatcttcatcctcctcctcatgatcatcgtcatcattctgaatcctattctttggagggggctgagaatggacaaatttttgaatttcttttcttttgtatgaaaacacttactctctgggtctttaacctaaacctgtcagacaagtccgtggacactagaaagtgaaaccagagggtgagagcttcccctccctgcctgctattgccagtgtggcctggactgccagctggaaatggcgggggtgtggcaggggctgggatcccctctccatgacatgtttcccaggtagacagggctctgctcccaggtggccagagcacgggtcacgcaggccaagatgatggaagca

SEQ ID NO: 394531 - DNA, 397 bp, Homo sapiens
ctttaaaggatccccggtgggtcgttctcgcagggggtgctggaggtggatttagctttcccccaccggccccttacagagaagatgatggtgtactcagaaacacggatgggaacacaggcctgccttgtgctcaggtggatgttcatctctgggtccgctgggacatctctctgctggcctgcgtggctgtacatttagagatataaccctgtgtgccctttctaataaaatgtaaataccaactgctctgagttgagagagagagaaagggatcagtatgaaggaggatggagggaaatcccacccactgaaggttaaatagaacatgaagggccagcaatgggggaagacaggtgctgtgtccatctcccatccttgctcagttcagcgcgct

SEQ ID NO: 394532 - DNA, 149 bp, Homo sapiens
gacaagcacacatgttcacacacagacgagcgacacacggacacgcacacacaaacacaagcaacacgcggacatgcacacacacagagcaacatgcggacatgcacacacacacagagcaacatgaggacatgcacacacacagagca

SEQ ID NO: 394533 - DNA, 2006 bp, Homo sapiens
  misc_feature (1074)..(1074): n is a, c, g, or t
  misc_feature (1603)..(1603): n is a, c, g, or t
catttttaaaccatcagatcgcatgatggcttgatctcactcaccatcacaagaacagcatgggggaaatccacccccacaatccagtcacctcccaccaggtccctccgtcaacaccgtgtggattataattccagatgagatgtgggtggggacacagagccaaatcatatcaggatgttttctgttttgtttacctgagacaaagtgctgttcacctctcctctcccacataatcaggggctccctcctgcggctccggtagcttttcctcactttcctttcagccctcgggacaccttccttggctcctttcagagctcagttactacttgggcccaatgtcaatgccaccttctagattctttccggcagcacctcctctggtcgcacatttctcttccagttattggagctgtcaaaaaagctccccagtgatggacgatagcgatttcactgtgctcacagactggtcaggaaaccaaacagctgccacagtgaatgtgttgatagcagcggggcagcagtagcactcgctcacaggcctggtggttggtgctggcccccaccctgaatacctacatgtggcttctccatgtggcctgtgcatcctcactgaagctcagcctgtctctccaaattggtctttccactcacctgttccccaaacctgcccagaccttcctgctgtaggcttttcccttcacttggcacactctttcccttgtcttcccatggccccatctaagccccactgtcagctgaagtgttatattctttgaggggccacctgaagccaccttgcaatgagggcctccgttttctacctcagctcaccatttgttcacagcacttgtcactgtggcgagttacttgtctatggcctgttgtcgttctcctgcctagacccagtgggctgagtgggggcaagtgttggcttttatgtccagttttgatcttggtgccagcacattgcctgggtggaagcatgtcctactatcggttacagggatgtcattctgcccagtgctcaggggcatacacttggatcccagttgtgtgcccttggacacnttgcttaacctctctgtgcatcagttgggtgataatatctactcctggcacattttcagcgttggctgagttacatgtacagtgcttaggccacctgggggagagtaagagtgggatacgtgaggatgtggagtctgttgcatttctgtctgctgctggcatccttcttgtcttgttttgagttgctcgcctctgtctgctccctagggcgtagatttgaggaatattcctggttcttcccaggcagcaggggctcaggctgtgctggagtcagctaggctaaggggctggtctggcatccgcgttgtcctgtcacctccttggtgttttctccaggcctggatctgtgctgtgtgggcacctgtattcctccctcctgccctcactgattctccatacctttcttctcgagagtgccaagcccctcccatgtgttcttgttcatacctaggatcccgggaaggggctggggaagacggtgcccaggtgccctgggtaaacaaagccacctgactccacgggaatggantgggtggaggggatctgaggtctgcattttgagtatctctggtctcagaggatgaagcatttggtgggggttgggggtggggggtagggtggaagaatctaaagtcttaaaagaaaatggcagttatttgtgggacagggctgtgttgagacttggcatgcttctttttaagagtcagtgttgtaatttaggtataagtgaagcagtactttgtattagtttcctgtaggcgctgtaacaaagcaccacaaactggttgacttaaaacaacagacatggccgggcacggtggctcacgactgtaatcccagcactttgggaggccgaggcgggcagatcacaaggtcaagagattgagaccatcctggctaacacggtgaaaccctgtctctactaaaaatac

SEQ ID NO: 394534 - DNA, 897 bp, Homo sapiens
aaagcccatggtataattatcagtcctaggctgaaggcctgggtacccaagggaggctgctggtataaggcctgcagtacaaagactggagagcctggagttctgatatccaagagtaggagcagagtgtcccacctctaggaaggatagggaggaaatcaccttttctctgccttttttgttctatctggggccctcagtcaattggatagtgcctacccacaatgaggatggatcttccccactcagtcctggttcacacaccatctcctctggaaacactctcacagacatacccagatgctttaccagttctctaggtattccttaatccaatgaagttgatacctaaaattaaccatcataaatagattgctcaaatttaactggtctaaacctaaagtcctgctctttctcttcaaacttatttctcccacggtcttctctatctcaaataatggatattccatccgtctagttcatcaagcaaactccttggagtctttatctacttattttctttctacctccctttcaatccagcagcaaattctgttggccttatcttcagaatatgtctagaatgtgatcacttctcaccgccttcactgccaccaagccaatatcatcttgatttagatttttgaataggcttccttctggtctttctgcattcacctttctcccttaacagtctatcatccacactgcagccagagtgatccttttgaaagataagtcagatcatctcttttcaaacctaaaggctttgcatctcatggtatagcccaaacccctataatgcctataaagctgtgcctgatctgctttcccattaccacctatttttcttccttctgtcccttaccccactagccatactgtcccatacttgtt

SEQ ID NO: 394535 - DNA, 474 bp, Homo sapiens
tacagtctcagggacattacagtggcagaagggtaaccaaagggctttggaagtatggaagaaagggaggctggcagtgcttgttacttggtttcctttggttttatttagagaaaaaaaagccaattctgaagggtaggtagggtttaaatacaaaggaaaagaatcttctctttgggattcagtcacggtaactacatttaggttagggtaatctagaactagttgctatctggaactcgacttgtctgttgtccaccagacccaccttcacgtactaaaagtccattctcactagctgtgcatggtatccataatttagtcctgatacgttacagatgaggtgaacagctggcatcaagaaccaaaatgggtacggtcagcattaaaaaggtctagtagcagacagcagggtctcagataatggacttggacttaagagcaggaatctagtctccaaggaggttaggggaa

SEQ ID NO: 394536 - DNA, 354 bp, Homo sapiens
tcagatgtctgacattgtttctaggcattagttgctcttcaggggcatcctactcccacccctgcaccaagtgctaagggcacaaagtgagatagagcatcttccaccctgtgccaccctcggccacctgcaattgctcatggtctagttaagaagctgactggtcagattcagagccacacatgccaaggattgaagcccagatggggctggcgcatgggcccgggagcccatcccggagaggagacctctgagcttttaaatgcaaacgagaaagaccctttcatccaaggcagggctggacccttgagactcagggcctcacttcatcctccacacaaccctgtgaagcag

SEQ ID NO: 394537 - DNA, 407 bp, Homo sapiens
cactggccccatcctctttctctggcctctctttactaacagtgtgtgagaggtttctctcttgagtttcacagacataaaatatctccatacacttgggtgttttcagatgaggacaatcttctgtgaaagatgagaaggccaagtgttctggataagaacctaaaggcttggtggaaggtcagaggctgagaggaagaagctaagtacctaccgcccaggtgtgaatggagcccgagtatctcaggtcctgtgttaattggctctatccttctgccactgaggagtttagtttgaaaactaataggttttgtgggaaaaggatgagagctggtgatggctgctttttagaattttgcatgaagtaatgatatttctctgacttgtttatttccccaaccaaagac

SEQ ID NO: 394538 - DNA, 242 bp, Homo sapiens
ctgcaatgtattcataaatggaatgtgacacaccaggggacttcacagatctgaatcctgggacaaagatcctccagcagcatgcagagggactcttgacttggtggcccagaggaaggaaaggatatggtggaaactggacctaagcctgagttcctgctcattccagtccttctggtatgtaaaggtcccaggaggagggccatgtgttaatatatgaacaaggatgtggaggttcagag

SEQ ID NO: 394539 - DNA, 756 bp, Homo sapiens
gtttcctctggcttacctctactctctctctctctcattgtttctcactgttgctggttaatcgcttcaggagctaaggggggaaatggcgatggggataagggtggagataaacagaggttactacacttggcatgtggataccacccaagcagcctgtgcaggggttggaggctcaagcaaaatatttgatgggtctgaatgaaaatctgatgaaacagatgttacttgaagctgagtgactttctcagggtcaagcaaataagtaaatggaggagccagaattataccccagctcattgcttaccttctgactcagctctgaaaaactagctccacatttttaacgctgccaagagctcccttctctgtggattcatctaagacaacagatattaacactaggattgtgatggcagtggagtcagtaccaactgacccaagtattcctagcctgtggaatctttagactcacttaattcattcaacatatacttattaagtgcctactgtgtcatgaacttcagggatatgaaattctgcaagatagtctctgcttttcagtaccaggagccccagatattatacttaatgtttcaaatagtggattctgggttgcttgaaagtcagtaggcagcctttttgtcattaaatttcctttattgctctgatgcattttattttatagtgactctgactacttcagattgttcacaatattttaaaacttacgttattaagattgctcaattctgc

SEQ ID NO: 394540 - DNA, 626 bp, Homo sapiens
tcccttaccctgaccctaaccttccaaccgttgattcctgcagcaatcttccctaagggagacaccccggctgtaggctcacttcctctcccaagtcccattcctttcacaagagtcaaatccctacagtggattcctggaccgttttttctaaaagaagatcccagtcctctggcttgcccctcccgtcgtgactcccatatttgatgggtctgaatgaaaatctgatgaaacagatgttacttgaagctgagtgactttctcagggtcaagcaaataagtaaatggaggagccagaattataccccaggatccccatcacaaggaggggagggctaccatcccagctgcaaactctcattcaaggtttatgctgcagccagcagtgtccttggagtctagttcaaagctgaagagagtgaaccatggaactgggagccattggcggagaggctggcctgaaggaagggaagtgtttcagccagaatgtactgacgcacaaccaggaaaccacaagactgatcccatgccttgattacaaatatcactgactaatgtattcaatgaatctgactgccacgcctgtgaaattgtaattttctgatgggctcaaataactttccaaa

SEQ ID NO: 394541 - DNA, 944 bp, Homo sapiens
ccatgacctgaactccacgcagccgcaacaccggacgtgagtgctggggccaggcagaaagcccagagcagccctaagggccagggaaaggaacccacgccgatgcgcagggtcagtgaggcaatgccctgggtttaccctcttctccattcttttgtgaccctgatggcagtgggagtggtggctacaggaacccatcagagccaaacttggggccagaaagtccctcacagctcagtgcggctgtattgagggtgggaccacccccattagctttcctcccctgtcctcctgccacatagactccaacgcggcccagtcaagggcatgtcactgtctgaactgacagtgagtgagcccagcaaccaaacccagcgtggggagcttgggaagcacccacatggggtggctgtggatgccgggctcagctcacatgcagacacatgggtctaatgatcacaccatggacgtggggaactgcagaccagccttgggtcccagaccaaagaccagcagctctgaagacaggagtccacgcaggtgggagcagtgtgggcccaaccctcacaggaccaagtgcctgctaaccaaagacacccacgcaggtgggagcagtgtgggcctgaccatcccaggaccaagtgcctgctaaccaaagatactcatgcgggcaggaacaatgtgggcccaaccttcacaggaccaagtgcctgctaaccagacttcaacatttcccacaggattcaaacatgacccagatctcataaagtcatattcaaaatgtctagaatatagcccaaaattgcttgacacacgaagaaccacaacatttcaacttgcagctgggcaccgcggctcacacctgaaaccctagttccctgggaggccacggctgcagggagcaatcaccgggccgctgcactccagcctgggtgacagagacc

SEQ ID NO: 394542 - DNA, 306 bp, Homo sapiens
ccatgacctgaactccacgcagccgcaacaccggacgtgagtgctggggccaggcagaaagcccagagcagccctaagggccagggaaaggaacccacgccgatgcgcagggtcagtgaggcaatgccctgggtttaccctcttctccattcttttgtgaccctgatggcagtgggagtggtggctacaggaacccatcagagccaaacttggggccagaaagtccctcacagctcagtgcggctgtattgagggtgggaccaccccccttggactcgtcagagctgggactacgtcagacgggtg

SEQ ID NO: 394543 - DNA, 420 bp, Homo sapiens
ctcctttcccgcggtgccaggtccccgaggcccatcacgctgcagcctgtgtgacagcttcgttcctttcaaggccggagaacatgccttgtgtggatggaacacgtttgctttattcattcaccctctgatggacacgtgggtcgtctctaccttatttaatgtatttcgacaatttagtgacacattcagcagtttccaaggacagtcacagaagggagctgtctccttccctgtctcccacctttgagcaccgtccccaccctggccaggcagccaggggtctgtgtgggcctcgctccctccctccctccttccttccctcctgtcttcctttcttccgtccctccctctgtctctccgtccctccgtccttccttccgtccttccttccctcctgccttcctttcttccctccct

SEQ ID NO: 394544 - DNA, 678 bp, Homo sapiens
tagctctaagcgaaagacatgaggcctcagcctgaaatgaggttgttttgaggtcatctgatttctgactagaaggtgagcgatcgcctcgtcctgaaaccacttcagcccgcatggtaaatggcaaagccagcgagagggaggccttcatgtgtttccgtgtctgtgctgccccagttccttcctcttcaagattaaaaacattttaaagttgtaaaccaaaggtttgcaattttttttggtgatggcatgttcagaatcttggatccctaagttcaatatattggacatatttaggaactctggaaattatgttgttttcacatatctagtaacttactagatgaatcagtagatttcattaaagtatatctaataacagataattatgatgtacttctgggttgacatgcatgtctctcattatcagctatcagtattagtgtcatgctttggagacagttatcttttgaaggttttggggttcttatgaacctcatttttcccaggaagtttctgtaattcctcctatgcctattcttgtcttttctgtctgcttgcagtgtaagttatttagatcagaggcaattatttttcaggaagaaagaaatcatcaagtgacactcctaaaggcagtaaagacaaaatttcagtctggaaccggtctcagaatggcct

SEQ ID NO: 394545 - DNA, 418 bp, Homo sapiens
ccaactgcacagctgcaaagcgcgttctgactccatttttactttccctagagaaggaaggcacctaacaaatatttgtgaataaatgaatgattgaatgaatgctgacttctcttctagggaagcctctagaaatcattttgtccagtggttcccaaactatggtctgggaagctgtaggattccatggagccagttgggagtagtgggaggctgagtggatagggctctgagcctttcatccctgctccagtcagaataacttcagtgctgcctgtttcatgcactgggagattgaaaacaatttagcgagtctaactcctacagcagtggttctcaaactctgttgtgcgtcacagctctgagggagattctgacagttggtataggatgggcatcaggactctgattgtttacc

SEQ ID NO: 394546 - DNA, 393 bp, Homo sapiens
atactctagaccatccgctaataaatggctgtattgtactaccataaagtatggtttcaccatgttggccaggctggtctcgaactcctgacctcaagtgatctgcccaccttggcctcccaaagtgttgggattacaggtttgggccaccgcgcccagccctaatatatacagtataaactcgagtatttttgattggatgcatatataacaatgagtatattagtacttccttatatactaattgctaagtaaacacattccttgactttttttttgtttaaatatgtgtttcttttttagagcagttttaggttaacaacaaaattgagcagaaagtacagacagttcccatatgccctctatctctgtgctcacacagcctcccaccca

SEQ ID NO: 394547 - DNA, 369 bp, Homo sapiens
tcttcttacttctacactttcaacttaactaactactattgcaggtacctcagatacctgtttacacattgctacttctttgtgtctccatgtgctttgtttcctattccatttccaagaaccagaacactttggcatgcatgaggtactcaatacataattgctgtttaaaataacatatttcaccctgttcatggacccactcaagactgtaaaaacacacacttgtgaataattcctgagtgaattattcatacacagaggccaaaatctacactctagattaaggtctacagtatatctttggatgtagtattgcacttttaaaactatttggcattttcctctcctgccttgtggtgtaaacag

SEQ ID NO: 394548 - DNA, 403 bp, Homo sapiens
gttattagtgactatatttagctaccagcccactagccatatctaaggatgggcagtactacagaccctgcatagagctgcatcggcaaacactgatgtagtgaataaacaaaacaaaacaaactcctgggctcctcaagaagctcagggcagccttgccagggtctctgctcttgaacaggtgcacaaaggttctaaggcctgacatgcctgcactggctgtgtgaccctgagcaagttacttaacttctctgagcccttctataaaatggggctaaatcctagcaacactgcaggatttctgtaaacctcagtctcctaatctctactatggggttaaaattccctacgttgtaggatttggtaggcattaaatgagataatgcatgtaacacatagcaca

SEQ ID NO: 394549 - DNA, 260 bp, Homo sapiens
agaggggatgcaattggtgaatggatggctagggaacactccggcatgtttcctgctaaggagcagcagaggaaggcaggcgatgcggcggtgagggccgggggtctcttcccgtccttcatgtctcagcaagcggaagggacagccccatcctaggagaaccatcatgagttctggggcagagatgcaggctggagtgggaagatgctgcccgtcgtgtcttgccatggccacggcgcaaaccacacagcctccccctc

SEQ ID NO: 394550 - DNA, 199 bp, Homo sapiens
tggagccttggtctgggacattcagcctccagaatggtgggaaataagtttctgttgtttctcagccaccacgtctgtagtatgtggaagtcatcagaatcaaaattgagtcacctgtggttttttttttttctaaatccctgacaaatagagcctaggaaggccaagaagagaagagggttctcatccataaacactt

SEQ ID NO: 394551 - DNA, 325 bp, Homo sapiens
ctctgttacccacttcaaattaatgattctatttttggctccagctattttacagttataaaactaggcattttacagttataaaacaagtcttcatttcaatatgttagattcaatcattttaccagaaacatctttttaaagtagcaatgacatgaaatgcccatttttccttttctctctgcatgttcatttggtagcatgtgatatacaaggtaaaattggaatgtatgtttttgtctacaacttaagggtaactgacctttgaaggaaaataacactagacactgactttgttgttttaacaacagttgtcagcagttca

SEQ ID NO: 394552 - DNA, 572 bp, Homo sapiens
aggtacatgccaccatgcccagctgatttttgtatttttttgagagacagggtttcaccatgttgccgaggaggtctcagactcctgggatcaagtgatctgcctgccttggcctgccaaagtgctgggattacagatagatgtaagccaccacacccagccagagttccaagccttgaagagaaaccaggtggtggagaaatcgtgtatggatttgggtaaaggagaaaggaagctgtggaaaggggaagaggctgagccagagttgtgggtaggagacgtacaaggaatggaggcaatgcagagacacggggcaagattcaggtgcctcgattccaccttttgtaattcaggggtcagggatcttgtcttacttttgttgttgctttggtatgctgcacagtgcctggcacataataggagctgaatgtatccttggagaatagatgcatgtgttttgctgtgttgcttcagtagtgcctactgtacatctcctatgagccaggagctgttctaggtgctaagttcctctcttgcagagtgatgtttagtgaaggagatgagggttgcaa

SEQ ID NO: 394553 - DNA, 560 bp, Homo sapiens
tgtgagccacctgtagcttaaagcttaaagtaagccaaaatgtacttactttaagtcaactttcagaaacaaagttttttttataaaaggatccgtatcttgtaaaagacacagatgcaataaaacttaagttcatttaaatgagaaataaaggatgacttaaagaagtatgaatggaattataccagaaaatctgtggtgaagataatgattgtaattgagttcaaaagttagctctgagtttctggcagcctaggtatagaagggaataggataggttgtgtgattgtttaacaaaggaagcatgggatataatgctcttttctataatgtcctttgttccaaatatttaaagtgtttttttatagatgtgaagttaaaccacttagataggtccagattgttgaaacccaagacctcagctcttgagatcatagcattaatccattgttcgtagtaggtcacactggtattttaaaaagtaaaaacttaagaaaaatatagggctgaactacatatatgcatttccttccttcttttcttttcctttttttttttta

SEQ ID NO: 394554 - DNA, 386 bp, Homo sapiens
ggtgatctagaggatcccggacatttccacgagccacttggtaggtttgggctggtagcatcgcccctgagataattttagctgagatcacagtcctccatgactcacagatgccaagctcgtaaacccattctaatcaccaaatagcctctacagacacaacccttgtaatgctgtactgaaaatgctcaagggctattttagaatgtgactattattccgaaaacagcttctccactccaaagactcaagcaacgttcagatccaggaggaaagaggacaatttttgctattagtacaataaaaagactataagttacttattttttagaaatggcaggaaagaaggaatttaagacttaggtaattatgtgacttgaggaaag

SEQ ID NO: 394555 - DNA, 527 bp, Homo sapiens
gaagtttaaaaagtaactttttaacccctttcaaagtcttccaaaggcagcaaaattgcttagggaggagtgagtatctactgacctccaccttccttcagcttttcactatcagccatagattttgtcagaaagtgtccttcatatgtttaaaagcccctgagaaaatgacagccacttggtaggtttgggctggtagcatcgcccctgagataattttagctgagatcacagtcctccatgactcacagatgccaagctcgtaaacccattctaatcaccaaatagcctctacagacacaacccttgtaatgctgtactgaaaatgctcaagggctattttagaatgtgactattattccgaaaacagcttctccactccaaagactcaagcaacgttcagatccaggaggaaagaggacaatttttgctattagtacaataaaaagactataagttacttattttttagaaatggcaggaaagaaggaatttaagacttaggtaattatgtgacttgaggaaag

SEQ ID NO: 394556 - DNA, 477 bp, Homo sapiens
acgtttttgcagttgaggaaactgaaataaaagtaagtaactttcttatggtcatgcagtttctaagtagcttaggcaggattcaaacaggtctgtctgattctttgtgtattatacctctaaactttcctgtttgttccttgcatttatttcacatatatctgatcaatcatttctttactgatatgcagaatcaataatgcagttttcaaaacttttatataataagttcatttgtctctgtttaaatcaagggtcttacatttttggctttcaaggcacagacgtcttgtatttggaggtttttattttttttacatttgaaatcacatgcctttaggtgagacttacacttgccagttagccacaatgactagcactccctgttgtgttaggccacctaacttcacacattcatgatacccacctggtccctgaaaactttcgtatttgtatccccaggattggcttgttagt

SEQ ID NO: 394557 - DNA, 193 bp, Homo sapiens
aaggcgtgtggctaggatgtggataccaggtgcgccccagcttctagctggggggcagaggatgaaaagacaggctgatatggggcagtgtctaaagagcctatgagactggggtttaggatgactgtgggtttaagtatagccgctgggacagccagccccacaagcatcttgcctaccttgggcctccagg

SEQ ID NO: 394558 - DNA, 271 bp, Homo sapiens
tagaaaattcagcaaaagctgtaccatgaagccaaagaaaataatttcaggcaggatgggaagacaagagtatttactgtttcagtaaaatgagaactgaaaagtgaccaatggattgaacaattaggaagatttttagggagcccagtatactgggctttatgatcaagtctgatttttaagtcccagctctgctgctaactgctcagccacaaatgtttttagtgaagggtggcagaatatgccatcccgaacatcccactttggcata

SEQ ID NO: 394559 - DNA, 318 bp, Homo sapiens
acccttgacacccaatcccggctgctaatggtccctcagggggcctgggaagaggcccagagtcattaccctttaaaataaaactcgggtagacttgcacgaattcttaccaggactcccaggtaagagacttctttgcttttctctttcttttgtttttgaaactagggaatgcttttccctactatcacatttgggattaagaaaaaaaaaagaactttttttcctattaccaatggacgtttttgtagaaaatttataatctgtaggaacatcagataagcccgaagataaacagtcatccataactcatcagct

SEQ ID NO: 394560 - DNA, 395 bp, Homo sapiens
gcaggcaggctcttagaagatatttggggcacggatttgagggtctcctgagatcaggggtcaggcagcatctgaatcttgtctgcctaggcacccattcttctcaaggtcactgaaggggacatggtggaggacacggactccacccacgcagcaagtcctcagcaagtgccttctgtgcaggtgtcccgggtgtcgcgtgaatgaactgtgttgtaggagacacctctgagatcatttccctatgtgatagaacaaaacagggtagctcccgagaggggctgggatagggagtgagcatgaacttaccctagaggtggtgctcacagcatctcagacacgcagggacctggagggagggcgcccacggaggagcaacactcagtgaggcagga

SEQ ID NO: 394561 - DNA, 496 bp, Homo sapiens
gtcatccaggctgtttacctcagcctatgcctgctgccccatgcctgattagcggcagcacagccatgttccttacacatggtatcaggcatgactaccatggaaaggtgctgggtactggccattcctgtcatgcaagtggccgctacagaagactctgtcagtgataatgccacccactttccagccccactttgtgaagaagacagaaacagccttttgggtggtcaatgcctacctttattcctaagatgactgactgtaatagagacttaaatagtaggaaaccagatttgggaaggtatctatgaaggcaaactccattaatttgtccattcattgaacatgttttatagagctgctggcctgcttcatgccaggccctgtttcatgtgctgggacatggaggtgaacaaactcagtgggcctcctccccaggaacttgcctactggtagagatgtagcagtgagccccaactaagccacagctaagctg

SEQ ID NO: 394562 - DNA, 312 bp, Homo sapiens
tccatgctctaatacccaagggcaacatggcgaaaccacatctctactaaaaagtacaaaaattagcacagtatggtggtgcatgcctgtagtcccagcttctctggaggctgaggtgagaggatcacgtgcactcaggaggtcaaggctgcagtgagtggtaattgtgccactccactccagcctggacaatgagtgtgaccctgtctcaaaaaaaagtaaaataaataaataagagccaagggagaaaaagaattttaagaaagagaaacaattaacaagtttaggaagctagcatcgtgggttttggat

SEQ ID NO: 394563 - DNA, 185 bp, Homo sapiens
cctgggaaagccccctggaggatgaggtatgccaggaaaatttcaaagaggaataggatttaattcagctaagtaaggtgagaagggctttcaggcaggaggtatagctgagacgagtacagtggtctgaaatagcatggtgtgtgcaggaggctgtgaggagataggttaaagtcaagcatgaa

SEQ ID NO: 394564 - DNA, 323 bp, Homo sapiens
ccggggggtggggtttgggaggcatgggtagaggacaaaagaatataaagtggtagcacaatcatgttgataacttaattgattcatgctagcaagaacactgtccttgttttgtaataaaccaatattcataattaaaatgtcccacaggcattaaaaaatatcatgcatggaaataatgaaaacgattgaatatttgactaactggtcaaactagattttgactgttaatataaaaaatcactatccttaccaagtgcacattgaaataatgtactaagcaacaaaggatttttcagtatatgataaatactggaaaaccg

SEQ ID NO: 394565 - DNA, 604 bp, Homo sapiens
  misc_feature (43)..(44): n is a, c, g, or t
atggtcatagctgactctagaggataaaccaaggtacaggcgnnaccgcatgcattccttgggatgttacttcgccaactggaaacctctgtagctggcggagccttcttcctgagcactgcttgtgcctgctggcctcattccgcccactcgacctggcaggctgtgcttggctcatgctaccggcccggatcccacacctgccaaaggcaagccaggcatggagcggtgagggctgtgtgggcgagtgagtgtgaggtctggctgctgtgcacagacagctaggcacatcagctgctgtggcagggcgggcagccccaggcgccggcactgactccatggaaggctgcggcttgaccagatgtactgcatgcagcttccactgcgggcacccatgtctggatgaggggaatgtggtggtgcctggaagcttggagatgccaggaactgcagagccccaaagagagtgtcacaaccctggctccgggagctcctagatgtgggctcccttctctccttcttgttgcccacaacgtggctaatggagtgggggcgtgtttcagccctgtttgtgttacagctctttcagccctgccattcagca

SEQ ID NO: 394566 - DNA, 425 bp, Homo sapiens
tacctcggaccggttgacgggcttcaaaaaccaaaattaaaatttttaaaaaccgaatagcgcacttgtaatttgtgataatgagattttacgtcacaaaaaatgctgttcagtgttgacacagaggtatgagactccgacttatttcctcaagctatgaattcagcttacataacaaaaggaggccttgaaatatcttgccttattatctcacttaggatgacaaagtttagtgatatttatagcaaatgataataaaataaaaaggtatattcttcaaagaaaaacgaacaacaggccgggcaacatggcacgactccgtctccacaaaaaaatagaaaaattagctgggaatcgtggcatgtgcctgtcatcccagctactcaggaggcgaggtgggaggactgcctgagcccatgaggttg

SEQ ID NO: 394567 - DNA, 688 bp, Homo sapiens
tgcaggtgtccttgctgacaaggacagccaggtagacacagggacaatggatggaggaggtgttatgcctgtttcctggctgccactaggcactaaggtaaagtggaaggcattctagttgttcccctcactttgggggtagagaaaatggaatttatttaaattcattcagtcaacacacttattaagcagtgttctagacccttgagaactgcacataacaactttgtccaaatctctgcattaggagacaatcaaactctagcatagcctcagcataaggctgtgtccctgggatgaccccagcccctcattaaaatgcttacctgagaaatgctgtcaggagaatttattatttgctctagtcaacacgttacaacatgcccccaacctcctttttttttaaacagcatttacaaaaatgtgcttatgactgtgaatacttaattcttacaacacagaagcatctccctcaaggacccgagagccattcctatggaatgtaatcatcaggaaggacagagcctctgcctcccaatctctggaagcacagaactttaactttgagaactgtcagccagtgggcacagtcggcctaattgcatctacagggaccaatgctctgtaagtcttcacctctctgacactactgaaaacccccactccacccactccctcaccctccctt

SEQ ID NO: 394568 - DNA, 107 bp, Homo sapiens
ctggaggatcgcttgagcccagaagtctagccaggggaacatagcgagaccccatctcataaataaataactgtagcaagatcatgtctcataagtaaatgaatgaa

SEQ ID NO: 394569 - DNA, 194 bp, Homo sapiens
tttaaatccttcacctactttccatgcttagcattgtttaaaccttggaattaggctctcttacttcctcgcccactattaccatatgcatcctgcaaatctacaatctattgaaactgaaatagctgcagtttctggaatatatttgctatcataccttttttcctttctgcttaagctatttcacagcttgt

SEQ ID NO: 394570 - DNA, 484 bp, Homo sapiens
cttcaaaatatttgtaaaagaagcagccaggatccaagaataaaaattccagttagtgttgtgtattctgtctggaattcactagctgtttatcttaggtgatgatcttactgactaatggaaatattaatggcaacatagtgagcttttcttctctagaagggtaagtgaactctcaggaaaataaatcactgtcggccgggcgcagtggctcacgcctgtaatctcaacactttgggaggctgaggcggatggatcgcctgaggtcaggagttcgagaccagcctggccagcgtggtgaaacccggtctctactaaaaatgcaaaaattaactgggtgtggtgacgggtgtctgtaatcccagctacttgggaggctgaggtaggagaattgcttgaaccaaggagacgaggttgcagtgagccgagattacaccactgcattccagcctgggtgacagagcaagactgtctcaaaaaaaaa

SEQ ID NO: 394571 - DNA, 327 bp, Homo sapiens
ccggcccgtcttaatcacatgtcatactgccccatccccttcagttggatagtccccataatttgtccatctgacccatcttctgcagggcccacacggcaggcacagtcaagagaatgtgaagggagggtctccaggtgcccagcagaggcgtccctgggaagccttccgaagtcaacccaaaaggtccttctatctggtccttcacacccactttccaatagcacatctggactggcagcaaggaaccttgccctgcagggcccgtccgtccgtccatccgtccgtccgtccatccatccatccatccatccatccatccagcag

SEQ ID NO: 394572 - DNA, 431 bp, Homo sapiens
ccctccactagtgcaggcacaggcaaatatttcatgacgaaaccacccaaagtgattgtaaaaaaagcaaaaatttacaaatgggatctcattaaactaaagagcttctggacagaaaaacaaaactatcatcagagttaacagacaatctacagaatgagagataatttttgcaatctatccatctgataaaagtctaatatccagaatctacagggaacttaaaccaatttacaagaaaaatacaccctcattaaaaagtggacaaaggacatgaacagacatacacagtaattttagaataagatctgctgtgctgtctcaaaaaggccccacactggaatgtagactcctttgttcaagactgctactgggttgagaaaagggtttgggcaagggcaagtaaatataccacaaatctttcctatgtt

SEQ ID NO: 394573 - DNA, 367 bp, Homo sapiens
ctcgtagacgtcatgagccattttcaacccaaaacgcatctcagggaacatctggggaaaatactgggttagggcaaaatgtgcaaagcgtcaaaacagtgctagaaacaaagtcctacagaaataacagatgaattctgaaaggctttgtgaagaaaacagaacttgagcggaggctttgaagaacgaatataaaagttcctcccccagaagggaagaacagaagcagaatcggtttaacaacacgctgcccaaatcgcctacaagagtaaaatggggacagaaagtaagcgacaaggttggaaatttagattgggaccacatcgtgaaaggactgagggcttcgatgggaccgcggcttgacacg

SEQ ID NO: 394574 - DNA, 414 bp, Homo sapiens
tgaggtcaggagaagtgtcttcacattgcctggtacacagtggttgcttaattcatgttttcaagtgtgcatatgaaggaagggagcgaaacaagcatgaccatgtgtttaattccttagagttttatagcttataggaagattggaattcagtgaaatggaacattgtttaggactgtttatatttgttttttccctggagtgactgatgatcatatttccagccagtcatctcactgttccaagtctgttttcatgtgtgtcatatgttcactctactgagttaccttgtagttcactgcttttgttgactgatgtgatagactcttagtaaataatatatatatatattttttgggatggagtctgcacttcagcctgggggacagattgagactctgtctcaaaaaaaag

SEQ ID NO: 394575 - DNA, 404 bp, Homo sapiens
aaccatgattgtggctcactgtagcccacatgacagagcaagaccctgtttcaaaaacaacaacaaaacaaaaacaaaccaaaaaaaaaagatacttttttaaattgtatatttacacttgttatacatatttaacgtgtgtgtgtggagggacgtgtgagcatgaccctactgcacagacgatcaactgtgtaccaactaattcacgctcccctttacaaactttacagctagtcccgccccgctagggaccacatcttccagacccccttgcatttggcaagggccatgtgactagttctcaccaatggaatgtgagtagaagtgaaagtgtctttctgggctagggtgaccttaggggtccctggatgactatgccacagaggtcaataaacttctaactt

SEQ ID NO: 394576 - DNA, 698 bp, Homo sapiens
caacctgtaatgatggtgggaaatgaaatgagtttgctaaatgcaagtgatgtcctattttgttcagtaaaggaagtataaatttagtcttcaaatatatgaaaacaggaagaaagaatttcagaattgaggaatatggtttacactagagaaagaattttctgactgtagtttgcaaaataggtggaagattgtagaatttctcaatctagatggttttaaaaatgtataaaattctcttgtgatgttttttgtcatacttggaagtagctcctctcttctaaccatgttacacaagatatttattttcccttatgagaaactaatgtcagtaaaggctattagaatactttccttgcgtactgcaaagacctaaatagaaactaacttcttaattatgaacaaataagatatgatgttttattctttacatcttatctgtattattctgttagtaatcagatgatgtgtctgcaccttgatatgatatacctgtaggtaaaactaaacattctggacttggtgatttatgattttaaaggtgctttttaggcttggggcttgttaaaacaaattctcagttggatatccaaaaacatacatgcatttgattattaaaaagcagctggaatggtacaacagtgtctttcaggttaccggttaaactggttatagagctgctcaactacagtatgaaa

SEQ ID NO: 394577 - DNA, 253 bp, Homo sapiens
atttgttattcccttctccaatagtgagaaacctggcttccattatcttcaatgtattgtctatttggtcatcccccttcctaaccaatctttgctgcccccaacaggtgcccttcttgcccaacttgggctccacattttatgccaggccaccctcccatcctctagtgtgggtgacttcgttctgtccaggctctgacacaccagccacaccatgctgcccctctccaggaatgccctccttgctctactt

SEQ ID NO: 394578 - DNA, 1273 bp, Homo sapiens
tgattctcagcatccagagaattgggagggcttttttccagggcttgttagtaacagcaactcgtgagcccttgtgcgctggcactgtgctgcgtgcttcatgggcacgatcgttttatcctcacagttctatgaggtggagactatcgttatccctcctttacagatggtaacactgagagttctgtaacttgttcagggtcacacactctggtaagtaccagagccaggattcaaaactcaggctgtgtgatcctagagccagtgctgtcagccaccatgggatatttatgctaatagcacacatatccaactgcgatgaatcattcgatactggaccctaatgcctgatagtttgggacgatgcagcctaagcactctcaaaccacacaatactgaggatatttgggaggtggggactgttcattttagcacacacaaaggaggatggagggaagtaaaggggtggaggccccgggacgttagtagttcggcacactccaggtccccacagcctcaccagggttccctcagggattgtggaagggggagtgctgtccagctgcccccaagaggcctgaaatgagtctttgtacaggtgagaatcccacaggaacaaacaagggttttctttacgcttgggaagctgctttttagattgttttaattcttgtttaaaatctgtggcccaattttaagttagtggcccaagccaatagtaaccttagcctaaaagattcaaactggagcattttataatttactttaagtatttgaagacatgtctttcttttccctctagatttcataaatcaaagcctatggaatggaatccttcaaactaactgctctttctttctgccacgcctccttggcatagtctaaacttggtagggtcagtgctgaaattctatattctttactttcatactctatcttacaagtattcccaaaggcattctggggatttaagaggatattttatggtcataaatgtagttgtcctagattgccaatgtggaaactgcaatattgttgttacatcgggatttttagtttctttagcatccccccactttgccccatgtatgtcagttgtgtgtgtttccattcccattagggaggatcgtcaccgaggaactgattctctgtgaggtttgcttcagggttgtaacctgccttcctgaggtggaagcagagctgctcttctctgagggccactcttggatctgcagattccctggaagtgttttgctaatggagtgtggtacct

SEQ ID NO: 394579 - DNA, 296 bp, Homo sapiens
tgtgtgtgttgtgtgttgtcagtgttgtatatgttgtatgagtacattgtacatgcatgttgtgttgtatgtgagttgcatgttgtcagtgtgtgcgttgtgagaggcgggggcatccacgtgactgctcctcagcaagtcctgccgtgcagccccttctgagcgtgcgtcctcccgagtagcctagaagcagcagcatgtttgcctctgcccctccccaggaggcctcagccaggtcctgtgctcagcctgccgtgggccatctgcctctctcgtctctctctcgtcgtcatcct

SEQ ID NO: 394580 - DNA, 443 bp, Homo sapiens
tccttcagtcctgcagaacatggcacaataaccatgactataggggtctcctctgcactgtcccacccaatactacccaaattgaaggccaatcttaaatgtcaccattccttgaaccctccatgctcccatccctacctggctagaatttttatctcaactcccacaatgtcttatctatacaatttattatttggcatttatttgctcaacaaatatcacttgcacacctatttttgatttgaagatacagaaatataaagaattaccattgctctcaaggaaatgcagcccagttcaacaaatggcctaaaatggaggaagcagagacaataacagtcagaggagtattccaggcagaggtggtatcagagcaaaatcttgaaaggactgatagagtgggcaatggtgtttcagacaagggaacactatgtgtgaggtca

SEQ ID NO: 394581 - DNA, 310 bp, Homo sapiens
ggtcgtctggtacaaaccaggaagtcagggtatttccccagctcatctgtgaagccctgccctgtggatggaaggccgcccatcagccggccgccatcccgggagatcgactacactgcatacccctggtttgcaggtaacatggagaggcaccagactggacaacctgcgccaattccaccagcttcgagacctaccggatgagtgtacagcatccccaggctgaccgcacggccatatgccatcatagttcgatgataagatgaatgcaccttcagctcataggtgtcggaccccgtggtttcgcatc

SEQ ID NO: 394582 - DNA, 604 bp, Homo sapiens
gctgagaaagggaagattagaagaggagaagattgtggaagtagagaatggagagctgagtgcgggatgcctgttaaacatctgaattgatccatctaatgggcgcctgggtatatgaatctggagcttgggagaaagatctggacagacagtggggagtttatcatgtgcctgcaaatagcattttctcctctaaatccaaataaaaaggaaatgtttcaattcaatttaatctaaaagataatccatttttaaatcgtcctgtatctacacagatacatctttaatccagtgagggagaagatgatctttttcttttgtgtttttgtgggcatggtcatttataactttctaaacacgagtgggccactgtttaactgaggaagatttgcttttcacatctaagtctcctgaagcaagacacagtctccatttcccagaagcttgtttgggaagatggggcatggcaaacaagagaaaaggttgagacaggattgccagcaaaagatggatctgtaacacacttccctgtgtaccttttaggcaaacatagaaatttcagttctaagaatccagctagggctgggcacagtggctcacacct

SEQ ID NO: 394583 - DNA, 191 bp, Homo sapiens
cacctggctatatttatgttccgtgtcagaggaagggcgggcgaccagggttcattccaggtatctgagtctgtagtcacacgctttccattgaatctgagtatgcttgttagtgggaactttcactgaaggaaaagaatagtgagtccttcattaagacttgtgtttatcagtggctgatgattgaactg

SEQ ID NO: 394584 - DNA, 209 bp, Homo sapiens
tgtttcaattcatgattacatgggggaaggacttggataatgtaattcttaagtgatttgcaatgtgcctttcaggcaggttttatttacaattctacatgaagcctgctctcagtggctgggagaaggccagatgagtgtttgctggctccattctccagcttagactagagctggggatgaacaatgcagatcaagtggcaggactt

SEQ ID NO: 394585 - DNA, 306 bp, Homo sapiens
gctcagtgtttagctcccacttgtaagtgagaacacacagtgtttggttgtctgttcgtgcattacttagcttaggtaatggcctccagctccatccaggttgctgcaaaagatatgctttcattctttttccaggcagcatagtattccatggtgtatatgtaccacattttctttatccaatccaccactgatgtccacctaggttgattccatgtctttgctattgtgaatagcactgcaagtgtcattttggtacaataatctatttgctggggaggggctgtatatacccgtaatggaact

SEQ ID NO: 394586 - DNA, 511 bp, Homo sapiens
acagagcagcctaacccccggggaccgcggcccagcaccagcaaagagacctgtgccctgtgtccagcacagaaacagagggctgctgggtctcaagggacttctcaggccaggaccataagacagcaatgcctccctgatgcactacaaatttgaggtcctttcctagtttttcccagcaccacatgaacccctcagattcctgtgtggccctaagggacagagccccagttctgactgaagtggaatttcctgccagtccagtgcaatacacactcagatttggatttaaatggatagaaagaaaatgaaaaacaaattgtgttgctaatgcctccctgagatggcagaactcttactgcccaagcaacaagtaatgatacagagcccttagtgctaaggcagtggcagtgcaggacaaccaggggacacccagacccagcactcgcagcctggggagctcccggagagaggaggggtgggagaagagcctgcagagggcctgagggct

SEQ ID NO: 394587 - DNA, 811 bp, Homo sapiens
ggcagcattggtgcggaagtaactttatagtggagaaacctggaaaacactgtctcagttagttgacttcagcaaggtcaacatcaacagtggtaagtcatgttggtagtatgtactcctgatatgatgtaatgaaaacaacactttacctctattatcttcctttctgaaacccatatcccagtctaattataagagaaatagcagattgagagacacaatggaaggatattatacaaaatacttgttcagtactccttaaaactgtctaggtccttaaagacaaggtaagtctgagggaaagccacagccaagacaaccccagggggatatgacaacaaagtataatgtagtcttctggaacagaaaaaggatttaggtaaaaacaaaggaaatctgaataacttacggcctttagttaatactgtattaaactctttcattaattataatgaccgtagcatatgtaagatgttatttataggggaaagtgggtgtgggcatatgaaagctctgcaatttttcagaaattcaaaagtgttctaaaatttttaaaaagtttatttaaaattatctatgtactttctgattatggcaaatcctacaatactaaaaattaatataaaactcaattactatttgctttctgaaggcttgtatgaagttgctgatatcctgtactcagagcccacttcacgttaatggaaactagaataatttttaaaaacaacttaaatgaaagaactgtaagttttgatgttataagtgcttctctcaagatgttttcaagtcttctctaaggacaagtaac

SEQ ID NO: 394588 - DNA, 701 bp, Homo sapiens
atatagggcagttactttaataggactcccactctcaagaatgtgctgaggattgaaagtcagtggttgtatgtgtaggagagggtggtagttttgttttataaaattataaagcagttaacattcagcatacatagctgaataataaccatatccctgatatacaatgcatagatgtatagtctatttttgttttgttttttacttccaaaaatgctgacaccgatgaaaaacaaaaacaaacccttatgtttcaaatgtgcttttgtattttttagcattttcatataggttctctaccaaattactacatgttttgtttcattttagcaaatagaaaaggcaaaataaatattttaattatgctattatatataaaaatatcatggaagaaatatggagctccagacaaatcagtcaatttaaggtttacagcctcctcagagactctatcattatatcaaatgcacaatgattgttttggaaattttgaaattcctggcttttgtgtcccacaagttgctgcctaaaatgctgcgcatatgcacctttaataattaaccaaatattggccaggcgcagtggctcacgcctgtaatcccagcactctaggaggccaaggcgggcagatcacaaggtcaggagattgagaccatcctggctaacacagtgaaaccccgtctctactaaaaatacaaaaa

SEQ ID NO: 394589 - DNA, 484 bp, Homo sapiens
aaccagtatatatctgcttgggtcttgaatacagtacagatattattgaactaagttgttctaaaaggacccaacctatgagcaaaagaactggagactgaattcatgggtgaaccttttttgagtcatggagcaaatcaaggaatattttctgggttagggaagtgggtactgtttttataccacagagtagtgggttagagaaagggaagacctaaggaggaatgcctagaaaaatgcctctttttttattttaacctcttcattctgacttctgactcaaaggcagttttaaaggtgtaaggctagctgagggagagaaaacttaacgggcctctagcttggtagctgccgataagtcgtgtgtacagataaatgcttctgtgaaatttaagactccttttgaacaaagagggtgtgcccttggaaagagagcatgtaaaaagcggttgagagttgttctctagtgtattgaaacatgcct

SEQ ID NO: 394590 - DNA, 268 bp, Homo sapiens
agtttccaaagcattcagtattagtaaatcagactgggagtaatttcatttggaacataatgtcccttggaaagagttctgtggtttttctctaatttaaatttgaggccagactgatgaatgctatgaccagggattatgtcatagaacagagaaatacagtaatggctcacatattagaaatagaccacaagctagtatctgtcacagtgttgctaggtactagatagttctttgtaataaatgaaagttgtggaagtttcatatc

SEQ ID NO: 394591 - DNA, 237 bp, Homo sapiens
tccttcagtctgtggctggaggcccaaagctccctgggcagccgtcagtgcaagttccagagccctaaggccaaagaacctggagtctgatgtccaacaggaggaggaggagaagcaggcgtctggcatgggaagaagaaagagagccagaagactcagcaagcacatttatccatcttcttccacccgcctgttctagctgcactgcacctgactggatagtgcccatccacatta

SEQ ID NO: 394592 - DNA, 131 bp, Homo sapiens
aagcaggccgcgccgctcgctactgattaggtttaccacggattgacttggtcgggtttgtcatgggtagagttagtgactgtatatggcacaacagggactgtgtgtcatgagctagttgatggttaaca

SEQ ID NO: 394593 - DNA, 519 bp, Homo sapiens
cggggatggcgtcacctctcaccccaaatcaggaccctgggccccagctctgttccccacctcaccttccttgtgaccaactcctaataaccaagtgaaatggaaggagttgtcctcagcaaaacgtgtgtgcggaagttcacagtcactttctcggtgataaccaagagctggaaaccactgcaacacccaccagcaggtgaacggattaacacactgggctagggccacacaatgagatgctccgtggcaacacaaaatgaaccgtggacacacactgcacggcggatgaatatgcagacatcaggccacgtgaagggagccaggccccgaggcgccacgctttgtgattcagggtggtccctctgcgcccaagacccggctgcctcctcctcttcctggctgcagggagtgcttgtgtctgaagaacgccaggctggtgtccccagagggcggctggaggggctcagaaaccattttcaccttctgtctcctccatgtctgcactgtttgggtttg

SEQ ID NO: 394594 - DNA, 353 bp, Homo sapiens
ctgggcctttgcactgccactttctctgcctgggacgctcttccctcttcctttgcacagctgactcccccgcttgtcggccagatttttgctcaaaagtatcaccttctgagggacctacccctgactctcagctaaagaggtccctccagtggctgttccgttttctccaacatgtatgttgtctgtctcctccttttttttttctttgagacagggtcttgctctgttgtccaggctggagtgcagtggcaaaatcatggctcactgcagccttgacctcctgggcttaagggaggcccaggagggggggcctttgggaggccacctcagcctcctgagtagctgggacc

SEQ ID NO: 394595 - DNA, 842 bp, Homo sapiens
gtacccgacggggtgtagtgggcttagaagtcagttctgccttggggacagtggcatgcgaggtgcaggcaaatgggacaggacactcaagtcctgggaggcaggaaagacacgtgtgtctgcggagtgtacacagtgccagcagtgcagctggacaggacaaaaaaggagatgggggtgggggcagccagggactaagctgatagctggacaaaggtgtttcatctgaggaagccatcggatctggcggacacaggaggttttacagaccgaagggcttggccagtcttgccatacagctcccgctccctctgattcgccgcggggtggacacgtgtggctggcagcttttgggctttgaagagcctcttccccatcccaccctagatccatagaaggctgcggagagaccctcagctccgcccccacctcgctaagtgctagcaatagacccgccccagctgtgaccccgcccaggaagcccgctggtcactgcctggccaccccagagaaccgtaggggccagccctacgacagtccccacctaagtcccggaaatgcagagcgaggctagctgctcagccccatctgatgctatttttatgcaacctaaagaggtcgaccccgtcttatgtcggtcgcaccgtgtccctcccaggctccactagcacctgggctgctatggtgagatcaagatgggccccgcccacaactaacgatgttattccgcagcgagtcaaagccactccctaccctgggcccgctacgcgacctctgccggcctccgccccacgcggttttagtacggcgccaaggccccgcccacaaatcggccccgtccc

SEQ ID NO: 394596 - DNA, 592 bp, Homo sapiens
agtgggaactggggagtgattgcttagtggggatggagtttccatctgaggtgaagtgattttggaaatagtgctgatagttacttagcactgtgaatatgtatgatgccactgaattttacccttaaaatggttcagatggaaaagttgattatatgtattttaccataatttaaaaaagtatatactcataatctctagaggaaaaacacaagtagcaggaaaaatcgtatttgtccccaaaatgactattattgcagtaggtgggcttcatgttccagagctttgggcattaatattagatgagaatgaatttgttattattgtgtttctcatttgtgctagacactgctatggtaactggggttatagagatgagtaagaaaggcacaccctctgcatcttggagataccagtgaggatggccaagaaacaacaagcaaacatagaaataagcaaatttaagttataagtgccatcacggaaacaagctagagatgaaaatagaaatgtgtgtgtgtgtgtgtgtgtgtactggtgaggatgaagagtttgggaacatcctgctttattaaaaagaagcatgagattc

SEQ ID NO: 394597 - DNA, 477 bp, Homo sapiens
tttcagtttcagcctgggagaccctgggcagaggacgtcattgcaccatgacctccagaactgtaagctcaggcaggcgtgttgctctaagccaccacatatgcagtagtttcttatgcagtgtaaggagctgatacgcaaggccaggatgggactggttggggtctccaggctggagggccccccggtgagcaggcatggggtcccacagcccaggacagcttcagctcttatttgccatctgctgctgctaggtgttagacgctggactgagcatgctgcacacatcatctctgctgttttccttttttttttttttttttggtggtttttgttttgttttgttttgtttttgaggcagagtctcgctctgtcacccaggctggagtgcaatgacgccatctcggctccctgcaacctccgcctcccaggttcaagtgattctcctgcctcagtctcccgagtagctgggattac

SEQ ID NO: 394598 - DNA, 308 bp, Homo sapiens
ctgtgtcctctaattagtaataatggccacagatagattttataaatatttcttgggtagcacatttattcaagggtacacaaagccagttgaacagagagaagcctaacatgaaatatgatagatgtttatttcagtttatggtggggtcatcatgcttttatcatacaagatgactggttattttgtctttattttgtgttcgaagttggcagtaccatgaggctgttgcatgatagggaaaagaaaaaatgaggccaaactttcttctttccctgagcattattattaatggtctaggggctact

SEQ ID NO: 394599 - DNA, 439 bp, Homo sapiens
attagaaggtttcctcttggcatacagtattttgaaaagctaaatcctgatttcttgttagaaattgttatggagtatctgagcttctgtccaatgcagcctgcaagtcctgggcaacctctttgtccacttctcaggcgttgcatctcagtcctggagactgtagtaagaactgttccaggtcttctgcaaacagtcttcctaatagcaaaagtgaaatatttgtcaggtgatattgaagcagctttcaataaccttcagcactgcttagaacacaatccctcttatgctgatgctcatctgctgctagctcaggtttacttgtctcaagaaaaagtcaaattgtgttctcagtctcttgaactttgtctgagctatgattttaaggtgagagactatcctttatatcatttgataaaagctcagtcacaaaagaaaa

SEQ ID NO: 394600 - DNA, 501 bp, Homo sapiens
gtacaacagtgctcatataacactatataactagaacagagagctctgcacaaactaagctgtacccctctcgcccctgtatccctactcaccctccactcctcagactctaaagctcctcccctgtgaagcatcccccatgcacatgtgctcagcctggcctatccataccctgcatctgttcatgctcctctcacttcccagatggagaatacatgcaactgttacttatctgtctcattctcctgagggcacagattctacctttatatctggtttttccaatattcactgagcaaacaacagtcaggaacagagaaacaggtggtctaaataggaggaatctgggaagggcttatgtcatagacaaaacatggagcagaggccttcctggctcttgcacacctgcttggtctgtccagctgatggggtcttagaccaggccaattcaaacaagacacactgtctctcctcccgtgcctggtactactgaggtgtaag

SEQ ID NO: 394601 - DNA, 378 bp, Homo sapiens
taggtacctggacctttgagaacgtgacactagcaaggtggtgaccacagagaataggtacaaaggtcttgaagcttgcttagagctttgttccgtggtggcacacaaatcttggcttgctgtaccatcattggcaaacctcatcatatcacagttgggtgtgtttgtatgtgtgtgagcactagtgtgtgtgtgtacatattcgtgtgtatgcacactttgtgtacctgtgtacatgtgattgtagatgtacctgttgtgtgtaaactctgttaaaatgaaatttgcttcgcatttaatgtgcaactttgaagtagtgtaatatttatctaaaggttttcactacttggttttaatgtctttgaacgtgtacttcta

SEQ ID NO: 394602 - DNA, 346 bp, Homo sapiens
aggactccgggcatcagaccgacaaggctggcagggggtaagggccttttccagagcaaggggtcacacatgcaaaattatcaaggtgagaaaaactactggacgagagggaatggaggtggctctccatgggagaattctaaggaagagagtcacctggcacaattggccctggggaacattccttctgtctagtgtgaggagttggggaaagagggaaaaggctggaagcagttccctttggttgagtgacagaggccaaccacctgcgctatccaggtgggggcatgccgagaagctgtggcgccgggccggagaagctgtgcgccggagaagcttacgcgga

SEQ ID NO: 394603 - DNA, 481 bp, Homo sapiens
aaataaataacattttttcatttataatagtaatacaccagtcatagacaaattaggaaatatagttaagttggaaaatacaacaaaaagaacataactcatgatcccattgctgatattaagcattgttaatgcctctgtgaatatcggggcttccttaactggaggtctctgagttaatggatggcctgtaaggtttctttgactctttgaagaaaatgtggaaaatttgtgagcttacataaaggcagtagggttttgtgttttttgtttttgttttggggaggaggaggaggagaggaagtatctataattttaatcatattctcgtagggatccatactcaaaaggagaatcagtcaccggctggctgcagtggcttacctgtaatactagttttttgggaggctgaggcaggaagatcgcttgagcacaggagtttgagaccagcctgggcaacatagtgagaccttgtctctac

SEQ ID NO: 394604 - DNA, 429 bp, Homo sapiens
tttagacgatgcctcgctctaacgcccaggttggagtgcagtggtgcgatctcggctcactgcaacctccgcctcccgggttcaagcagttctcctgcctcggcctcctgagtggctgggattacaggtgtatgccaccacgcctggctaatttttgtatttttagtggagatggagtttgaccatgttggccaggctggtttggaactcctgacctgaagtgatccttctgccttggcctcccaaagtgctgggattacaggcgtgagccaccacgcccagcctttcccaccttcctttaacctccttccagaagaaagaaatagccaatttaaataaacatctattgtgtgttgattttgttgtctgtgatgttcaaggtactggagaatgagctgtaaataagacagacagcaattgtgcccccca

SEQ ID NO: 394605 - DNA, 871 bp, Homo sapiens
ttggaatgttatatattttatgagaaacaattaaaatgtgtaaatagcccagtaataaagttttataatcttttaaatcatcatagaatttttccttaagactttatggttaaatattctcttcattagatgtggcttacccgtggattctagagaagaaagcagatgggagcaagtgtacaatacagcaacggctcagtcaagtagttctggcagttatttgaagtctgaggtttgaagtaggaattcttacgggcatttggggaatatattttctgttgagtcctatactagtaagattttcaacacaaggtgactctcgacctcgccttgtaggaagagtgctgagaaaatatttcacctgctctttctccataaagagctgatactgatcattgctattttcttattcgatttagttaatttttttgacatggaactgttagcttttcatgctgctgcaaaggcttccttatattcttctaactcagtgtgaacgtgctttataagcagtttgtcatttctgaaaattttacgtttcacatctttaagtgagagttcccttcttattagagaaagctgattattatccttggttaactgttctattggctactaaatcgggctcggtcctatcacggcaggcaatagaaaaagtgactgttagctacgccgcagaactggtaggtgtcaagccctgactgggtcagcaatcgtacggcgatttgagtcgatgggataagaaagtcccgggacatccccgcgagttatcttccatttgaatcgagaaaaaaatttgagagattcgtagaagtcgcgatttagatccaggcccgccgttttttagtggaatcgaccaagtacatggatg

SEQ ID NO: 394606 - DNA, 185 bp, Homo sapiens
agagagaaaagaaagggaaatgaaaaggagtgaaaagggaaaacagggacatgagacaacaggaataacattttcctccctaggaattttgactagtgtcttctctgacagctggctacactttgagagtgatcatggcaatgctgcaaaggagaggacatgaaaaagtgtttaaaaagatcaat

SEQ ID NO: 394607 - DNA, 333 bp, Homo sapiens
cttcagtggacagtgctatggcctgaccagaaaataaccgccaataccccctctgtcgagtaacatgctcaagttgaccagccagactcttatctctaaacctatgtggacaagtgccacagctcgcgaggctgggtccctgaagatcggtgctttacacttaacttggtgacagcgtgaaagacgtccttaagtaaaacgtttagaatccggtcgctctcctccctcttctcttgctccccctaccccagcattaattaactagtctcattttctctccctctcccagcacagactccaggttacatcttcatcctgctggtgttggtgtgg

SEQ ID NO: 394608 - DNA, 435 bp, Homo sapiens
agattcctgcaattctctggtcacattttctctaattgatcaatgcgtaaccttgttttatgtgtgtttctatttaaagacgtcttatttgatacatattgttgattcatcaatattgaagtcagggccagcagcactataaatactgatgcctgcttgaatgaagcttctctaatacatgtgtttcctctgtaacacaaaagtgtatcacaattaacactagatagcatttcactaagcttggggattatttcaaaacagtgaaatcatcaacaaaaagcacaaaaatgtgaaaactgtggcactaaatagaccacaagaagtacactggtttatagttgaactgggaaaaaaggcagagcgttgccttcttagactccagctggaagtgtgtgtgccaggagacccagctttctcccagccctgggcatgtct

SEQ ID NO: 394609 - DNA, 492 bp, Homo sapiens
ctattcccacagcagactgagctcttcatagtccctcagcttttggtgccactggctctccatcagagatcaggatgattacacggacctgtagggcccacaccctagctgcaaaggatgctggaaagtgaatctctgcatttgtatttttcccactgggtggtggactctgctgcccaccatgtgtcataaggaaggacattttccaagcacagaaagggatctaaaaggatgacagtgggtacacacagaaaaaactctctcaagccatgttcttcctctaccctcataccacaacaatcaacacagaagagttctgtgactgtattggttgattttcacactgctataaagatatacctgagactgggtaatttataaacaaaagaggtttaattgactcacagttctgcatggctggggaggcctcaggaaacttacaatcatggtggaaggggaggaaggcaggtcttacatggcagcagaagagaa

SEQ ID NO: 394610 - DNA, 484 bp, Homo sapiens
gtggaatgagaccaacagccattatagccttaaagaaatgacaaagcattttcaaacttgcgatgtccattgacaatgttttggtgcattgcagtagaacagagctcttatccaggctccagtaagcactttcacctgctggtagaaaaatgtctcttcttttaatattttactgctaatggcattgtcacatcaccaaaaatatatgtagaaaaatgttatatttccctacctgtgtactttatgctatattaaaaacatctcgtgactctaaattcaaaatgtatccaggttttccaacaactctgattaacatttagcaattactttggactcattctccaaacatattattagttctcatgcagtattacattcattaatgtatattttcagatatcaaaatcagtagcctcttccacaatttcatatctttaatttctcctgtcttaaaagtaagttttaatgaaatgatttcttctat

SEQ ID NO: 394611 - DNA, 337 bp, Homo sapiens
aagagctcgtggagtttgccttgtggggttttggacttgcttgggccccaccaccctttccctgttgcctctttctctcttttggaaagggagcgtctgtccagtgcctgccctactgttgtattttgggaacatgtaacttgtttgggttccgtggtttacggctggaggggagctcagcttcagggtgggcgaatcgcactctgagtcccacccagtcctgattcaggtgatgttttgttgagacttgggacttcacaccttagcgctgatgctggaataagacttctggggctgttgggatgggatgactgtatttgccatgcaagaaggatat

SEQ ID NO: 394612 - DNA, 214 bp, Homo sapiens
gtgaagtcccaagtctcaacaaaacattacctgatatcaggctggaggggagctcagcttcagggtgggcgaatcgcactctgagtcccacccagtcctgattcaggtgatgttttgttgagacttgggacttcacaccttagcgctgatgctggaataagacttctggggctgttgggatgggatgactgtatttgccatgcaagaaggatat

SEQ ID NO: 394613 - DNA, 122 bp, Homo sapiens
tcaggagtttcccaaagtctgagctagagaggaattaacaaaggtcgccctcttggttatctagatggggtcaatgaggcccagggggcccaggtctgctccacaccactgggcaacagaag

SEQ ID NO: 394614 - DNA, 228 bp, Homo sapiens
tgcattcctgagatacacccagtttgttcatgatatattacgaccctcaaagataatgcaagtgttcttgccactgaatgcagaaccactgaaaattaggcctacaaaaagagggccataattaatttcaatcttctgttttatcctccatctctctccatataaagtttctaggcacttacataaactgcttttgcaagtttttgaaacattaagactcagttttta

SEQ ID NO: 394615 - DNA, 409 bp, Homo sapiens
ggatgtaaaataaactttattgtcagaggtttctaaaggctcatccttcaaggaaaatggacatatgctgaagagctgataaactgtctacagcagtgttattctaacctaatcttgattccaagttcttgccattttcctccagctactgttgactccagttatatataggatgggggaaaggggattatctacgaatgtaggcatcactttctcttgggcagttatcacattggcagactgaagggaagtgatttctacaatcaaactatccatttggagtacaaatctggagtggctgtaaaattcggttctcagagatgaacttgcagattcggactttcaattgttctgttgttttagtttttctcatcaactggggaactgtttgtgactaagctttgttaaa

SEQ ID NO: 394616 - DNA, 1230 bp, Homo sapiens
gagaatttaacagggagagcagaggagatggagagataagagaagaggcggtaatatatagagattgaggacgattgaaagattggggagaaggagcaacaagaggttaaataaggtttggggaaaaaaaagagagatcagactgttactgtgtctatgtagaaagaagtagacataagaaaccccattttggtctgtactaagagaaattagtctgctttgagatgctgttaatctgtaaccctagccgcaaccctgtgctcacagaaacatgtgctgtgttgacccaaggtttaatggatttagggctgtgcaggctgtgctttgttaaaatgtgtttgcaggcagtatgcttggtaaaagtcatcgccattctccagtctcgagtaccctgggacagaatacactgtggaaggccgcagggacctctgcccaagaaagcctgggtattgtccaaggtttctctccactgagacagcctgagatatggcctcgtgggaagggaaagacctgaccatcccccagccagacacccgtaaagggtctgtgctgaggacggttagtgaaagagatagccctctttgcagttgagataagaggaaggcctctgtctcctgctcctccctgggaatggaatatcttggtgtaaaacccaatcgtatgttctgtttacagagataggagaaaactgccttatggctgtaggtgagacatgctggtggcaatactgctgtttactgcactgagatgtttgtgtaaagtcaaacataaatctaccctacatgcacatcgaggtacagcatctttccttaaacttatttatgacacagagagctttgcttacatgatttcctgctgaccttctccccaccattaccctacagtccttccacatccccctctctgagatggtagagatagtgatcaataaatattgagggaactcagagacctcggctggtgcggatcctccgtatgctgagtgctggtcctctgagcccactgttctttctctatacgttgtctctgtcttatttcttttctcagtctctcatctcacctgatgagaaatactcacaggtgtggaggggctggcccccttcaataaggaccagacgctgtggctcatgcctataatcccagcactttgggaggctgaggtgggcggatcacctgaggtccagagtttgagagcagcctgaccaacatggagaaaccccgtctctacta

SEQ ID NO: 394617 - DNA, 543 bp, Homo sapiens
tgcctgagcctggtctgcaccccagtgagccgtgtatccagcccctgctgccgagtgacctgtgagcccagcccctgccaatcaggctgcaccagctcctgcacgccctcgtgctgccagcagtctagctgccagccggcttgctgcacctcctccccctgccagcaggcctgctgcgtgcccgtctgctgcaagactgtctgctgcaagcctgtgtgctgtatgcccgtctgctgtgggccttcttcttcatgctgccagcagtctagctgccagccagcttgctgcatctcctccccgtgtcaacagtcctgctgtgtgcccgtctgctgcaagcccatctgctgtgtgcctgtctgctctggggcctcctctctgtgctgccagcagtctagctgccagccagcttgctgcaccacctcctgctgcagaccctcctcctccgtgtccctcctctgccgccctgtgtgcagacccgcctgccgcgtgcccgtcccctcctgctgtgtccccacctcctcctgccagccaagctgcggccgc

SEQ ID NO: 394618 - DNA, 469 bp, Homo sapiens
tacttttccacaggcatattgtctctgtttctgtaagtcgttcaccatctgttcctgaatccctgttacatagattctcacctcctacaagctgttgttccaatgttaccttctcagtaaggccttctctggacattctaaaattgcgtcacctctattcctcttcccttcttcatttttctccgcgatacttcttcctctataacatattatatattctttcttgtttatcttattctgtagtttaccagctaacaatgtaagctccatgaggtcagggatttttatctgcattgttttctgctatttccctgctgcctaaaacggagtctgatacatagtaggtgctttgtagcattggtttaatgaatgttgaatatgtagaatatgtcccaactcctcagtgtggctttcacattgacctttattttctcccctacctgtcccctggaaaagtaggtaccgagcg

SEQ ID NO: 394619 - DNA, 571 bp, Homo sapiens
tacttttccacaggcatattgtctctgtttctgtaagtcgttcaccatctgttcctgaatccctgttacatagattctcacctcctacaagctgttgttccaatgttaccttctcagtaaggccttctctggacattctaaaattgcgtcacctctattcctcttcccttcttcatttttctccgcgatacttcttcctctataacatattatatattctttcttgtttatcttattctgtagtttaccagctaacaatgtaagctccatgaggtcagggatttttatctgcattgttttctgctatttccctgctgcctaaaacggagtctgatacatagtaggtgctttgtagcattggtttaatgaatgttgaatatgtagaatatgtcccaactcctcagtgtggctttcacattgacctttattttctcccctacctgtccccaagagctcacactgaatcaagttaggtacacttttctagtgtgaaattttctgattccatcagaaacatacatcattgaagagggccttcataatgcaaaaggagtacgcagaagataggttc

SEQ ID NO: 394620 - DNA, 423 bp, Homo sapiens
ctctagatagcatatctaccaatctctgctacttggggattagaattctgtgggatcatgcccatcaactttctaaaaatccttttgtcatgctgagaacgtctgcttacatcttaattcttttagtgatcttaagaaaggaagctacagctacatccttgagttgatctttgttcaagggctttgttttattttcaggagactgcagatgaaacagttttattttccaacccagcaagttctagttgctctagatttcttctagattctgcttataaaatgactagctctttctttagttcatctctatcttgcagaaccttatacttagctaggagcaaccagttggcgtttttggtattctgcttggaaattaatttgctaagtccaaaagtttcttagatacattttctgaattattcc

SEQ ID NO: 394621 - DNA, 418 bp, Homo sapiens
ccagggagctcgaatgagtgacggtcctggtgtgggttcagccataacctccaggacagatgagagcaggcacttctaaagggtggcccttccgagagggaaaggcctggagccttacgctggagcatgctcactctgggggtctagcgccgagtcccgggtcctgagggacacactgtgagcctggagttggtgacggctggggacatactgtgagcctggagctgatgacagctggaaccggacggtgcactgtgagcctggagctggtgacggctggggacatactgtgagcctggagctggtggctgctggagacatactgtgagcctggagctggtgacggctggaaccagacattgcactgtgagcctgcagctggtgacagctggggacatactgtgagcctggacctggt

SEQ ID NO: 394622 - DNA, 191 bp, Homo sapiens
ggagaagacactgtcactcctgccatttggcaaacaggtgtgtgggatttggcggctgggcattcttttcacccactttgatccagcaggagctgaaatcactgcaagtttcccaagtgggctggagatgagacgaacccgatccacctgcggattgaagcagagtggcccggcagggagcccagaccagc

SEQ ID NO: 394623 - DNA, 747 bp, Homo sapiens
gagtgcatttccagctttgttctgaggtcttcacacattgttaagtctttctctttccctgtgagagtgcttaccttgattgctgcaaagtataaacaagctaggaaaaactgcatatgaacccacacagacgtcattcctctatttacgaatcacacctgaggtcattcctgtcaaagaaatacatgtactagcagaactgatggtctgtggtacagcttcttgaatctctgtaccagtatttgaagaggcagctatcttcagagaaaatgttatcagttggattggattgattcttgggcacgtagaagacacctgatgaatatggaatgagtatatgattctcccacctcttgaaagttattttaaattattccctctgggcaggcatcagcttattttcaagtaggcttttatgtcaggtcattccttagtgcatgagataatttcttcaggggcttaagctgtcctagtaaggagttgatacggctccttgcagcctggccaattgctaagaagtggttcaggcctggtgattattaaagatctttgtattggaggcatgcatttagattaccaagatttggatccttctgtttctctcagatggtgaaaagaagtgtgggtgtggttgaattcatagcaccatcattcatttgttatttcatatttatagaccaccaaatatatgagaggcacttggggaacaatgatgatcacgtcctccaggagcccagtgggagatat

SEQ ID NO: 394624 - DNA, 321 bp, Homo sapiens
gacaactaaggcagagactggcattaatgcagttacaagccaaagaatgccagaaattgccagtgaatcaccagtagctaggagagcagcaaggaaggacactcacccgcaggtttaggggggaacatgtccctgctgacacctcaattttacacctctagcctccagaattgtgagagaatatgattctgttttaagctgctcaatgtatggtgctttgttatggtagccctaggaaaggaatacagtcaggaacactcttgtccataggcaacatgggatgtagcaatgtatggccaaatctttctcctcccaccatac

SEQ ID NO: 394625 - DNA, 128 bp, Homo sapiens
tacacatagtaggtgttcagaaaacactgagatgtggatgacaatctattcagtctccacaaagaataaacggactttaaaacatagcagggggccgggcgcagtggctcacgcctgtagtcccagaa

SEQ ID NO: 394626 - DNA, 193 bp, Homo sapiens
gtgtgtgtgtgtgtgtgtgtaagatgaggactttcagtgaaggaaagggattataccaaaaaaggtacaattccacctgtgtttttttccatcactgcatatttttaaagttgaaggcagcttatcatttatcctaagaagccatttcagtttgtataatagccttcttcagacaaattatcatctggctatt

SEQ ID NO: 394627 - DNA, 797 bp, Homo sapiens
cagctgacaaatatttcaagtcagtgcctggtagtactgtccaccaggcaacagcttcagtagtagagcgatctttatctataaggcagtgtttgagcaattgtttattagtgttttcctaactactcagaagaactatcaggggttatagaggtagctcagagagttgggtgcaagtagagaaatccacccggcttgcattacacatcttatttctagagaagctttcctttgaagaaagagttctaaggtttaaaaaattaccttgaatgccacttatattgcattttaattttattttagagaaatcaatggaaagtagaaaaattaaggcactgatactagtgttaagaatgttggttaaagcttctggcaattaattttttatttccttttttaattttattaaaatttaacaattttcagtttatgctgtaatccagaccaaggtttcaatctaatgaagttaatgccagtgttgctgctacctattttgtctttagtcattcagccatgcttcctacttatactgaataagctagcttaatctaacaatcaaaaaagaaagctgttgcctaagttaagaaaaacagtttgaactgttttcaaactaaatacccgtagactctctagttgttgacaggagaatgcttaattcagaattgtcctgcagtagatcattttatctcattcctgttcttctataggatagcttatttgtttgaaattgtatttaatatgttgtgatttttgtgtgcttgtttctatttttcactggatagactcaagataaaacc

SEQ ID NO: 394628 - DNA, 291 bp, Homo sapiens
ccacagggacctggtattttaggatcagggtaccgctggcctgaggcttggatcattcagagcctgggggtggaatggctggcagcctgtggccccattgaaataggctctggggcactccctctgttcctagttgaacttgggtaaggaacaggaatgtggtcagacagggtcagtgggagggctttggccattctgagccaacggtcctttgttagttggcctgaaagaagccatgacttagaacctgaagctgtcaggtggcaagaggccttagtcctggtgtttgat

SEQ ID NO: 394629 - DNA, 184 bp, Homo sapiens
aaaatgttttcttgtttattgatacactttcaactatagtaatcatatatattatgttggacttcattctttttttttttcgaatgcatttcccatttgcccttagaaatgagcgctagaaatgagctgcactttttttttctaaaagggaaatgggttacttcctcctcgctttgattcgctt

SEQ ID NO: 394630 - DNA, 273 bp, Homo sapiens
gagtgatagcatttataatcatgaaagatttaatacctggtaatgcaacaatagactgatagtttgctggcagatgtagtaatttaatgataattaagaaatgtattttatatatagattgtatagtatgatcccaatttggttaatatcacatactagtgataataattatttgagtgttctttttttttttttttttttgagacggagtcttgctctgtcgcccaggctggagtgcagtggtgccatcttggctcacggcaagctccgcct

SEQ ID NO: 394631 - DNA, 551 bp, Homo sapiens
acagagcctgacatcacttttctttatagaaaatgggcattcagcctgaaaccaccaagcagctcagagatgctaacatcctgaaggagagcaaacgctccatcagtagagaaagacaaaggcaatgtgctcaagctatcaggtttaatagaggatttggaggacagatctggaaatctcaacgctttttctagtgagccacaaaaggaaagaatagagagaatggaagagaggccatattttcagaaccgaaaacatgacgtctttgttaggctcaaagctttcaatgagtgccaagacaggccaagcaaaaatacacccaagagaaagagaaaacctcaaagccaccagaaagacaaggcagttcacccacaaaggcatgagaaccagacaggtatctggtttctcattagtaacactggatgcagcaagatggtgccatggtatttttcaaagcgctgagggaaggtaaatcaacacagaattctattctattccaaccagactgtcatttaagagtgacaaggacatttctgacatacagggactga

SEQ ID NO: 394632 - DNA, 243 bp, Homo sapiens
  misc_feature (1)..(1): n is a, c, g, or t
nttgggctggcgaagccagtgggaatgccacaaagacccacagcagattatagatttacggagaagaggtagtgggcaaggtctaggaacctctatccatctggaaatgtacctgctttatcaactatgaaaaatatgaatttacgtcctgaggtgacagtgagcttcaagtgcatttgcaggtcagttgtttggcaaaagtgtgctgagcagagaggtgtgcaggacataggccagggttca

SEQ ID NO: 394633 - DNA, 422 bp, Homo sapiens
aggattaagagtgccccacatatcactaaataatgaaacacaaagcatgtttcccccttgaaaaccacagttgcttttgttccaaatcatgcatccgaaattacccaaagtggaggtctaaacagactaacttcctcagatgacagtgccctttgagttggatgatacatatttaggaagtgcttaaaactgcctagaaatgcttagtcattaaagaaaaaactagggagggagcatacttgttgtttgtccctgggtagtttgacaggttaatccccatcttgggttcagaaatatccattcaccatccatgagtcctgagattaagtccagtttctgcttttacttagtctctgccaccactcaggtatgttggctgcaagacatcccacagaagagccagtaggcttaagcccctgggt

SEQ ID NO: 394634 - DNA, 471 bp, Homo sapiens
tcttcttcacatgtgctcatgaagagacaggtataagaatgagcaagctcaattgttaggagaacaagtagaaatacacatacatttttaaagcctctgcagttgttccatttgctgacatcttgctggccaaagcaagtcacatggccagtccttgtgctcaggtgggatgaactattaaaccacaaggtgtgcactcagggtgggccttaagtaaaattattaatactattaatttaccacaatgtataatatgctctgatgtgaaaagctcacaatccagtaaatatacacactgaagacagattgataaatgaggcatagttagtgaacactatggaatagcaaacattgaccagagagggaatatcttatataggaagtgtaagatatagagattatctcataaaaacaagagtcaaattatggattgaagatcagcagctttgaggaggaagagagagaaaataa

SEQ ID NO: 394635 - DNA, 296 bp, Homo sapiens
attaagcacctgctgtgactggccctgggctaggcactgtgggcacagaactaagatgcacccctttgctggaacagagagatgacgtcaacaagcatggggcagtgcaatgagagaggtgaactcagagaactggaggagcccagagaggggacagcttctgcggctccaagggaggtgtagtaaagaaggatatgcataggtggtcacaagggaactgagatggggaagatgaggctggatgaggcaagtggagagggggaaaagcgtgtgtgctctgggcacacattatggag

SEQ ID NO: 394636 - DNA, 491 bp, Homo sapiens
tggggccttggtaggcatctgggaacttggatattgggagggttcctaccaccacctgataagaatggctcaataagcccattcacacaaataatgtggtttatgccaaacacgtgcttcccttctgtgagcctggaatttgggtatgctccaagcagggggtgcctatgtgatcagcccccaaataaaaaccctagacactgcgtctcctacaagcttccctggttggcaacacttaatgtgcttttacaaggcactgctggggaaattatgtcttgtgtgactccacagggagaggcctcggatgcttacacctggttgctcccagatttcaccccgggcaccttgtctctctgctgagttgctgtagtaagtcacagctgtaagtaggattacaagctgagtcctgtgaatcctcccagagaatcatcctgcctggaatggtcttagggaccctcaacacaacagctcatgtctgagagtttattaca

SEQ ID NO: 394637 - DNA, 359 bp, Homo sapiens
agtccaatcaacaaagtcatgtccctattgcctcaggacaataccgttacccccatccaccacacagaagtttgtatagtgattgacagaaaagaggcaacttttaaaaataaattctgattttttttaaagcattgtcactgattatggaacaacctacataacacaagcatggacacttttaaaaatctagtcttttagtcttctgtttaaggattagagaaaaccatccttttaagctataaatgacactaaactagtaagataaaacccaaatcaaggtgtcattcattagatagatgttgtcaacaagataccgtaaaattaagattatatatcacagtatgagttactgtctt

SEQ ID NO: 394638 - DNA, 184 bp, Homo sapiens
tccagatattctcaatttgactgcacattagggactcaggaagttaaaagcaaaagcaacaaaagatgctcaggcaccaccccacaccacctaaatcaggatctctgggggagcatgcttatgtttcaaaacctcccccaggtgattctaatagcagccagggttgacagcctctgttcttcca

SEQ ID NO: 394639 - DNA, 659 bp, Homo sapiens
ttgttttttaaaaacccaaggtatcagggtcttgctatgttgcccaggctggagcacaatggctattcacaggcacaatcacagctcactacagccctcaaagtcctgtgctcaagcaatcctcctgcctcagcctccctagtagctgggaatacaggcacaggccacagtacccaagttgtttaaaactggatgaaaaaattaaatgtacaagcaggatagggaataaagcaatgtttcataatattgagacatgtcgtaaactgggtctgctaacacttctcaaggtctatacattctctataagaatttttaaatgctgtgttttcatttcaaaattacactaaaacattagtataagcctgttctggatcatcgagatgcttccctagaaacacagagctgcccagagatttcacagcccacgtgtgctgttgtgtttaccatcaggctaaggccaaacaatacaattttaactaatttgtactaacaatcaagaacggagtaagacctgatccctgcataatatacatgccaagcgaagggcagaaggcacccctccaaggttttatagttctcagagaaaagtgatgagggaactgagttacctcatggcaaggtaacagaagccattgccaaagcctccaaatctgccacgg

SEQ ID NO: 394640 - DNA, 365 bp, Homo sapiens
ttttttccaaatggctcatcaaagtgaataatctcaaccatttttccccagtatcctagaaagtcatatcaatggtttgttgagacattttacatccaagtcaaattctggttgaatactcaaatcaagatggcctaaaaagggagataatgacaagcaagaatgaagagaaataaatgaatccagcaaaacaaacaaaaaaattcacttacaaagcctggcccagtaatgttccgtgtaagaaagggatgcaaaaaaaactcatgccaaatctaacactagccaaccgtggactagtagccaaccgtggactagtagccaaccgtggactagtagccaaccgtggactagtagccaaccgtgga

SEQ ID NO: 394641 - DNA, 305 bp, Homo sapiens
cagcatcttccaaattgtaccaagaatgatagttttgaaagatgttaatgggcgtgttgtgaaaaagagttctgtggttaaataagtttggggaaatgagagcaaagtcattaacacattgcacaggatctctcagtgccttaactactacacttagggaaatttcttaaagtgaggttaataagttgagttaggcaaacttatttgagcctgcaagactttttcaggcatatgtaattaacaaacatcccaaggataacactgcctggcttagagcatttctatatttatgtgaatatactgta

SEQ ID NO: 394642 - DNA, 270 bp, Homo sapiens
cccgtctggctcccctggtgttggttccgggggcccggctgcttcagggaagtccctttggcacagggattgtgttgcacactgaggggcgtgggcctcagcagctgctgccgggaagccggggcatccttaccttacccgccaaatgcacgggtcttcaccttgtgatttggaaacattcctgaactgtgctaattaggaagcttggtttattttttatttttatttttatttttgtagagatggggtcttgtgatgttggccaggctg

SEQ ID NO: 394643 - DNA, 612 bp, Homo sapiens
cccactttgtctttaggaatttattgattattccagctttacttgtcatagtggtgtctatttgcatctgtcctatgtaagtgcatctgtcctctttctccttgcaggtgcttgttttccctcacattttgactcagttcttggcaacctggttgctctaaaaataaagtcatgactttgaagttagtttggttctttcattgttgtcaggttaggaaccctattccatcccagatctccaaaacccagactttttggggggttgaaatgttaggctttctctttgaattgtagttttatcttctttcagttaccatttgcattttcataatgattaatgagactaagctttttttgtgtagttgactgtacctttggatttttttcccaaatacctttttatttcttcttttctttatggttttagaaaatgtagtttacataattgcagcttgatttgttactcagttaatggcatgcttaatggagagaaaaaatattaaatatatttccctttttaattactgtgcttttttcttttttaaggaaatgtttcattatgttaaatttcaatgttattctacttagctattccttaaatattataatatt

SEQ ID NO: 394644 - DNA, 506 bp, Homo sapiens
gggtaatttataaaggaaagatatttacttggctcacagttaaggaggctgggaagtccaagggcatagtgccgacatctgctcagcatctggtgcaggccttcttactgcatcgtcctatagcagaaaggcaagagagtacgcctgtgtgtgcacaagacggcagaatgggggatggggggcaaactcatactttaatcaggaacccactcccacaataagggcattaatacatttatgagggcacagccctcataacctaatcacctcttaaagtttccacttctcaacactgttgcattatgcattaagtttgcaaaacatgaactttgggggacatattcaaaccatggcattccctctcccctaaataaaataaagtaaaataacattgaacctgaatttgatcaagcctctagatctaattattaatttaccagaaatacaattcagaagaacatgttagattgacaccatgaggatatgattagcaaaatccagactta

SEQ ID NO: 394645 - DNA, 187 bp, Homo sapiens
cgtcgagttatctgctgctctggtcacagtattagatgggaccagagcagagagggtctgtaggccatggcaagagtgagaatttactcaatacacagtggaagttggggatgagtgagaagcacaagagtggcacactgatttctacaacagtcagtctagctgctgggagcagcagggaaagaca

SEQ ID NO: 394646 - DNA, 329 bp, Homo sapiens
tgcatgtcatgcccaaggtcacacagcaataagtaagcagtagagcatgcctctgggaccattctgagatggtgagccacagcagtctactccccacccctcccctggccctatgccaaaacctgtccatgccctttgcacaaggcaggggcaagggtgaagagggaacaaacctagcagaggtttgctcaccctctgtccaaccctctgttctccaaccccctactaggactcaaaccacccctaggatggacgcatcctgcacacgggaaggcagaagagaaggtgcccaggaaccatctgagatgatacctattctaatcccaggg

SEQ ID NO: 394647 - DNA, 168 bp, Homo sapiens
ggagatggggttaggatgaataagtctccagattttattttgtgattctctaaagcctgtcctgttatttttttgtgagctgctaaacatcactgatagtaagtatggtgtaatggaaacagcatagaagtggagtttgatcttgttttgtgatctctagccttgtta

SEQ ID NO: 394648 - DNA, 618 bp, Homo sapiens
agatggagtctcactctgtcgcccaggctggagtgcaatggcgtgatctccactcactgcaacctccgtctcccaggttcaagtgattctcctgcctcagcttcccgagtagctgggattacaggcgcctgccaccacgcctggctaatttttgtatttttagtagagatggggtttcaccatgttggccaggctggtcttgaacttctgacctcaggcaatctgcctgcctcggcctcccaaagtgctgggattacaggtgtgagccaccgcgcccggccaattttttttaaatgtcttggcaagatggagtcttcctatgctgcctaggctgttcttgaaccattaaaatgatgtatttcaattatgtatatactatttatacatatattaggatatatctacatgtgtgtgatatgaatatatatacacattcacaagcacattataaatgtttgtatgtgtatatatacatacagtcatgtactgaataatgacatgtccatcaatgatggaccacatatgtgacagtggtcccatatactaccattttttttgttttgttttttgtttttgtgagacagggtctggttctgtcacctggggtggagtggaatg

SEQ ID NO: 394649 - DNA, 111 bp, Homo sapiens
agatatggttacctagtttaactaaaatgtcaagtttctttacttttaggtagagtaaggttaactctgtgtggttacagtggctctctcgggggcagataggttacttat

SEQ ID NO: 394650 - DNA, 467 bp, Homo sapiens
gcgtagacgtgcttatctgctgttgttttaaattttattggtaaaacctgcaaaaggagggctggcaggtcaggaaacaagctgagaggaccacaactgatggaaagagttgagcccggccctgggggtcactgaaggcttcctggacccggcgacctggtcttggataaaccttccctgtgggagggaagctaacagcatccagcgctggggaaagctgccgtgaccgagcacacgctgtggccgcacctgcctcctcactgccctaccaggtggaccccagcccctagcctgggcacgaggagcaaagggcacctccagcagggtgggcgctgccaggcctccaatgtctggctgggtgctgggaagctcctgacaggtgcgaggcaggagccagggacagctgtagaccccacgaggcacactaaggagtccagctgatgccgatgggtttgtgctccagactt

SEQ ID NO: 394651 - DNA, 145 bp, Homo sapiens
gcttaaggtcatggctttgaagaggaagggccaccgtgtgcctggacaagttctagtgtgtgaggaatgtcagccctgtgactctgctgtcacaccttggccatgtgacaaggctgtgtgagtgtgtgtgtgtgagacagagaga

SEQ ID NO: 394652 - DNA, 619 bp, Homo sapiens
actctgcttttgtaatggtttgactgatttttgatatttcgctaaaatgtaatgaatcaggattatacaaatatcttggtccttgactacgacaacccataaaagctaccaagctcccatttcttaaaagcacaaattgattaattaatacaaagggataacagcagtatgtgactgaatttaagtttttcccttagaattccttgaggaaagcatacatttctctactcaacataatatttatgtgttcaatcaagactaaaattgtaaaaattgggcaatggatctagttttggcaaattaggcaggtcctcacagcaattgctgtgtgggttgaaagaagagtgggagagcattcaattcattaaacactcctacagcattctatctttactaacaatcttgcagagaattctgcatctattcttattgctaccaacaatatacaatattctttaatacataatatttcatttctatgcctgctggcaaagctgcaaaaaacaaaaagaatgatatggtcaataaataatttctccagtcagaatattaatacaaactttcttataccttgcccttagatgaatgattcaatgcccaggaatataaactaccttgt

SEQ ID NO: 394653 - DNA, 546 bp, Homo sapiens
tgaaactgttttattaataaggaagtttcaacttcttgggaaccctttactttgaggcaaatacagttttcctggttcattattaaacttatctctcttttaaataccttgccaatttttgagagtggtggaaggtgtggaaagctctatgttctttagagtttgaagaaatatttattgtgttaggtatattaatagaaaattatttacttttcgtaggtgaaagtactgtgctataaaatgtctctccttttcaaaatttgcattatccatcattaattcaagtgaagtagtactttcaacatggaattgtgaaactgaagttgttcactttctatttagaagttacttctgttcaaggatatttctttttacctgttgcagaagagcatcttaatagctgccacatttgttgactattttctatatgccagtatttgcactagacattttacagatattcttttatttaatctttacaatagaacctttaaagggttattattgcatttatggctgacaagagtaaaactccaacagattaag

SEQ ID NO: 394654 - DNA, 387 bp, Homo sapiens
agccaccacgcccggcctccttacttgacttctatctgtgctcctcactccatcaggcagttgaagggacatcccttgaatactcgctgccttttccatggctgtctgtttcctttgtttgaaatacccttctaccttcctatctactggccaaatggatacctcttcctttcaagcccctgacatctcatgaaagcttccagaagcaccataccccacaacaatttctatcatttgcattattttcatgtctagtacctacatacaaccgaaacaaaagtttcatgaaacaatattactgtgcatgctataatctgatattttcattttcttctttttttttttgagacagagtctcactctgtcacccaggctggagtgcagtgg

SEQ ID NO: 394655 - DNA, 399 bp, Homo sapiens
  misc_feature (42)..(42): n is a, c, g, or t
gttggagtgtagtggtgtgatctcggctcagctcattgcaanctccacctcccaggtgaaagcgattctcctgcgtcagccacctgagtagctgggattacagatgcgtgccaccatgcccagctaattttttgtatttagtagagatagggtttcactgtgttgcccaggctggtctcaaactcatgggcccaaacagtcttcctgccttggcctcccaaagtgctaggattaccagtgtgtcactgcacctggctgactgcatcttttattatttttgcttgtagaatcttgctttccctttggttggagataggtcttatttatgtattattatcagggctaatcttttgaaaatcacttggctttatgggtgatggagacatttagaggccccag

SEQ ID NO: 394656 - DNA, 721 bp, Homo sapiens
taatcttcgtaaattttattttggcaccttttaaaaagcctgcaacaaaataattggttattaaatatagctgaaatcacttgttctgatttccaaaccccaagtcagtctgactgctcctaaccccaggttgagggcagcctaggatttcttctagagcttggcccagtgtccatagttcagttattatgaaatggattcaggctttatgtattttgacaatgtctatgttcaaaggaagatccaagtttggtgggtccttaagctcatacaatttggaagtctctcctttagaaaaagagtacgaaattataaatttaaaattgttggggctccaacagctgcagcttagtgcagagtaagccttggtagcctcatggtaagcccacctctgtctagatggcttttccctgtgtagtagacaccagtgaccgtggagctatcatcttctgttcttcttcttgtaggttgtttttcgctgctgctgcctaccttaaaggaaatgcaagctgggcaaaaatctaggtttatgtagcaggagaaaatggattttctgtcatttaaaagagatctgactaatgggccactcctgcataaagtcttgataaaatgtaagctgtgtggccatacgaaaaaagggtagaatttgggccgctttcttcaaacttaaaatggggatagctgggactcatatctgaaaagctctttcaaatcaacgctg

SEQ ID NO: 394657 - DNA, 336 bp, Homo sapiens
cgtttttcctgctacacagactggaggacaatatttaaaaataatccatgtctacaccctccccttatgatatgcagcctctaaatcatctgcttctgctctatgattattttgctgccacctttactttggtgcttagatgctggtgtccacctaagttaccttctctatcctgactagcatctgggttgataagcttggttgtcaacagaccaaagtcttggtcttgacctcacatggccctacaagctccgcttggttcagcatcagtgctgaagcctggacagcaacacttttctctggactaagttagagaggccggaacacagagtttat

SEQ ID NO: 394658 - DNA, 357 bp, Homo sapiens
gggggagggagcgagagcacactcagcactccctagtatgtcactggggttctggctggagtctaaatggaatgctccttactcttcatggaatatacattcccaaggagaacgacatgcaacaagtagctcaacaagcacagctgggatgggtattccgtggacactgggtggtgaatttcttcagatagtgtgatgagcatagactgacatgggccacactgaagcttaaacctgaaggttgaaaagtcagacatgcatagaccacatagaagaatattccaaacagagtggagtacagcgtgtgcacagggctcgaagtatggaatatttggcttgttcaaaggaatgaaagga

SEQ ID NO: 394659 - DNA, 180 bp, Homo sapiens
taaataaacaaattttaaaaattaaaaagaaaatacatgtgaacattttatcagtggtttgggaaaatatttgttaaacaaacaaaaatcacaatctaaatgagcaagacttgataatataaatttaaaactttagtaaacaaacaaaaaactaaaatcaaaatgctgtagcagcatcat

SEQ ID NO: 394660 - DNA, 597 bp, Homo sapiens
cccatgcccgacgtgtatccctcagttaactgtttggcatgggggactaaaagtaaacaagattggaatgtccctaggatggctatgaatggcatgttgccatagtatttcagaagccactggtaaagccctagatggataggatgagctcttggccacaaagcttttcttaggattttaatatactacaatttatcgtttactgggaacccaggtggagtgacttcatttccaagaacataggtgtccacgttaccacgattatttttttcagattaaggctctatcttctgaagggaaaatgaccactatgcttcactgaaagtccatctcaatcagaaagacaggcagataccacggaaacttagtacttacctgccaagcccaagacatcaagatgatacacattttgtgtttctctctgagggtaaaagaagaaggaaactgctgcaaagtaccaaggaatataacccggttataaaacagacagaacgagaaacaaatggcaaacccaagtgttgaccttcccattcaaccagaccacccctctgcttgctggaactaggagtagagaaaaaatacaaaaaaaggaggccg

SEQ ID NO: 394661 - DNA, 677 bp, Homo sapiens
attaaaagtctagaaaatatcttggtttaaattctgactctacccctcctagcagtgtgtctttaaaaagttaagtagccttactaaatttgagtttcttcatttgtaaaatggagatgagatcaaatttactgagttgtacagaatacaattaaatgagctaatgagtagtaaaacatttatcaccctactgagcgctcagtacatgccatatttcctctttcctcccatactttttaatttcgcacactagtttacacaatgtgagaaaaaagcttcctgtcccaatatttctttttctccatctctgccactctgccccatctcttcctgattattccatgtatcttttcattcccccaggcttttagttcatccttggccataacctactctaaacttgctcccacacgttccctctctggctttctccttgcctctacagtcccaggagcagagcagcctaaattttaaaacaccccatctgagttcccattgtccaccacatataataacagtgcatgcctattgccttatgtgtctctctctcttgctgattatcctcaaagacagtcttattcattgttatctccagaaaccatcacagtaagaaattctaaataagtattaaagaattaaatgtgatatcacactctggggactgtggtggggtcggg

SEQ ID NO: 394662 - DNA, 665 bp, Homo sapiens
atccatgaagtcatgcttcacttatgcatcattcagaaaacacttcttggatactcactactcatgaatatgcatgcatatgacttgcagtcaaagccatgagttctcaatagcaaaactgttccagatatactcagagagttaaaatgtttaaaaaacttttttttaaagaaaattttccttttatttttgttgttttgttttgtttttttttagaagcaagatctcactatgttgcccaggctagagtgcactggccattcacaggcacgattatcactcacacactatggtcctgagatcctgggctgaagtgatcctcctgcctcagcttctcgagtagctgggactagaggcatgtgccactgcacctggcttagagtataaatttttgtgtcacacaagatatgaagaacatgcacaggcactggacccatctgtgggttcatctttctgtgggacccactaagggacccatctttctgtgaaaaagtcacaagtgaagtcctggccaggaattcaagaccaggctgggcatcatagtgagacctcatctctacaattttttttttaaaggaattggcttctagtcaatgctttgtcaaataccagtcttgggacattagatgaagctccttcatctaatgtttttctaatacataaaa

SEQ ID NO: 394663 - DNA, 240 bp, Homo sapiens
gctttttcaagaccgcctgttcactcagcctggaggttttaaatctccttctactatcaaacagagactatggaggagggtgaggaggaaaagaaaggggcaacaggagcagatgcttcaaaaagtgctagggacacggaaattaagaactcaggagaatgaaaacctatgcagtcaccacactcatgggtttttaaagagaatctgtttcaggccctgcagttagacttcaggtggtag

SEQ ID NO: 394664 - DNA, 274 bp, Homo sapiens
gccctctctcacacccctgggacttagcttttaactctcctacttccttggttttaaccaacttctcttggacccacttcaaatgctgcctttgtttactcatttaatggtcatacctcaccctgtgagggtctgtggatacaaagatgattaaggtatgatctttggcctcgaggagccccaacctgttgaagagagacaggcacatgagggggctcatggcagatatactgaacacagagggactcttaagtgttctgagactgattctgga

SEQ ID NO: 394665 - DNA, 596 bp, Homo sapiens
acgccaaggcgccggcgggcccggctcctcacctactgggggccacctgggcccccggagcccgggagtcgcgggctgaggtcggcctggggcccacgagccgccctcagcgtacctgggcccgggcctcgggagtgttcgcattagatccccgaggagggtctggtttatgaagatcccgttgccgcgcattcattcatttgttcactcttcattcactccccaagtcctgcctgggcgcctgggccacgcctttggctaggcattaggggaaaaaagcaaaacagacaaaaacaaaacgtagggcataaaagcacgcgtaaagtgcttgacatgaggcctggcaagtagcaaacactcagcaagtgctacgtgttgcacacgtgcgtgcgtgtgcacgggcaaaccagccttgggggtcgttggttcattcattattaagaaacaggggcccctgcctaactgcactgttttccagccagtgggtccacccttgggttttggccccttttctagctgtgatttcagacaagcgactttccttccctaagccttggtttcctcacctgtgaataagacaaatatgtcataacgcg

SEQ ID NO: 394666 - DNA, 370 bp, Homo sapiens
ttcacagatagacttggttatctttggggggtcagaaccccagtggtcaaatccccaggaggcaggaggcagagtactttgcaatacacttcatattcccaagtgtaagtaggtcatgaagactacaacagtgcaccctatctttatttttatctttttcttttgttcactctagagttcctaagaatcactgggtagattattaaatatgcagatcttcggaccttgcccctgcagattctgattcagcaaatgtggcatgggacctggacagccagggttttagcaagcacaccaggtgattctgatgccaattacatgcaaccacacctgaccaccgtcgcccataatcacatgcaaagaattgcta

SEQ ID NO: 394667 - DNA, 401 bp, Homo sapiens
acgcgcttgattgcctccagtcatgaccaggacgtgtcctgactctgagcttcgaatccaagaggccagctctgggtcaccatctcacagttgcctcctggccctgccatcctagtcacaagatggctgccaccggctccaagcactactctcccttttgttcggatcgaagacttcccactgggcatggtggctcacacctgtaatcccagcactttggaggccaaggtgggaggatcatttgagcccactgaatctggagcatactggccacacctggcagcagcagaggctgggaaatgtcacctttattctgggtgaacagaagctctgtaaaaatgtccttgggtggcaccggaggcacagggtgctccagattcagtgggttctgtggggttcaa

SEQ ID NO: 394668 - DNA, 165 bp, Homo sapiens
ccagcccacacctcctcctgccttgctgtcacagcagtgacatttatttacccaaatgacgcttgctggccttgagtgccaaggagacagcagctgcttccgagtcagaggcccaaaacggcagcgcacatggtaggcactaacagacgtgtattccactgaaaa

SEQ ID NO: 394669 - DNA, 322 bp, Homo sapiens
attttgactatggtatcaggaagggaagaaaaggagaaacttaaaatatggacaggaatacagacacttcagcaacagtcaatgtcctctgcagacagtacatacaatattattcacaaagtgggctaactctgtaacagtcttccagccaagagtctctgaaaattatttctaaaactttacaacttgctactataagggggaggtacgcaaccaataagtctaattaggattctgaccatttctcatatgcaaaggcatatcaacaaacccatctgcagtgtacagctcatcctcatctgggatctgggggcacaattta

SEQ ID NO: 394670 - DNA, 351 bp, Homo sapiens
tgcagatggaagtttctgtctgctggccctcaagagagtgttttgccagggacacagtctgttcctcctcagaaaacaccccccaaatgctaacaacatccccaccagctgctagaagcccctttcccctccccaccttgaagtagctcatagttctctgggcagagccagaccatccagtgtaccccagaggccagtaggttcctgcccattttcctctctggcttcctgccaagaattatggcagctgaggatgaatggagaagtaaaaacaactaacaccgcacaactaacaactaacaccgcagttcccacctgggttccacttagcaggagacatttcggagggtt

SEQ ID NO: 394671 - DNA, 813 bp, Homo sapiens
gtaatctatcaaatatttaactaattgtacacaaactgttccaaaaaattgaagaattcgttttagcaggtcagcataatccttatattgaaaccagataaagacagtaaaagaagagaacactactaggctgggtgcagtggttcatgcctgtaatcccagcactttgggaggctgaggctggcgaatcacctgatgtcgggagttcaagacaagcctggccaatatggtgaaactctgtctctactaaaagtacaaaaaattagctgggcatggtggcgggcacctgtaatcccagctacttgggagactgaggcaggagaatcgcttgaactggcagcaggaggttccagtaagctgaggtcacgccactgcactccaggctgggcatgacagagcaagactctgtctcaaaaaaaaaaaaaaaaaacccagaaaaaaacactacacatccatttcatctcatgacataaatgcagaaaatttaaacaaaatttaactaatcaaatcaccaatattttaaaaggatgtaacaagtggagtatatcccaggaattcagggttggtttaatactgaaagagcaataaatattgttcattatgttaacaaacttaaaaagaaaacctatataatcatctcaatagatgcagaaaaagcatttgacaaattctacttccattcctaacaaaaattctcagtaaactaggagtagaagtgagctctttaacctgacaaaagatcatctatgaaaacttacagagtgtcacacttaatggtgaaagacagaatgctttcctttataagatcaggaa

SEQ ID NO: 394672 - DNA, 480 bp, Homo sapiens
tctcatttatctggcagtggcatattccatctctgcagcaaggtaaagccctgggtgctagaagttccttcacagaacctaggtgtcagccagtcatggatattgtcctgtggcttcccataaagaaagctaaatctttgcttcgtgctactcctgagcatgcagttttgatttttgtggttctccatctcaaaacaaaagctgatgggctgactgggcctttctttgcgctgggggaatattaaaaactcggtttttcaaatattaaggtacatggagccaggtggaacccaggctcttttaaagattgatgagggcaggtgcagtggctctcgcttgtaatccgagcactttgggaggccgaggcaggcagatcacttgagaccagaagtttgagaccagcctggccaacatggtgaaaccccatctctactaaaaagaaaataaaaatttgccgggtgtggtggcaggcatctgtta

SEQ ID NO: 394673 - DNA, 454 bp, Homo sapiens
ccatgcccagctaatttttgtatttttagtagagatggggtttcaccatgttggtcaggctggtcttgaactcctgacctcaagtgatccacctgcctcggcctcccaaagtggtgggattacaggcgtaagccaccatacctggcctcttaaattgatttattggtagaatcaactttttttcaatgttatctggataaaagtttagattcccacaaatttcacccatttcattctaaaggttgtgaatatattgtttaaaaaacccagtttttcttttttgagacagggtcttgctctgttgcccaggttggcagtgcagtggcacgatctaggctcacagtaacccccacctcctgggttcaagcaattcttgtgcctcagcctcctgagtagctgggattacaggtaggcgcacaccaccatgcctggctaatttttgtatttttagtag

SEQ ID NO: 394674 - DNA, 527 bp, Homo sapiens
acatgatgttttttttttaattcccactgaattaaaaaacctaggttaaataactgaaaactccttcaatacaacctctccaaaacaatttcaaattaagtagttcagcttttagattctgaattcttcccccactgctccacaaaattttaaaggaaactaggtataattctgacagtatagctgttgacatattaaaatttgttttttaacacaaacatcttaatttatttactgttatctgtattttcactttcaagtttaatggtggctctaagacatttgttaaaatgtaacaatattttgaaactaaatgttgatttttatttctgttacatatgagaactgcctgtgtatttctctattatttgatggcataaatttatatttaagtgataagcagttgagttatctgaaaaacaaattttggctataaattatgtatttgaaagcatgaccataaaatatttttcaccactaacaatgattttatttcaagaattccatgaggtgtaattaatgtattg

SEQ ID NO: 394675 - DNA, 736 bp, Homo sapiens
ccaggaactaggccccacctccaccatctctagggaggaggggttggaagaataagatcagggtcagggcacttggagcctccttcctgccgctcacggctccaggggccatggcatggacgggcctgtgctgcccagctcggtggcccacgctggagactgtggatgggcagtagactggcctagcgatggttccatttccaagttgcatctctcactagccgttacccgggcattgcacttctctccaggacagtttccctggctgtaaataggactaaggacgaggtccagctccgctgcttatctgtgtgccttaggaacagccatttaattacctcatctctgggctcttgggaggaacatggcaggttttgaagcacttagcgccgggctagagtgaacatccattcaataatgtggctcccacctcttctaggttaatacagaggccacccggttcatctcagacctgcctttgtccaccaggggtttaagtaaaaactaccacaagcagcaagacttccaccgtcctctgggtcccaaccacaatcctgaggccaatggtgacggcaactgtagagacagaaggtagcagttcctttcggacacttgtccaccaacccaagaatggagcaaaaatcaaaacctccctccatacatcttcttaacggactctacttcctctccattcccactggctctgccccaagttaagcctctgcagagctcctgg

SEQ ID NO: 394676 - DNA, 467 bp, Homo sapiens
ggaaggatattaaagacccctcgaaaacctcctcatgagatgaaccaaaaggagttagaaacattgctgaaaacattttcagttaaattcctaagatttttccacaaaaattggtcaattatacagtcttacagacaaaaaaaaaaaggatgaagcagcttcagattacaaagcccttttagaaatactatttgtaaaatattctagccttgaattacaataaggagtatttcctgcagggactgaaaatgcattaactgttttataaaaggacttcatctcaaacttagtagcctaatttaaaaaacataaatcaggatgggaagttacagatatgattgaattgctggccttagttgaacattagagaggactctacagcaagaaaaaatcccagaaagctaacaagcatatgtttttccaattacaacaattacaagaacatagaccaaagggaccttcttgtt

SEQ ID NO: 394677 - DNA, 575 bp, Homo sapiens
cttattggagctagttagttgcaacatttacaaatttcaggtggattattatctttgtttccaacttttttctattccaagaaattatggtatgcttccagttgtggcttatccttcctgacgtaattttacttactcacaagaggcacaacctccttcattcactataagctgtgtccttatgattatgcagtcaaaaaggcatccatgggttttttaaattgtccacacacattgtatcaatgtttcatgtgtcctcccaaaggaattatgaaacaaatgtcaagccctgctttaatacatttttttaaaatttccccaaacactgattttacgtttctgatctcttagagggatgtatcatggaagaatcaggacttcaagtggaataggctttgttccatgataccttaccttttcaaagttgaaagacacatcatatttctgtcctttgcataaaaaagcaataaatgtctttttcccagaacaaacattgttctatggcttttcttaagaatggctggtggtgctgacgccgaagtcgctgttgcgtcacaaactggccgtttcgaccc

SEQ ID NO: 394678 - DNA, 235 bp, Homo sapiens
cttttcagccttgtgaccttatggtgattcaaacagaggcttcatcaaaggcagattcagaaatgaacttggtgtgtgtaggtggttatgcttgtcattattgtttgtaatagtatgatagggatgatttcagtgtctgccaacagggaactggttgaggttaagtaaactgtggtacatccaaatgatgcatactgtgcagttgaaaagaagaatgagaaagacctctgtactc

SEQ ID NO: 394679 - DNA, 376 bp, Homo sapiens
ctcagaaggcagggaggcaccacttgaaatttctcccccggagatgacatgagcagagagccacacagaagccgctgaccgtggctgaccaggccaacagccctgcccctggccacctttctccaggcttccccaccctccctctgtgtgccagccaccatggccagcttctagtgccctcactatgctgcttcttgcctcaaggtctctcttttatctggaacattgtcttctatactttctctatcttaattcctgttcaaactcctgagtacaattcaaatctcacttcccagcccaggtttagtacccatgtgatatccactcccacagtaacctacaatggtgtatcagttaactgtcaacttcctgattc

SEQ ID NO: 394680 - DNA, 429 bp, Homo sapiens
aacaccagttttactcatgaaggggcattttctaggtcaaatttatgatggggaaaattaaacctcaatccacgacagagtctttattcaaataaggtgccttttaaaagagtctctcatttctcctgtttcacagaaaataagacctgacctcaagaaaacacctttcatgagcctgggcaacacagcgggactctgtctgaaaaaaaaaaaaaaaaagacgggaatgaatctcatcagttgagaaagaggaggaaatgaagggaaacatcccaggataaaataagggggcatagggaaagatctccaaactatttattggtaggcatctaaacagctggctttcgggtagtgtcccctgggaccagccgcagcgggtaatgggtacagaaatccaaacttccgggctcccaatcttagacttctcca

SEQ ID NO: 394681 - DNA, 245 bp, Homo sapiens
ctagaagaggcacacgtggcagaaatacaagcagacggcagaataaatagcatcaatgaaaagagtcaaactttgtaaaacatttgaagagattcattctgagtcaaatatgagtgaccatggcctatgacccagccctcaggagacccagggaaaatgtgtgcaaggtggttggacacagctgggttttatacattgcagggagacatgagacagcaattaaatacatataagatatatattgg

SEQ ID NO: 394682 - DNA, 375 bp, Homo sapiens
cctggctgcttaatcaggagaggcagtttgaatctgagatgaggtgagatgagggatatagctttgtagctactgaccagagtcaactgagtacccaaaaggagtactgattccccaatcaaaaagtctgtttctcatggcactttagtatatgaactcagaagaatgtttgcaatatgtataagaaagggttataacatataagatgctcttgaaaattatcatgacagtgattaacatttcatttaaaaatgggcaaagaacatcaactgcgcctggactacaagtatatgtcttgatttccaaacttttaagttaccttttaatggatttgggagtcttacggcatggtagtcatgacatatctgctgtatg

SEQ ID NO: 394683 - DNA, 463 bp, Homo sapiens
acctggggccttatccgacatacactatattaggtttttagagggctatgactatctgcaaaaggaaaattcaagataccttgttataaacatggtatacagtgacctttggcatgcattttgttttgtaactacacgaagtgttaatttggattgaatctttgttttcacttgaaaaccttttttttttttttaagaaatagcttggaaatttaggctgccctgaggtgttttcgtgtgtctgtttatggttgacaagtatctagttatgagaagaaaatgtggatagaattaactgtattataggcgagaagggaattgccttataatcttgtgccactgaacacaagattagtagaagagtgggcttcacttgtgactttctgggtatttgtgattaggcgtgtgccagttggtctttgcttgggcattagctttcctcatatttgagaaggctttcacg

SEQ ID NO: 394684 - DNA, 393 bp, Homo sapiens
cctaggtaactgcaacaatgtatttaggtaatttacattaggtttttagagggctatgactatctgcaaaaggaaaattcaagataccttgttataaacatggtatacagtgacctttggcatgcattttgttttgtaactacacgaagtgttaatttggattgaatctttgttttcacttgaaaaccttttttttttttttaagaaatagcttggaaatttaggctgccctgaggtgttttcgtgtgtctgtttatggttgacaagtatctagttatgagaagaaaatgaaggaagaaaaggcaggcaggcaggcaggatttattagtttcctgacttacacattgcttctaatcatgtaccactatccacagctagtcacgctgctgtgca

SEQ ID NO: 394685 - DNA, 681 bp, Homo sapiens
cgtgttggcgggtgcctgtaatcccacctactcaggaggcagaggcaggagaatcactcaaaccccagaggcagaggttacagtgagccgagatcgcgccattgcactccaaccagggcaacaagagcgaaactccatctcaaaaaaatatatatatatatcaacaataatccctactactggagttaacagattactgcaggttacaggtagggctctgctgggaagaacaaagcaatcagaatcacagactgatgaagctgtccctactataaaagtcccaagcaaaaatgctccaatactgtatcctctggatctccctgagccgttaagggggagaaaaagtcaggtaagcagctgtaaagttatgtctaaatcatttgtgcacatgataaaatcatataggtgagcgatgaccattttaaaaatgttctagtctgaagcaaaaggaactacacagctcatgattatctagggtttaagtgcttttcttttttcttttttttttttttgagacagagtctcactctgtctccaggatggagtacagtggcgtgatctcagctcactgcaacccgcgcctcctgggttccagcaattctcctgcctcagccttccgagtagctgggactacaggagtgtgccaccatgactagctaatttttgtatttttagtagaga

SEQ ID NO: 394686 - DNA, 447 bp, Homo sapiens
aagcggagcagatattgctatgctagtctgggaaatgagccttcttttctgagacggagcctcgctctattgcccaagctagagtgggatggcatgatcttggctcactgcaacctctgcctcccgagttcaagcaattctcctgcctcagcctcctgagtagttgggattataggtgcacgccaccatgcctggataatttttgtattttttagtagagatggggtttcaccatgttggccaggctggtcatgaactcctgacctcaagtgatccgcccgctacggcctcccaaagtgttgggattacaggtatgagccaccaagccctgccaacttggaagtcttttagttgatttttctgtgttttctagcagtacaatcatatttgcaaagagtgatgattttaccacctcttttatttttttttttccatagaaaatatctg

SEQ ID NO: 394687 - DNA, 220 bp, Homo sapiens
catacagcaagttttcaaagaaaataatattctattaaaatgatacctttaagacctcaaatatttctcctctggtatgaatgagaaaatgctgggggagggaggggacaataaaccatcaggaagaaaagacaactggcctttgtcagtcttgaatactataaacaataacaaagtatagactaacaataaatttatccactgagaagggtggtaagat

SEQ ID NO: 394688 - DNA, 469 bp, Homo sapiens
aatttccccacgtgcattagctgtagtcaatcatattagatctagggcagccctcggttgctagtcgtgggaagggcattctgcaagtgtctaaaaccgcccgcaaagcagtgggtaaagcagcggcctagagggggcatggctgtcccacgccaaacagcgtattagccgcaaaaccaggtactggctgaacctcagtttgcgtcttcgctccgccgccttctggagtcctttctgcccctagaggacgcaggtgagctaagcagcagtcatgccctttaccatcatgacgcccgcaggcgggaccacccggcactgtagacagctgccctttacaatcatgactcatagaaactacggcactctggccgtggccgacgttgctcctccgaagcatggcgccggcgggagttgtaacccgggctgtccggagcggggagctgcccctcacaagcatggcgtcagctga

SEQ ID NO: 394689 - DNA, 189 bp, Homo sapiens
tgtaagtaccttcactcaaatatgctggggctcagtaggagaagcaaagagaaggaaaaggtattgattgatcgatttgattctaagcagagattgacagagataagcttctaagacctttcaggccccagagtgtgactgttgagcacctaagaagacctcacttgacccgtgacttcccgccagagc

SEQ ID NO: 394690 - DNA, 320 bp, Homo sapiens
gtcatttctgtttatttgttcactgtttggttccagctctgctatgcatctgtttactctgttctggcatagacatgagtttctcagtgtgaggtcagtgaaagccacctcatcagagagagcatgtgaggggcccgcctgctgccccccacccccagctggggtccaccctctgctctctctgcgtgtttcatggggctgcctgtgaggccgtgtgaaccagagcccggctgggaagccacatgctgcctggactctgacctttcctggcagcatgaccttagccaatacgcccaacatggcagtgatgcccaacatgg

SEQ ID NO: 394691 - DNA, 276 bp, Homo sapiens
gaaccttagactctgacttctcttatttagccccttctgaggctatttcatgcaaggcatgtgcaaaagtacaattgagaatgacaagcaaagggtcctggcttctagggctccagcaaacaatgcaccagaagaaattaagcctatatacaaatgcctataattctcacatcactatattctatgtgaactatgaaatggagtattaatgattcataaaattctaccttcaatccagaccactctcctcagtgccagctgcatcctgaaccattg

SEQ ID NO: 394692 - DNA, 154 bp, Homo sapiens
catgaacagtcaccatgccctctctgccccgtgccaccagcatcctgagacagccctgtggaatcagtaagaggagaggggctgggcgcagtgactcatgcctgtaatcccagcactttgggaggccaaggagcactttgggaggccaaggaga

SEQ ID NO: 394693 - DNA, 350 bp, Homo sapiens
  misc_feature (341)..(341): n is a, c, g, or t
catggccatcctgtagggccaaggtgatggaaggggccttatccgtctggaaacttttccactgattgtggcagctgctgtatgtcatgagagcctaagaacccacaaaaaagagaaaggaccatagaggagatctttgagtctaaatgttgaatttggggcaagccttacatttgcagtcctcaggttgccaactcctttgacaatgactccgattttttgttgtggcacctgatttgctgtggtgataggaggcaagaggagttggggaactgggagaggatggttgagccttgtgatgagaggaggggttttattttatcttagtcttttcagaatgntgctgaatt

SEQ ID NO: 394694 - DNA, 372 bp, Homo sapiens
taaacagcaataagtcattagcaaaaaaataaagtgagaaatgtgcattaaaatgatccacatttatttaagaatgtattccaatatcaaacagcaaatttcaaaaatgcaaaaacgcaattgcttttgcctctcaggtacatcacttgacctttctagttctcacccacttcacccctaaaatcggaaaatctttctgcaagaaaaaaatttgaccacattcccttaaggcctcttccaatttcaagagctgtgctttaccatgacaaaaagaacctagctcttttcccaattttgcaacgtcagaaaaaggaggaaggggaaatagctgtgtttaaaacattttttaccaaatagaaatattataagatt

SEQ ID NO: 394695 - DNA, 407 bp, Homo sapiens
tttccactcccgtctgtcaaagttgggtggagaactcccacatttcctgttctgagcccggagctctctgccaggtaaagcaatagacactccagcttgtgctgggacagctgggaccatcggagggccgggcactcacgaagtttcatatcattctttctaggttagttctgatgaaatcaacaccctgaactgaaggccccgggcggccaagataaaagattaagtcatcaaatgactagcatacttgcttcttaacaagcaactcttgtggttgtcatacacgaatgacgtcatctccaacacacaccttgtcaggtattctattcccaattttctcacagctgaaaaggaaccagactgctgattttctcaatttgcttagcagaggcagaaatttaattggg

SEQ ID NO: 394696 - DNA, 1074 bp, Homo sapiens
gcatcatatcccttataaaaatgcatccagtaggttataatcttgggggaaatgccacattatttagcttcattttccccttcaagtctttcacattgttcaaagcagacagcaaagtgaaagcattattttgggagatggggaaaagccagaatagattattggcaagaaatagaaaccacaagatgaggatcaagagtcaaggtccaggtttagacaagatctctggatgtggttattatgccacagaatcatcaaatgtcaactgaggttttaaatactgcttaaaaatgccaagcctggaaataggtgcctgtaattcttcagtccttcagtaaatacccaggctattaaagtaggtaattcccaggaatgaaatcctccttgcacctctcttaggggtggccatggaggacacaaaacacagatatttatctttggaagaaggaggtagaactgtttttgaaaatatatataaagtatagttgtgttggagaagcagaggcatttttgaaactatatgtataattagaatggtatgtgaatatatatacaaccaaagacaaaggggtaaaatggggtaaaaatctactattattcactatacggcactcattctcaactaccttctcagatctaaactctacttttctgtagagaaccccttccctgtggttaggacagggccaacactgacttgccaccatgacgacatcagtgggtacatgacctagactcagcaaattatgctacccataacatcggctaccatgatcatttaagatctggacatgaaatctaaactaggttctccctggacattttctgaaaggtattagagagtgggtgtagtggctcacacctgtaattccaacattttgggaggctgaggtgggaggattgcttgagcccaggagttcaagaccagactgggcaacatagggagaccttgtctctatgaaaaacaaaaaaattagctggaggccgaggcggacggatcatgaggtcaggagatcgagaccatcctggctaatatggtgaaacccgtctctactaaaaatacaaaaaagttag

SEQ ID NO: 394697 - DNA, 375 bp, Homo sapiens
atagagattccttaaatgccttgaactactaagtttctcagcctttgccaaacagttccctgtgtgtgtttgggcacaccttcagcactctggtagattacaactcttagccttcacttcccatttatgtagaacctcaaggacagccagatgagagattaggagcttcttaggtccttcttgggaatgcacacagtactgcacatttttagattccgagggatattttggagttttaaaagctccctagggacatctcattatccagatttttcttttaaagtttttaattaaactcttgtttacctgatatgtattgctgcatcaggcagttgtgatgttaagcagttgccactgattttatttgacagatgc

SEQ ID NO: 394698 - DNA, 496 bp, Homo sapiens
agccagcccacatgattgcagaggggttaccatttcctccatgtcttagatcctggagatggcacgtcgggtcctctttttctccagttgaccaccagggaagaaaacaaaagagctgcatgttagcacaaacttcttgcttcacttcaacgaacagggctgagcaatacctgggaaaagtacaattccagagtaatatctggaggcttgtctctagactggtggggaagggtgctggctctagcttattgtttcccaagctttcctgataaggatcacctggcttgcttgttaaaatacagattattggggctaggaatctgtttccttaacaagcgttccaagccattcctgtcttcaggcaagtttgggaaacattctgtctactgtaccaaaaatagcctgtggaagaggagtgcttttaagcaagtttagttttgcacatagtacatgaataggttctccttgtttgaaaatgttttaacattgcagagaa

SEQ ID NO: 394699 - DNA, 296 bp, Homo sapiens
gggaatcgaagaccaggtaaagggaagcaggttagagaagggcagagaagtgagggcctgctgagcagaaccagccaaagtaaatggaggagcagctggagtgggatgaaaaggccatgaggcatcttgcagatgggtcctgccttatgcacacccgggttcagaagctctcccaggctgactctccccaagcattcagtttggttccatttaagacatgcatactgaatactatcacgaattagcactatgctgtaagctgaagaaacaaatgcaaatgagacacaactctgccc

SEQ ID NO: 394700 - DNA, 236 bp, Homo sapiens
ctggaagaatctggctgttctttcacatcttataggtcaaatccaaaaaacaaatagttactcaacaaacaggtcctgggtgctagagggtctgccctctccagccctgaggtttgtctgtgtttttcccctactgtatccccagcacctacaacagggcctagcatgtagtaggtgctcagtaaacactgccaagtgaatgaatgttgctaagtgtggatgctgcagaagtaaca

SEQ ID NO: 394701 - DNA, 456 bp, Homo sapiens
cgggtgcgctggctcacgcctgtaatcccagcactttgggaggccgaggtgggtggatcacaaggtcaggagatccagaccatcctggctaacatggcgaaaccccatctctactaaaaatacaaaaaattagctgagtgtggtggcagacacctgtagtcccagctactcgggaggctgaggcaggagaatggcgtgaacccgggaggcggagcttgcagtgagccgagattgtgccactgcactccagcctgggtgacagagcgagactccgtctcaaaaaaaaaaaaaaaaaaaaaagaccatttgcaaagggggcctgtgctttcaaaatggaaagaaaattagacagtagtttcttgaggggagggggatgtggtactgttttaaaataagttaaactactgaggagcacagaggaacagaaagaaaaaaattcttatgttccagctcaga

SEQ ID NO: 394702 - DNA, 407 bp, Homo sapiens
aagaccagcctgggcaacatagtgagaacccttctctactaacagttaaaaaattagccagatgtaatggtgcatgcctgtattcccagctactggggaggttgaggaaggagaattgcttgagcccagaagttggaagctgcagtaacctacgattgcaccactgcactccagcctggacaacagagcgagaccgtgtctcaaaaaaacaaaaaccagttaattctgtctccgcacagtggttccagatgggccgcgtcttgcaggagactttgagatttctagtaatttcttcctaggtgagattttctttttagggatttagtaacttcactgtctggttgatatgtgcaattagtgtggcatcctggtctttgggtaggggctgagttacctaggcttccctt

SEQ ID NO: 394703 - DNA, 408 bp, Homo sapiens
ctttctgacctcattattaaggatttggtgtgaaaataaagacagaaaaaatgttaaatgtgggaactggaagacacttgccttttctatctgctgtaacgactcaagttggagcccataagctcctgcaaaatgcaattataggatatatgcactgaattctgcaaaatataaggagtacaaagagcacgtgaagaaggacaaaaatgagattaaaatagtttttttttttttgttttttgttttttgttttttttgctattatcaagccaatgtacatgactgaagaccctgagtcagcattgtctacaaaaagggcatggcttatgcgagatccacatttggagctttgagaatctcctgttgctcaccactgtccaatgcttcaaactgaaattctctccatga

SEQ ID NO: 394704 - DNA, 706 bp, Homo sapiens
gttctgaggtgttctgggcattcatcactggttcctggtctgtgagagaaccaccaagcccttacgtagggagaaaaacagaggagtctgcacctggcttctccagactccttgctgtgagacagccacaggctgtgatacatatctttaactttaatgcagttgctatatgaaacctttttcctgtaatgactgtgtatttgcaagcactatctctaggtcttctttaacaattgaactctatttaactgccacttagaagtaggagtgttgcccaggcctggtggctcacgcctgtaatcccaacactttgggaggccgaggcaggcggatcacgaggtcaggagtttgaaaccagcctgaccaacatggtgaaaccccgtctctgctaaaaatacaaaaattggctgggtgtggtggaggcgcctgtagtcccagctacttgggaggctgaggcaggagaatggcgtgaacccgggaggtggagcttgcagtaagccaagatcgcgccactgcactccagcctcggcgacagagcgagactccacctcaaaaaaaaaaagtttctgtgacaacatgcattggagaactacaaattagatcctcagaattgacctttgagggagacacagagatcttggccctattttactcccttagatcagtttcctgctccagaccaccgcgaggggtaccagctcgatcg

SEQ ID NO: 394705 - DNA, 229 bp, Homo sapiens
ccgaagctcagtctcctaatccttttcaagcctttaaggtttctattcttaaaagaaagtcatatgctaaaatgtaaatacacaaaacagagattgtttgcatagtccaccaagagtccacatatttcctaaaatgtatacaaaattataggttgtatatatagatatgtatttaataagaaaggagtccaaagattttatccaattctcaaaggggtcaaaaacccac

SEQ ID NO: 394706 - DNA, 224 bp, Homo sapiens
ttttagagagtggaaaaatggagtatgacatatagagtgtgggggtgattttaatagattttgtaagggaaagaagcacaggaccagttgttgggtgagttagaaggtgaaagggagaaacatatctgcaatgactttctcacttttgtcttggacattccagaggatggtgagattattttctaggagaagacggaggaagacaattttggaatgggagatgg

SEQ ID NO: 394707 - DNA, 216 bp, Homo sapiens
aaagtgtaaagcagctatgtttcttgatttggatgttagttccatgggtgtgttcagttttgaatatgcatatactttgtggtgtgttcaagttttagtatcatattatatagttcaacttgaaaagtaaaaatatttgtgggatctaaaaaatcaaattagagtagaaagagagttaccagaggctgggaaggggagtgcatgataggcgggggg

SEQ ID NO: 394708 - DNA, 433 bp, Homo sapiens
gtattcactggtgtcttaggatcacttaccaaaaatctgtggcatcttagatttggtaacaaagcctaaatatttccatcctacaaacgtggtcatgcttctaaaaaaccacatgaagtagctcaagatgtttggccagccaatgcgcagaagccctaattgaacatgtaaaaggcagatgagatgtgttaaggtattatcttagatacagattatgtggagctcaaagaccttgttgggaacaacattttctaattgcgtttcttctccgtggatctgcgcttttttgaaatcaaaagacactaggggctaggcaaagtggctctcacgcctgtaattccagcactttaggaagccaatgctggaggattgtgtgagcctaggagtttaagaccaaactgggcaacatggtgaaaccccatatctgccaaaa

SEQ ID NO: 394709 - DNA, 190 bp, Homo sapiens
tgctggattacaggcgtgagccactgtgcccagctgcctgaattgtttttgactccccatagtactgtgtccttttaggagagtttttttgccactgattctcagttgtttgggtgattgcttttctgtgggtgggaggaattgtcctagatctctttgagggtcttatgaaagtttttgacagtttcta

SEQ ID NO: 394710 - DNA, 692 bp, Homo sapiens
ggtgggaaaagtttctagtaccagataaagcttcaaacaattttgaaaggccctttcaaataattagttacatgattctgtaatttgatattccctgggatttgctctggccttggctttgtctgcacatgcctcctaaaacctttgttaatcatataagaatgatagctaatatttatctgagtacactgcctcatcgatctaatctaatccctatgacgacctacggagatagatactattatctttgttttatagatgaggaagctgaggcctaatgttaagtaattcccctgaggactcagtcctgggaaattaaagagagcaggattagactcaggtctcagatgccatcatcgttggtcttaaccattatcccatattttatattaatcaaaagacttgtaaatcttgggattcgaatcagtggctaggcttgtgtttgtacagttgtaactgatggaaggacagcacatacaatcttacatagattgaaaaaaatttctctcccccccaggaagtgtctttcatttgggactctggaaggaaaactggagggggcatgagtatcaggtggaaaatttcacactgttaacaaatagacacctttccttaaaccgtatttgagtttgcagcaaagccattctatattattcttaagcctgtcctatttatagcatcaccctgattgc

SEQ ID NO: 394711 - DNA, 425 bp, Homo sapiens
attagaggatccgatgacaggcaggactgagtgacacaatcacagctgactgcagcctcgacctctcgggtggagcaatcctcccacctcagcttccccagtagctgggaccacaggtgcatgccaccatgctcagctactttttaaacattttttttggagaaacagggtcttgctatgttgcccaggctggtctcgaactcctgggctcaagcaatcctcccactttggcctcccaaagtgctgggattccaggtgtgagcccccacacccagcctgaaggttcttcttctgtaagatcctgagtagtggcatcactgccctggggaccctctgttgagaataatattcatcacaacctccctggcccagaatgacactgcagggcactgttcccctaagcccggtcctgcctgggtccccat

SEQ ID NO: 394712 - DNA, 276 bp, Homo sapiens
tgtttttcttccttctcaaggatctccattcctggtcacaatagttttcatgtatttgcatcataatattcttaatatgcctactccagcataagccccttgagaacaattcagcagagggatgtttttggcagaaaaggggcttctgcagatgcaatggaggggaggaggggagagaacagttaggagcctgctttcctcctccagcaagggtttcatggcaagagctgttgtatgtcagagttttcttagattgttagttttctgctttggttg

SEQ ID NO: 394713 - DNA, 354 bp, Homo sapiens
cagcctcccgagtaactgggattctaggcgcctgctgccatgcccagctaatttttatatttttagtagagacggggtttcaccatttggccaggctggtctcgaactcctgatctcaggtgatccacctgcctcggcctctcaaagtgttgagattacaggcgtgagccactgtgcccagccttctatgtgtattttctcacttaatttttatagcaaccccgtggagggtactattactagtgtgagacccattttccaggtgaagaaactgaggcatagtgagttgaaatggtcatggtagtttctggtgtggatgggctggtggctgaggtacccgaaggactggcctgg

SEQ ID NO: 394714 - DNA, 225 bp, Homo sapiens
caggctgagggcataccacggctcatgagcaaggatccaggaaaatagaggactcaggaagaacaggctggggctcatctcctccactaaaatgggagctccctgaggcaagacccatgtttcctccaaccaaccagtgggttgtcgagtgcagcactgtgtctcctccatcaggacagggagctgccaagggcagaggccatgactccttcctctataaaccca

SEQ ID NO: 394715 - DNA, 479 bp, Homo sapiens
ccccttgccttccccccaaaatctgtgacgttcttcccaccaaaggctgtggtagccccgcttcctggacactgtggggcagggaaagagggaattctggaccatggggtggaagacttgagttccaagcagggctctgccactaaccatctagctaaacaagtcatgaaacatctctaagtctcagttttctggcctcaaaaatggggataccaacacctactgctaggatgggataaggagcaaacgagaggacgcaaaagcactttataacacaaattatggagttactactacgccccatctaagatctgagctgtccctcagataagttaattcagaatctctgggagtggaacctggacattgccattcaaaaaaattctccagaaaactccaatgcaaatccaagatcagcaaccagtgataaaaatctgaatatggggctgggtacagtggctcacgcctataatcccaga

SEQ ID NO: 394716 - DNA, 247 bp, Homo sapiens
tgtcaccgctcgtcctctgccattcctcccagcacagcccgccgtgtcactgtgtcaccgtgtcaccccactgtcaccactcgtcctctgccgttcctcacagcacagcctgccgtgtcactgtgtcaccatgtcaccccactgtcactgctcgtcctctgctgttcgtcccagcacagcctgccgtgtcactgtgtcaccgtgtcaccccactgtcactgctcgtcctctgctgttcctcccagca

SEQ ID NO: 394717 - DNA, 415 bp, Homo sapiens
ctcaagtgaaacagtaatcagtcccatgagcagcacccccagcctattcctatactttatgatatttgttcaaagtcgagcacttaaatagccagctgttctaatctttgtggactgattccatgatgggtaacatcaggagtatcagcctggtgtgaaggcttaaggtcttgttgaccttttctgtgtttgtatattcactgggcctatgtgaacacttttccccagattcctggaatgtatcagtgcttttagctgccttgatctaagagtggcatgttagatgttctgttgtgttcctctgccctttgtcttttgtccctctagcactggcagatcggtgacatccctgtagctctcaactaagccactcctcccatccgaactttgcatcaggtgaaacagtaatcagtcc

SEQ ID NO: 394718 - DNA, 181 bp, Homo sapiens
agggaagatgctccaaggaagtgacattaaactaggactgaagggatgaatagatgttggtgaggcaaagtgtgtgtgtgtatgtgtgtgtgtatgtgtatgtgtatgtgtatgtgtatgtgttgcacaggtgtatgggagttcagagtgttccagtgaaagggaacaatgcccaccaagg

SEQ ID NO: 394719 - DNA, 190 bp, Homo sapiens
tccacccccaactccccagcactatcccacctcaatgcctggctcaaatccttcccttcaggaaatcttcaggccctactagaggtgattgttctttctagaacttttatgtcacttctcacggcttctataatgtggcataacattctgcattgtgtgacaaggtacgtgtacatattttattttccct

SEQ ID NO: 394720 - DNA, 222 bp, Homo sapiens
tcttagataacttccatcactccccttctttaagccgcactgcttgcttgcccagacacttctgtcctgggtagtgtggaaaataaaacaccttttgtacttcggttgagggtaggtggattggagggagagtcctgtatagtgtcatgctgcctctgtaatagaggacttttagaattttttcagcagtagacaaatacgcaccttctttcccagccttcc

SEQ ID NO: 394721 - DNA, 348 bp, Homo sapiens
tgtgtctggaatctattccttctggtggattcgtagtcttgctgacttcaggagtgaagccgcataccctcgcaattccctaaatagcctcacaagatgatcattcctttccataacctctaagagaagatctaagaaggagctatgaaatcaaagaccaaagatctgactcttctgtgagtcactctgccctctacagtgactgttcattacttaattttacagcctagtgttggggtctgccttcaaatgttctgtgtcgtgtccaacacactttgtcattttctttctaatccttgtgattattattgttgttattgttagcttcctatgtaaaactagttctca

SEQ ID NO: 394722 - DNA, 517 bp, Homo sapiens
tctaattcaacaactaagaacaatatggcttctcttgtatggaaaatctgagctgcacttcaggaagtacttcttatgtaccttcttatcctgggtaaaagtcccgtaggttggttaatactcatgaagacttaaaagattgctttttgaaatgccatctgtcaacctcttgatgtcagtataacctgcaattcttcttaaaatacaattcctgctgacctaaggatacctggaggtgtccactaagtctctccaggtgctttaagatctggcatgtgggagcaagaactagttaattactcattattggtccagaggttagaactgagacaaatcaataaatggtaaagaaaagtagtttgagcttgaataggaggaaattctgtggcaattatagcaatcccaaattagaatttttttatacttttggaggttctatcatggaaatactcaaacagttagaatgtcaagaatgtagtaggggtgggacgggtggcccatgcctgtaatcccagtg

SEQ ID NO: 394723 - DNA, 193 bp, Homo sapiens
ccagtttacatgagggttagcaagaaattatcctttcctagtattaaagagtatttaatcaacctcttccagttatctgacaaaacaaaaaaaactcagtaatgtcaatgataaatcagtacttttttggggatatgagtaaggtgaggaacaggaagaaatgttgcaaactactttacttttagacaaatta

SEQ ID NO: 394724 - DNA, 189 bp, Homo sapiens
ttaatatgtttactcttttcattagttcagtggtataaaccctggcaagtctcataatttgtaattaatagagaccaaaatatggtcttaactatattgcagtaatctagttttcccttctctaataagaattcttactgtttcctggccttccctggaaaggtgttttttgtttgttttggcttttgt

SEQ ID NO: 394725 - DNA, 470 bp, Homo sapiens
tgaggtgactctacaggatcttctgctgctcgccttctgggatccagccaacctcccacttcagcctcctcagtagctaggactacaggttcataccaccacgcccggctaattttttgtattttttgtggagacggggtttcaccatgttggccaggctggtctcaagcccctgagctcaagtgatccacctgctgcggcctcccaaagtgctgggattacaggcctgagacaccgcgcccagcacctttatgttcttcatgcccaccagccagaccccaccaggacacacctgcgactgaacaagttgggtctattgctcatggcatccagggagaatgcataccgtggcaaagcatgagggcatctccataggagggtggccggaaggactggggggacttgagctagtggcaggtcattttgtggaaggcttaaagaaatggaactgtggcctggattggatgttg

SEQ ID NO: 394726 - DNA, 728 bp, Homo sapiens
ggggctcaggggtccatcaaagcccatgtggcctgaggcgggcagcgctgcctgcacttttctggaagtcctctcctgaggctggcttttgctacttccaagtctcggatttcctcgtgtcgattcccttcagcggtaaggccctcctctcagtctagcacctggcagccagttctacccccagtgcaagcctgattcacgatgattttcactctgcagataaagctgtcagtgtggttggcagggcgccatctgcctggatgagcacacgacaggaaagctgggctctcggtcagtctcccctacaggggcagggtaaaaagagaggtgttctagggagtatttccaggtctgtcctcaaatgccccaagtcacaaggtcgcctcattgggcagccgtcactaacccaaacagtaagtgtcatctatatgtctgtttcccagagtgccccctgggtcacagaaaccacccgttttcttatgggatgtgcttcttatcctccttggttgggatagatgcgaatttacacagagcttaaccagctccagcatctttcctggcccccgtgtcacactctgttgcctgccagaatacctgatgcatggttttcctctaaaattgctacttttgtgcagagggtttcccacgcacccatgtgtgactttcagtgactaagaaaaaggccgtggtcctggggaagaaagtggatgctcactgagagattgtgt

SEQ ID NO: 394727 - DNA, 217 bp, Homo sapiens
acgtctacacctaccaaggtagtgctgtccctctgcaatttgaacctaatacccaccacgctgtgtttcatccagcaggcctgaccacggagttcaccatgtctgggtcattggcatgttgtgaaataaatacactcacggctccctaagaatatccaatatttagcaaatattttactttgatatgcttgatgttcttggtagcacacaggaactt

SEQ ID NO: 394728 - DNA, 434 bp, Homo sapiens
cctcccaaactgctgtgattacaggcatgagccactgcgcctggcctccatgctacttttatcattggtatttctgcacctagtctgtaagacagtcgtgttatgaaaaaagtcatctttggaccagagtagggagacctgaattcatttttttagtttatttgtttattataaaggatattatataggatacagatgaagagatgaatagggcaaattatgggggaaggggtatggagcttccatgccctccccaggtggccactgtccaggaacctccacctgtttatccatctggaagctcagagacccgaattctaagcctggctccagctttgtggccttgtcactctgagtgtctgtcccttttcctgctttattattcttcctggcattatataatgcatttgtttactatctggcttcccttctgg

SEQ ID NO: 394729 - DNA, 318 bp, Homo sapiens
acatggatctcagagcaccagagcaggaggggacgagacagggtccgagtcccacctctcaagacaagagcaacctgggcctcctgccacggagccccacacacccttttcatcaaagccttgtgacaggctgatgggcacccaaggacttgccgttttcaagaggacatagtgggatgggaggtcacctgcccacttggatgacaggtggtgagagaaccagccgggctgcgccaggttttctaacacatcctggagtcacatgcagacccagagccgtgctgccacccagccagggcagtcccccttggctctcca

SEQ ID NO: 394730 - DNA, 159 bp, Homo sapiens
aacaaaggcttgtgggtaggtgctgcttagcacaagattcctccagacagaaggggaagctgcatgcttgctgtgtttgctgtctggagcttcagggatggcttgccagtttacttctgtttctcacctgaggtttttggtatataagacggtatcttg

SEQ ID NO: 394731 - DNA, 251 bp, Homo sapiens
cttttttttttttttctttctgtagagacagggtcccccatgttgtccaggctggcctcaagcaatcctcctgccttggcccccaaagtgctgggatgacaggtgtaagccactgtgcccggcccaccattggtttctctctgtggcctgtttctttctatttttttttaatcttttacatgaaaaatatactttcaaaaaagctgcaataaaatccacataaaaaatttaccatgatcttgtttgaaagt

SEQ ID NO: 394732 - DNA, 498 bp, Homo sapiens
cttgtctctgccaattacccccctgagtccttgggtaagtaacatcacccctgtcagcctcagtttgtttgcctgcagtgtcagatggaatagcacccagactgtagcatacaagggagagcagcatgattgtggatgccccacaattccttggtgtgaggagagaaatatttgtaattgtcagaaacatgatatagctggcagaagtatatgaaatcagttacataaattgtgaactacatctcaaagttctattagttctgagacagggtgaaaatcagcgcatttctcatcaggatagaaaataaaaacagaaaaaatcaggagccattgggaataattcagcctcagagagagttcagtgccttcatcggtagtctttggggtgctcgtagaaccaccattgttcatctccacacttgctggctccatatcctttgatgtgtatgtacctttctgacccttttttagctgcttagtaggttagctggggttgac

SEQ ID NO: 394733 - DNA, 442 bp, Homo sapiens
gggcactgatgaccataaaatgaggctgtcaacagcttgctgctcccctgtgtagacagaccaggattaaatcggcttcaagacacccatccaagcgcgggtgcaataaaaggctctgaggatggagcccaggcgctgaactttggggtgcagttttaatttcgctggacaattcttgggcttctcttacagtgcacccaagattttacagacaaaaaaggctgcagagatcaaattccagcttcccccagttacttaaccactcagcctgggaatgttactaaacctctcaaggctcttccttcatctttaagtggcagtaacagctatgatggagaggatttggaaggggggaaagagaatgcatgaagagagcttagagcacataagaagtgctcagtaaacatcagttattgcctttttaccattcgtaactctagaa

SEQ ID NO: 394734 - DNA, 281 bp, Homo sapiens
cttcacacgtggctctcatgacacctccagggccactacccctggtttacagctgaggactcgaggcacagaagctgagcggctccccctggccccagagcagtgggtggaggagcctctgacccaaggacagagctgcatgaaatccaccttctgcatccacaaaatccagcaggatgtctggcgcaccagacgtgcttagttgctctcagttaatgaataaaaactttaaatttagcctgtttaaaatagtgttaagtggaccagaccctctagggtta

SEQ ID NO: 394735 - DNA, 776 bp, Homo sapiens
catggtggctcagcctcccaacatgctgggattacaggtgtgagccaccatgcccggctgtgttacactttttgtggtgtctcacaggtctctgaggctctgctcatttttgtttttgttttatttttttgagacagagtctctttctgtcactaggctggagtgcagtggcatgatctcggctcactgcaacccctgcctccccacttcaagtgattctcctgcctcagcctcctgagtagctgggattacaggcgtccaccaccacgcccagctaattttggtatttttaggagagatggggttggtcaagctgttctcgaactcctgaccttagaagatctgcctgcctctgactcccaaagtgctaggattacagatgttagccatcacgcgcgaatccagtgaattttatccaaccaagctctcatttctatatagaagcaatagccaatcatttaaaaatatctcaaataatatggttcctatgatcctttcccaaaaaagttgttagaaacaaaattcagtaagtacagtgacgaatgaagtaatgtgtcagaattattggtagtgatcattgaaattgatattaaaacgagtgtgtttttggctacaaaacaatataatatcacaaatctgaaaataaagaaatgttatactcacaaagactgaaaagagaaaagagaaagaatgttggagatggtgtaatacactgatttcttcaatacacttgttttttggaaaagtgtatccttaaaaactgacaagtataatta

SEQ ID NO: 394736 - DNA, 309 bp, Homo sapiens
gttctgatgggcagtgattttgaagtcttgatgggcttttaggtagactttccagtgactggctaatcattgttatatttgaataccccagaaaaggatgaaagctggtttagagtaaatcacatatagttttcatagatattaatattttttgataatgaatccaaataaggtcttgattatccaaaaacgatggtgagaacattgagatagctagttgaaatgagaatatactttctccctactgagtgaaagccttgttctggtgacagtttttcctattataggttctgatcaaggtggtggtag

SEQ ID NO: 394737 - DNA, 357 bp, Homo sapiens
ccaattatttttgatcactggttatttgaatccacagatgttgagggctcactgtagttaaattatccctagtattaagttacacagtattttgtgggaaacctttaacaaactatgcttgtttctgccagtgattagtaaaaaaaatattgttggccctgtttttcatcatttgtgcactttaaaaaaatagaagcttgaaaatgtgatttctgctagttatattttcgattagaaaattaaccatatgatcttagtggcaataagaatatgaccgtgataaaattgcacagtatattttaatcttactctgttcatatgtttagaagactaaacttgagactaattatatgatca

SEQ ID NO: 394738 - DNA, 275 bp, Homo sapiens
ctttgggattttaacaatgcatgtatggaataaacgaatatcacagctagaaggaaactcaagggctagccagtccaaaccctcaccttagatgagaaagctgaggttcagagacagagtggctcacccatggctgcagagcaagccaatggcttcagatacaaccaggctcatgttgccgcctcctcagtaccggacacacctgtgcctgcactttcaacacaggccaagccactgcatgggctgctcagtggtaagcgctgggcatcattttt

SEQ ID NO: 394739 - DNA, 319 bp, Homo sapiens
cttctaattctaaactcaagactccctgtattacacacaaataatagcagcattatctgatagggctgaaatattttgagactcagatttatggctcttaatctttatactacattcttgatttctgaaaatgtactataaaagtaacacatactcaatattcacataccattcccccaaaataaattttaatcaaagtcaggtacatctttcacacattctcagcatatataaacgaaactttattgttcatacttttaaaaatctattatatcgcatattctgttctacagcttagttttcaaacatttatagtgga

SEQ ID NO: 394740 - DNA, 440 bp, Homo sapiens
gaactgacgtccaaaaagggggaggaaaaaaaaagggaatcaggagggtgatcaaagtgcttaaaatggaacaactgtccataaaatgaacaacctccatgaaataaatttctgtaacattttggtcattttataaatttttttctgggtgggggtgctgaaaccatcaggcttctggctgcaatagtaaattacggaggagagtaaatccctactggttcgtctcttttacagttcacacccagaaattaattttaaaagatccaacccaaccccctatccaaagaatcagactcactcctgccctttgaaccttctgaaggttgaggaggaagacctccgtggccccaggtcaggcgctgcagcctctgaaggggagggcaagagcctctgaatgaccagattaagtgtgaatggaagaagaacctgtgattaagttt

SEQ ID NO: 394741 - DNA, 646 bp, Homo sapiens
accgaaagataacagagaaaagaatggaaagagagagaaggaaagagacacagagttaggacaaatacagggaaacaaggacagatacagcaacacatggcagtgaggtagtagcagatgtaaaggcacacaaagaaagaaaggccagtacaaggaaatatcagcatacagaaatagcccaccaagacatctcccagtcacactcacccacaagggatccccttacctgagctttcttgctcttgctcagtgcctaaagtgggggtgggtgggaagagagctaaagtgtacagagatggactgccttactaggatatggagacaattgtgccaagcgttttgtgggtgtagttgctcataatttaagacaaggttgaggctgcggtgcagtggcacaatcacggctcactgtgcgttttcagggaagaccccacgggcacctccaaaaccatgtggcatgacatcctcaccgagacccgagggcatctttccatggcctcaactctacttttatgtctttaggtttcctgatataggttttgcacactctcgatgaccaagtctcatttcagtgttgctgttgtttctatattataagcaggactgtctcttcccctacctttttaacctgccaattgtttgtgta

SEQ ID NO: 394742 - DNA, 224 bp, Homo sapiens
tacccactcatacttggagcttatggagttatttatccagaaattccttttacttcttgaaaatttcaaacaaccctctctcttcctccctccctgtaagcatgtttaaatggctatcttgagaactgccactttttgacatgattctgtctccccggctgcaaagagagcccttaccaggtttcccatcagaattcttcctcaggtcttgtctggctgcatct

SEQ ID NO: 394743 - DNA, 602 bp, Homo sapiens
acacgagttgattgctgcagctggtgatgggtatacatagagttcattgtactattctttctacatttgaatatttctgaaattttgcataataaaaagtaaaccaaaaaatcactttgagccaagtactcagttttaaagaggttaatagctaaagtagttgtgaaatactctgggtcagggttgctattaagatactggcattcagccaagtgcagtggctcatgcctgtaatcctagcactgtgggaggccaaggctggtggatcacttgaaaccaggagttcaaaaccagtctggccaacatgggtgagcaaaattatgtttcttaagccttattaccgatgcttgggtcaaattatttaggggctttttagttcctccttctggaatatccttgcccttttactgcctctacccccaatctctaagtgaattatagagcttcactgttgtccaagttggaactatacacaatggtatataaattttagtaacagaataagcatttctatagcttcctatgatttgcaacatattttcttttatattacttctctagagcctcacacagtccccctgggtaaagacaggtattgctat

SEQ ID NO: 394744 - DNA, 371 bp, Homo sapiens
ctataaagtgctttattttgccattagaatatattgctaaaattgcaaagatgtccagaatatgctaaactgccattggtcatgttttgttctgtctgtgtaggaattaagctaatagccattcatttcaagcaaatttctcccatccacacccaactttaaaatcccataggaaataggaactttgttattctcagagatcacatcttgatttcaaaaggtatcttataacctgacccttagaagcccactcatcccttacttaatacagctacatatttatagacagctgaggcccacagtatctgccctcccacctgccagccagcccacaactataaactgtgtgacacccaaatttatctacctca

SEQ ID NO: 394745 - DNA, 244 bp, Homo sapiens
tttcatggccggtgaagaggaggcttggcagtggcacccagtgggaaacagcagggcccctggaggggactataaatagccaggagggctagaacacagagtgagcagagggggagagggccgtgctggagaggaggcagggacttgctcctgagagcctcgtgagctgagccgagagccgtgcaggactcagtgaggatgggtgacctggcccatgatcctctgcaggctcttcaccggccat

SEQ ID NO: 394746 - DNA, 484 bp, Homo sapiens
cccctaatctgtgcatgaaatcaatctcactggtttttctgttctccctcaaaaacatatccggattctattggctcccttccatctctctgcccccatcctcatccaagcctccttatttcttgcctgggctattgcagctgctctccactactaactcatgctaccctgtctccatctgcagccagacaggtatttcttttgcgatgccaacctcactgtggaaccctctgcttatagcctctcctagcgtggcttacagagtccaacatgacctggcccggctgcgccccccacctcctctcattgtgctccagctagtccagggatcctgggactcagctgtgctaagcaggtccctgcctcagggctccaaaaggacactgtcctcttcccggtgcctcatgaactctcctcactcttgctggactcagaccatctgcctctttctcggttgagtcttccctgtcacaccctgacgtcc

SEQ ID NO: 394747 - DNA, 242 bp, Homo sapiens
gtgctgaagtgttccaacactccagccccactctggggttaagaatgacagatgatgcaatgtaaaaacatcattttccactggacacagagaacatggtacaatactttggaggttaaacagatgagaagggaacagtacagagacccaaacttagctcctccatgcctctagcacacacatatgcctcatggaaggcatctggagaggttagtgctagagaggccagaaatcttgtttct

SEQ ID NO: 394748 - DNA, 480 bp, Homo sapiens
aaggtttgccaactcatttgctcctcataacaaccctatgagatcggtaatattatcctccttttttaaagatgaggagatagaaacagagaggttagttaactttttgaaggtcccacagttagcatatggcaaagctagatttgaacccagacagactagtgcagcatctgtgctcttaagcagtagtttgtcttacagctcctttaggccttcctctagcccaacttacaccataaaagcaactccatttagtctacataaaacacttgccaagtctacagtgccttggagaagaagggagccatgacttcatcaacaaagtaccttttcctagtccctctagatccctgggaactcactggggaagagtccttttctctcagctttggacttcttccactttgacactcctttgagccagtctgtctgaagtggcagcaaagaagaagcagaggaaggcagcaggaagggcagagg

SEQ ID NO: 394749 - DNA, 364 bp, Homo sapiens
cctgggctcaagcagcccacctgctgcagcttcccaaagtgttgtgattacaggtgtgagccaatacccccagcccaatatgcttttttaaatctagaaaattagcaaggaaaacctgatgtttattcttccactagtaagagtgtaaattggaacaaactttttggaaggcaatctaataagattaatcgaaagccttaaaacatctataccttttggtgccagtggttcactttctagggagtctgtcccatgaaatcagagatgtgggaaaatatttcggggtggaaatgtttaactcaggattattatgacaattaaaagttgaaaagaacctaattgtctaccaatagatgagtagcca

SEQ ID NO: 394750 - DNA, 1075 bp, Homo sapiens
catattggccaggctggtcttgaactgctgacctcaggtgatccacctgccttagcctcccaaagtgctgggattacaggtgtgagccaccgcgcccggctttgtttttgtttttgtagagatggggtttcaccatgttgctcaggctagtctcgaactcccgggctcaggcaatcctccctcctcagcttcccaaagtgtttaggattccaggtgcgagttgccacgccctgcaggaaattttctatttaaaggacttctatggtgaatcattccatacagcatattagtatcatttctgtcaatctaggttttgagtcctggctctctctgtgctactatcagatagctgtatgatgttgaacaaatcacttctccgtttcttcagaagaaaatggaaaggggggttttgatgatatctggaatgactgataaggggcatctgaatcatctccaaccctgacattcggctttagtatgtctgaaagcagacctactgccacatttgggaatttccagagcagatgatctctaaggtctctttttaagtctgaaattgtcatttatgacatatttgggcttgctgaaattaagattcatctgtattgggaatcggcttctgttcttccctgccatattccttgtgaattgtgaattcccccacctcaaatacataacatctttatctgaagtcaccagtggtgctctaggaacacagctttgtttactttcaccaaagcatttcccatctgatatggtttggccgtgtctccacccaaatctcaccttgaattgtagctcccgtaattcccacgtattgtgggagggacccggtgggaggtaattgaatcataggggtggtttcccccatactattctcgtggtagtgaataaatctcacaagatctgatggctctataaggggaaaccccttttgctttgttttcattctgtctcttgcctgctgccatgtaagacgtgccttttgccttccaacatgattgtgaggcctccccagccatgtgtaactgtgagtccattaaacctctttttctttataatttactcagtctcg

SEQ ID NO: 394751 - DNA, 318 bp, Homo sapiens
cagagcaaagagaaagttcaatgatttcgagattaaccacatttgctttttaaaacaaatacgtattttgaaatttaatactaaatttataggagagtgatgcctcaactgtttaaatgttgtagaatttgttttttttaagtgttgtttcaaaggaaaaataattgcaaatattaaattgtgtcaattacctaaatcattcataaaggagtccatcgttgaggtggtctgtatgtaccagcttcagggcattaacttatatccacactgcagattttttgtgtgcatgtgaatttttttaggagttacttatggttt

SEQ ID NO: 394752 - DNA, 181 bp, Homo sapiens
aataagaattagtgctgttcattaaacctggggagctgataaacaggtttattcatttcattctgttcagttgtgctcacgtatttaccaaccattttgaaagcttaaggtagctgagtttgaagataatctttttgatgttactatatattggtatgcaagctgtggaagcagatctcca

SEQ ID NO: 394753 - DNA, 356 bp, Homo sapiens
agtttagaagtagaactgcaacccaggacccaagcagtttccaccaccgccctggaggccactgcctaaagagtatggtcaaagcatggccactttggtctacaacattcaagattcatgcaccggtcttccaactggaccagagattaattttcattagttaatttcattcttgcctagatattctgttgcttctcttactgttagtacacaactaggtcaaccagtatcccagaaggactgaggtggtgagaggcaaagtgcaaagtgaggtggacagcaacaggagcagtcattagagtatgtgtaaaaagcagaagttgcagaggctgggtcagcagattcatgtcatgagt

SEQ ID NO: 394754 - DNA, 442 bp, Homo sapiens
atagattagttgatagataatatagatggatggatagatagatatagctatatagagaaaaacagaggcacagatagatatagagagggatagatagagatagagagaggaatgggtagatatatatacagagaaatatacagggatggatagatggatggatgatgcatacataagattgatggataagatgactgacagataatagagacggatgcatggaaaaatagattggttgatagataatatatagatagagatagataaatggatagatggattagataaatagatgatatagatacctaatatagatggatacatagataagacagataatataggtgtatctatcaatggatagaggatgcattgataagatggctgggccgggcgcggtggctcacgccggtaatcccagcactttgggaggccaaggcgg

SEQ ID NO: 394755 - DNA, 370 bp, Homo sapiens
ggttgaggctgcagtgagtcatgatgacactactgcactctagcctgggtgacagagcgcggccttatataaaaaaaaaaaagccaaagaaatagttgtatggtgacaaggactctaatttctcaaacagagcatctgaaactacaaaaagtgtcaacattccctgagaagcaaaggaaagaaagtttgaagaacaaatttactttctctccccaaaccatgaacttgagagcaggaagaacttgagagctatgccagaacccagttcagtacccagatattgtaaaggtccgataaatatcggccaaatttgttaaaaattcattgaagaacaggccaggcacagtagttcacgcctgtaatcccagca

SEQ ID NO: 394756 - DNA, 295 bp, Homo sapiens
ggccctggtcttttgagaaccactgatctattccaacatcctacccaatatggtggctccctctacaggataccacatgggctacctggtccacgtgacaacattcacagagaccagtgctctcacccttttgtaagtcttgttccatttttagatggcttagttactagaaactgtattcctacattgagccaaatagtcaaagttctttggctccttggacttcacttacttagaccctaattttgtgctccagaactgacaaagaattccccctcctacaacagtctgtaaa

SEQ ID NO: 394757 - DNA, 188 bp, Homo sapiens
tatgccaggtgctagactgggtgctggtgcctagaccaggggtgggcaaactgtggcctctcatactgatttgataaaagctggtcttccccaagctgtgtcctgacttcccatgtttctcacctccctcggacacctcaccttcacctgtataatgtgacctccaagcccatgcctccaacccatga

SEQ ID NO: 394758 - DNA, 269 bp, Homo sapiens
agctggttcttccgtggtatagagtgaatctttcagtaggaagtgtttctaacaagttcccatgctgctgaagccaacacaaggcaagaagctttgaaatggctgatgtttaaattatgactccaatacatacatacatacacacacacacacacacctatatatatatatttagtagacttttttagagcagttttaagttcacagaaaaattgagtacaagctatagagatttcccatacactccctgcttccacacatgcacagcc

SEQ ID NO: 394759 - DNA, 483 bp, Homo sapiens
aacgtgatcacctgcactaggactggatgactgtgggcttttagtgtgaacacccacactaggactggacaactgtgggcttttagtgtgaacacccacactaggactggacgactgtgggctgttagtgtgaacacccacactaggactggccgactgtgggctgttagcgtgaacacccacactaggtctggatgactgtgggctgttacaccaacactaggattggaagactgtgggctgatagtgtgaacaccagcactaagactggacaactgtgggctgttaatgtgaacaccagtactaggactggatgactgtgggctgttagcgtgatcaccagcaccaggactggatgactgtgggctgttagcatgatcaccggcactaggagtggagggctgtgggctgttagcatgatcaccggcactaggactggaggactgtgggctgttagcatgatcaccggcactaggactggag

SEQ ID NO: 394760 - DNA, 112 bp, Homo sapiens
ggaggacctatagattgttgtgtcatgaaagccacaaaatggagaggttaaaggaggaaccacggaaggggtgtgatttttaactgtggtaaacacagcagaaagtttggta

SEQ ID NO: 394761 - DNA, 244 bp, Homo sapiens
ttagaaaatacttaattcatacagataaactttaccatttaaatggcctctggtgattcctttataagaatgaaccattagatagttaaccagtttactaatgacagacatttatattgctcccaagttgttgccattgttcatttatttatttctttagtattaattcctagataagttgctacatcaaaaataatgtacatttaatattgcaatagttacaaggaaatctgtacttttttca

SEQ ID NO: 394762 - DNA, 352 bp, Homo sapiens
tcttgacattcccatttctcttctttcatcgttaagttttctaaggggctccctacagtatactccataccatggcacttagccttttcccagctagaccatgacaactattatgtctctttttttttctcagcatatagcccaacatataacaaaaattaagtgctggatgttaccactgtacaaagggtacctctaagggagaaggacaggtaagtcaatgcaaggagttattaggatattcattacaaggaatcatgacagctgagactggtgaaatatagctgatatccctaaaagagtcataactctgcaagctaagagttaattacacaagaacgacaagccatac

SEQ ID NO: 394763 - DNA, 285 bp, Homo sapiens
cagcaacattgggagcatggtggccccggcactagggtaggaggtccaagaagttatctgcaaaacaaggagcacttctggagggccctaggcacctgcttagatatggggatgagcaagtgagtgagtgagcctggtgcccagaggcctggcaggtcagagatgaggtggctgagggccctgagggaagagaggggctgtgtgacagggtttgacggggcagaggtaccacctctgaaacccttcctgccagattgcgaaagaagcatgggggctgtaagaagg

SEQ ID NO: 394764 - DNA, 329 bp, Homo sapiens
gtgctgggattacaggcatgagccactgtgcctggcctaaactatacaaaattttaaatctatcccatgtcattgaacatttttctcaccctgttgcccaagctggagtgcagagatgtgatcacagctcactgcagcctctaccttttgaactcaagggctcctctggccttagcctcccaagtagctgggtctgcaggcatgtgctaccatgcctggctaattttgttgttgttgttggtagagatgggttctccctgtgttgaccaggctggtcataaacccctgtcctcaagcagtcctcaatcctcctaccttggcctcctcaa

SEQ ID NO: 394765 - DNA, 361 bp, Homo sapiens
gaggcgtgtatcgattggttggcgccgcgggcgcaggtgcgcgctttctattgggtgtgggcggaacgcgagggattgcggcatcttcgggggctgcaggtgagcgcgcgcacgcgccgcggctgtggtccgctcgggtgcgcgcgcgcgggctcgcgggggaggcggcagagggagaggttgcggcgcttgtggcctccgctccgccccctcctctcctccagcgctgtcgccgtcgccgccggggcccggagggagggagctgcttccccgcctgccgcgccaccagtccgaccctcggtcccgccgtgtgagcagctggtggagtggagctcagcgcggacgccggagctgcggccgc

SEQ ID NO: 394766 - DNA, 422 bp, Homo sapiens
acaactattataacaactcacttccttcgaagacaaagataattattctcgttttctctccatactatttttccctttcatcctctggtctccgaattcagtcaattctcttatcacgcacagaatgactgtttcctggtctcaaaaggtatatgaaaaaatagagatatatccatacaatggaatactcttcagcaataaaaagaagtgaactactgacactcaaaataactatacttttttttaagggggtaaaaataaatatactgaatggaagaaagtcaaacaaaaatagcttattctgtatggttccatttaaataaaattctagaaaatagcgaggcatggtggcacatgcctgtagtcccagctactgaagaggctgaggcaggaggattgcttaagccaagttctatattaca

SEQ ID NO: 394767 - DNA, 312 bp, Homo sapiens
aggctccggccacatgccagcagacaggggaaagatgtaatgtcacccgagatagtaaaaacaaatataaacctcgggggatatccacaagggagcctgtgcctttgctgctgcagaaatgcagagagccatgggcgcatgaataatattatggatgtttagaaaactatgtctatagcaaagtgaaagcccttcaggggccataggtctggcattacatatagaggcaactcccttttctccaatggttccgaggtctcttaacataagtaattggaggatgtgaaaaatgtacatatgaatttccattag

SEQ ID NO: 394768 - DNA, 272 bp, Homo sapiens
gagtgagctgctgttgaatgtaaaacagctgtgccatgtgcagatgatttcatcctatgagcttcctcactcactgtcagaggccaggctttataaagtattgtcaattgcttttactgttttacttattttttgtttttttgcattaggtacccactaaagtcacctgtcaaactacatcttgaagccaattgcagtcttgaaatcctgctttgtggtgcaggttctactgcatagaatgttatatgagttagctcctgctgctgatcaaa

SEQ ID NO: 394769 - DNA, 345 bp, Homo sapiens
gaacacttctacgtaacaggccctaagaacccaggccctcaacaggacacacgtgtgaatgcttggtcacaacgactgaccagaagaatcaattttccttcccaatcatcctttggcctgggtttggatatgacatacttctctaggctggggctaacaaggctgtgtgatgagtggacaaaatacacgtcacataaccatagtaagaaggtgaagactggagccttaaaaatcagccggcccaactgccagaagaccattatatttacggataaagaaagagaaacaaagtatttgtaactgtgagcgggactaagtgcctgtaacagtttttttctccctctt

SEQ ID NO: 394770 - DNA, 325 bp, Homo sapiens
gcagctcggacccgctcacggtagatttggagtgtgcgtgtgtgtgtgcgcgtgtgtatgtccttgaaaacaagatgatcaataacagcttatgctgaggaagtggaaaggttgatttggtcatttgtgaccaagtcacaacatgagaaccagaaactcagaatgtgtgcactaggatggatgttagaattcctccaatcccgatttatagttgaaaggggtcacttggggacgacgggcttagtttttggttaattggcctttttgatatcccctctagtacatgtgtaatgtagaatggggacgtttggtcactaactggctt

SEQ ID NO: 394771 - DNA, 345 bp, Homo sapiens
cagttcaatgtactttaaatcgcattttgatgagcttttctaatatctcactcattgtttatagagtgcagacagtaacattgactttttaacatctcatcctcatggagacagtgtagagtagtggtttgaatgcctaaactggaatgtcaatgttaccacagaggtcggtccctggaaacaatgacttaacctaaggtctttgtttcttcatttgaaaacaggcagaatacctatatgaagcgcttattgtgaggatttcacaaaataatacttagcatagtgcctagtagaggaggtaaataattaacgttaatttctttcacaaagtttatgttatggact

SEQ ID NO: 394772 - DNA, 653 bp, Homo sapiens
tctctacagtgatacctatgattaggaaactagagtatacatatttcaaaacatcatgttgtacatgataaatatatatttttttgtcacttaaaacataaaaataaataaaaaggaagctagggtatcagagttggaagggccttttgtgatcagtgtgtttacagtgcttgaatatacccagtggcatttctgacaagttgatttgtagcctggtcttgattcctttctgaaactcacaacctcctaaagtcgtccacataccacttgagtggttttggttgctaaaattctttcttactgtaggctaaaatctactcacaatttggccatatctatcaaaatttaaaatgcacaaaccctttgaccagcattctacctctgacaatttatcctacagatatagtccccatgggctcaaagacatgtgtacaaagatattcattgcagcaaagggctggaaataatttaaacgtttgaccggggactgatgaaataaattatggaatatctgtactatgagaaaccaagaggctgttaaaaaaattaaaccattctcatgcactgacagggaaaaatctaaaattcatgtcgatttgtgagaaagaaagactagctaaataatatgtagagaataattccatttatgtgat

SEQ ID NO: 394773 - DNA, 121 bp, Homo sapiens
caggctttctgaaaggacagtttgtgccctcgcctgacatacctatggacaggcgtggggccgtccttgtggtctttgttatgttgcagcctagcaaaaatgggagcactgggcagagcat

SEQ ID NO: 394774 - DNA, 219 bp, Homo sapiens
ccacaacgaagcagctgctgctggctcctctcccagagactggaagagaattgatgagaacaccggggacccagcagttccactcccaggcctaaatctaagagggggacagcaagtgcctgctcaatggccctgaggtttaaggtgatggagctgatctagatagaattgggggtgatggctgtataactgggaatacactaaaatccctgacttgta

SEQ ID NO: 394775 - DNA, 246 bp, Homo sapiens
cttgtgcacaggctccctctcccagatctcttttcccttcctgttctgcctctccttccctgggaccacactggcttctcactatgccttgaccatgccctgttcacagctaccatgggacctttcactgggcgctgcctctgactggggtgaatccttgcgctgcctggcattaccatccagatcttcatccccactcacttcttcagaggccttccctgtccccttgtctctaggacccatttc

SEQ ID NO: 394776 - DNA, 813 bp, Homo sapiens
attgcagctttcttttcttaggttagtgtccaggtagaaatgttcagcatgttatggactgaatatttgtgtctctccagaattcatatattacagtcttaaaccccaatgtgatggtattttgagatgaggcctttgggaggtaattaggtcatgaaggtgggtccttggtatgatgggactagtccccttatgagaagaggtaccagagagcttgatttgtccctctctgtgccatctgaggacacagcaaaaatgtggccacctgcaagtcaaagaagagagctctcatcaaaacctgaccatactggcagcctgatcatggtctttcggccttcagaagtgtgagaaagtaaattgatgttgtttaagccactcagcttatggcatttttttatggcagcccatgctgattaagattttgctaccaagaagtgggatgcctttgtaccaaatacctaaaaatgtggaaatggctttgtaactgttggtaatgggtagaggctgaaagaggtttttttgtttgtttctttgttttgttttgtttgagatggagtcttcactctcttgcccaggctggagtgcagtggcacaatcttggcccactgcaacgtccgcctcctggcttcaagtgatactcctccctgagcctcctgagtagctggaattacagacatgcgccaccatgcccggctaatttttatatttttaatagagacagggtttcgccatgttggccaggctggtcccaaagtcctgacctcaagtgatccacccgcctcggcctcccaaagttctgggattacaggcttg

SEQ ID NO: 394777 - DNA, 257 bp, Homo sapiens
atactgaacagctgccttactggagagaaatgttaggaattttttatttttactaaaaactgtcagaagtttctaaaaggaattagatgaatcctgaaggtcctgtaacttgaaaagttgatttacgctgaggaccccattttcatcaaggtatcaactagagagaaacttgtatttttcttattttgcattacaataatgcatcttgcttttcttttttatgaagtgttcactttatttttattactccaggtacc

SEQ ID NO: 394778 - DNA, 211 bp, Homo sapiens
tatgttgatttcttactatgtataaaatagaggaaattatccagcaaatacaaagatataagacaaacaagcttagagtctaacaatatggataaaacatattcaaagtactaaaaacaaagcaatatgtaacaagtgtcctaagagaggtatatctgaagaattaaagagtctcagctaggcatggttgctaatgcctgtaatcccagca

SEQ ID NO: 394779 - DNA, 608 bp, Homo sapiens
aatgtagtccttggtcttagcacccaaaaggtgaggagcacagaggttcactggtagtgcagggaatggagagggtccctcacacactgagtgacagaagaggttggctgtgtcactggtatgtaagggttgacactagcattagataggatttttcttaggattccatatccgggtagatcagaatctcttaacctagagcacactgtacccactttagagcagctatagatccctggaactatgtgaattttaggtgcttgcttagacaactctgagaggatgtggaagattccctatgaagaatatatggcacaaaagaaatcaagaacctctgatgtaccaaagggttattatgacagaagaagaaagatgcccatggccttcaaatgaacagcaacctgaaagcacttgtactgaagcgcttacaaatgacacttccaccacctgatctcaccaactatggatcctgctttgatgctgttttcaattttctttttttttttaatagtgtatttatttattcaagtacatattaaggctatgaagtggggatttggtatatgttgccaagattcagatctaatccatgtagttttaaaaaacaa

SEQ ID NO: 394780 - DNA, 351 bp, Homo sapiens
ctgtaggtgactctgaggatcccccatgttacctcctcagtataaagcagagaggagaggatacaacctaagatgatgaatgagtggtttgagtggatgaactctagtaagaaaggaaagaaaacatcttcaaactcatgtctagaaacaaaaggtggacacaatgatctttgcagggctttccaacctagctcttgagtagaattagggtcagcataaataacttagcaaatactattaattccccagcatgctgttttcccgaacctgtctttcataagcccagaagtgaaatgtttttgagagcatcctgcttgtgaacagattcctatttccgtgaggaggtaacat

SEQ ID NO: 394781 - DNA, 680 bp, Homo sapiens
tgcagggatggagaggaccaccgccgcagggttcttttacctgtgccaccagctctggagacatccacacccattcccaggtgtccttccaggcccattgtccacgtcttcaagggggctgcctggataggcgtgtgtgtgtgtagtgcccaggtgtggtggtggcatcctgaagcagtaggaccattagtgtgcgtgcacacccacgtggcacactgtgtggtgaccatggtcatcatagtgggctcacggcggaaacgggatcattcaacctatacaaaggggaccctggataggctgcaaggaaagaggccaagggccaagctgctaagccaaagatggcccctgacacctcccccagccccagcacaccagcctgcacctcttatcccgtgttaagtcctggttccccacctgctgcccctcctcaacacagagcccctcccgccgcctcagacccctgtgcacatccccagggcctcagccgtctcattggtctttattttttattttttttaagatggagtttcgctcttattgcccagactggagtgcagtgatgctatctcggctcactgcaacctttgcctcccaggttcaagtgattctcctgcctcagcctcccaagtagctgggattacaggcgtgcaccaccacgccgggctaaatttttttgtatt

SEQ ID NO: 394782 - DNA, 342 bp, Homo sapiens
ataacctttactttccataacaacctatttatcaaaatgcatcgattctggaatcggagtcggctgccaatgggctgtgtatgtcctcggcctgatgtgttcattaaaggagttttcttctgacagatacaatgtagcaatcaataaactcctattacctggatttatgagctgcttttgaatttggtgctatttcatgtctctgccttccactgtaactgaaaataaatcttccaatactcagatttgaattctctagagtgtaggtggagtgaggtgctgtggtccccagtcccccagcgagaacttgtctgtgggcctcggaggaagcactcctggccg

SEQ ID NO: 394783 - DNA, 1059 bp, Homo sapiens
atttggaagatcagagaggcctctgcccctacgaagggccatgcttgccaccagtcttcctgctgtgtggtgctcccatcgcacaggctgcttctggagatgctcgggttgttcaggccctgtggcttttggcaaggcaggagcatctgtgcttctgctgacataaaagagggtaataaaagtgacacaggaaagcggtgttgtgaggctttagtgatggtggagcagtgttgctgaagtccctcagggagtttggatttgattgcagtgagtctggctacatctgaagcctataatagtttacagtacaagatgctatgtataagatgtcaaacatttgcttggtagaatgctatgattgtcaggagtttacttttgcactgaaaatagtcttgttggtttggtgtaagtagagtcacattgcagcacacacacaggcattcatgcttttatgtttgttaattgtaaggaaatgttttctcaaggcaagagtcaaaggttagcagagtgccaaagaccttctcaaagaggaaagtctcattttagaaacttcattttgtacgccaaaacttgcctttcagtagtctcatgtaatgtttttgctgacatgagttgaaaagtgcattctgttgtaaaggaggaaaaaaactgaagaggaaccgtaagcgtgattatgaagaagagaaaagagcaggaagaaagtagacatcatcccagatttaaatttcatattgttaaaatcatttggttgcaagcagtagaaattttctataactaacttagataaacaaggacttgttggacacctgctgtccaacattcacaaaacctaaagaagaaaactgaactagatctagtgtggctagggatttcagggacaggaattaacaaatctcctgaggaggctgccatcaaaatgactgtgttaactgttgtccatcctggtgtattctactcacatttcagactcctgcgagaggctgattgacctggtttgaatctcgtgcctacccactcgtagtccctccagaccccagggggtgagcgaagggtgtttgc

SEQ ID NO: 394784 - DNA, 442 bp, Homo sapiens
ccccaaggaagtcaggctgttccctgtcctcaggtggtctccttgggcagctcccatgcccaggcactgagagacttctgggctgcactggcacagcattggcagctcaagttcagatttgggggaagaagagaaacttctggcagcccaccggtcagtccctcagggtggtctgtgcacaggatgagggcccactcataggtactggtagatcacgagcctgctgccttcggctctgtggcagcttgaaagccaaccagtatgacatgggagacagagatgagtttgagggtctgaaatgtgccctagttagaaggacagacacttgggagtcatctaagtctgctgtttcatgaatcacgatggccagactttcctcatttctcacgtcgctgcagatcttcccttttacccaggaacagtttagcttcaggactcctgg

SEQ ID NO: 394785 - DNA, 355 bp, Homo sapiens
tatatctctccgtctctgtcacactctcccaggtacctctgctccacagggaagcaacttcccagccctgatgaagtccctgactgtgcctttactattgatttccttagaatagaaaccagaaaccctcagagatactcatgtaaacatgtattctagctatcacgtgagttatctgagtgttttcttgtctgttatttttaaacttgccaaagaaaattttaaaatactatttctttggaaatcgaaattcaagaaaattggaataataataattaaaaaaaacctctttgggtaaattttacctgcgttcattggttttaacatgctgccacttctctctttctctctccct

SEQ ID NO: 394786 - DNA, 154 bp, Homo sapiens
aggaatgagggtgttcatctaggaagatttggcactgactatctcacaatccagggaattcttgctcaggtaagcatggcagccatctgttttgttgatggatatggttggcactttacccattacctgaactttgacatccctactgttgatt

SEQ ID NO: 394787 - DNA, 362 bp, Homo sapiens
gagtcctaggggctgctatggacgcttgagctctgcttccagccccaaatgagccttgttggaagtggggtaggaggaaagtgttgtctgtttgtaccagggcttccctgggagttctgagcttctcaggggaattccatcccaatctccagcttctttgcccactcacctgccctcctgtccaatgcctctggaaagtttcctagtgatggtaacttccagtgactaacctgtacctttgtagggtcactgggagtgagggaccctctaaaataccatctcctgcatgaaacatttcttgtttccctggttaaaaagagtatctcctgcaatcgcacttagcacttattgccctactctag

SEQ ID NO: 394788 - DNA, 571 bp, Homo sapiens
agtcaacaatcctcagatgatgcagaaaacccttgtgtgaaagttgataagaactttataaaggatagatcaagccaacataatctaaaaccactgaccaatcccagcaatactgaaagtgaaccaacctcatgatggtaactaatagaaagaatacagcacctcttataaacaatgctcaccaaaaaaaaaataccctctagaacgaatgttcagtttacaggaaattacaggggttaaaccaaaccacaaagatgtaatcagccaaacagaatgtgggaaattctacaggttaaataacagtttcttcatcaaataaagggcatgaaaagggtggagatttaagagaccatttagaaccgtatcttccaactgcaatatgaagactttatttgggtcctaatgtaaacgaacaaatggcaaagacattttagagacaggctaatctgaacatgttcttgctaccagatgccattaaggaattaatgttaatgttattcattgtgacaatggtatgacagttgtactatgaaaggaaagttcaagtgtgtcagagatacataccgaaata

SEQ ID NO: 394789 - DNA, 169 bp, Homo sapiens
cactatggattattagatggtaagttaactaacttctgaatgcttttaatttaatttttaaaaaacgatttaatacttggctggtcacagaccccatctattattgttactgaaaggttaattaacaacgtggctagctacttgtatgaccttgggcacaaaactttac

SEQ ID NO: 394790 - DNA, 325 bp, Homo sapiens
tgtttgctgaggaaaatagaggcgaggatagagcaggcaggggaagggaaataagacatggagataggaggttaaagcagttgggagtccatacacagcctacccaacttcctgagaactcttagagaggaaaaggcatccttaggcatccttcctgtgaagtttgcctattccgtgatcacgctgagaagatgggaactctgaagtttgcttcacaggaaggtaaaatccttaaagggaggcaccttgctgtgccactgttcagttttactataacatcaatctttttttagtttttattcccacctcaagaggctgagttgaa

SEQ ID NO: 394791 - DNA, 138 bp, Homo sapiens
gtgtttggcgtgtgtccaggcaacaactagatatgttttcaggagttaattagagaggcagataattttgcaggaacagacagggttccagtgttagaatatctaaacattttgtcagaaatagggagccaccaaaag

SEQ ID NO: 394792 - DNA, 320 bp, Homo sapiens
caaaatgaaggaagtggcattgggttactactattaactaaactccagactttacttgggtgtcgctagttttttccttaatgtcctctttctgttccaggatccaactcagggtactcaattgcatttagttgttatgtctttacagtctcctgtggtttgaagcaattggtcagtcttttcttgcttttcatgaccttgagagtcttgaggagaactagcccagtatcctattgaaggttcccccgtctgggtttgcctgttgctttcatcatgaataaacttgggttatggatttttgttaagaatgccatagaggc

SEQ ID NO: 394793 - DNA, 404 bp, Homo sapiens
gttctgaaaacagccagttacttcccaagagttgcacagagaagcctgcacacttccatctggatatttagttaccctcttggaaacagtctccactccacccatcacattctacctccaaggactggaacacagacttattcccacctccccgcttctgggctcttggctggccccaggtctctgacaatcctcccttggggccagaggtactcaaggatgccaagagggatattgagttcacacacacacacacacaaggtgcaaaaaaaccccttgggtattggcctaaccaataaacacttttctttggttaatcattgctattatcaaaaaatcttaatataaaaatctaggctatacaaagaaaattactcaaatacaaatgttgttcacattgtaaa

SEQ ID NO: 394794 - DNA, 317 bp, Homo sapiens
ttggccaagtggagcagttgacagtggggagaagccttgagtgaaagcacagttcttctagtgaagaaggaggcaggaaacgtgttggcagtaggcaactaaccacgtttaccatggactgtaggtaggaagatgttggaaagagggccagcatggctagatagtatcaagacaatacatcagaaagcgacatgcaagaagtaacctagtgccagaacaaagagagactgattagaaagtttggattttaacccaagagcagtagggagggttttgaacagtgttgtgatctgatctgatttacgttcgagtattat

SEQ ID NO: 394795 - DNA, 187 bp, Homo sapiens
cacccgatagcccgacagataacatttagcttagaaaagagctgctattggacttgggtagcagtaagagacaaccactttttttatcagaagataaaagatgataaataataagtcataataatcaataatggtttgtgcatttcatgtaaatctatttttttattttataatttttaaacagtgt

SEQ ID NO: 394796 - DNA, 594 bp, Homo sapiens
atgtgtctttatagcagcatgatttaatccttagggtatatacccagtaatgggatggctgggtcaaatggtatttctagttctagatccctaaggaatcaccacactgacttctacaatggttgaactagtttacagtcccaccaacagtgtaaaagtgttcctatttctccacatcctctccagcacctgttgtttcctgactttttactgattgccattctaactggtatgagatggtatctcattgtggttttgatttgcatttctctgatggccagtgatgatgagcattttttcatgtgatttttaaaggttacctacttgggtcataaatattctagccggaggagcaccattcccaatctgcagttagctatgcccttgcaacatcactttcttcacttcaaaggaggctagaggaagggtgactttggtgggtgagactttgcaatgcctgcaatgtcaccttgcactgcgtggttttgaatagcccgtgtaatgtaatgattagcattctcaggatggtccctgctgctccctcagttgtcctcatcgctgcggtgtgcttagcagcaaagccagcactttcag

SEQ ID NO: 394797 - DNA, 116 bp, Homo sapiens
cagcttcagcctcccaaattgttgggattacaggcatgggctcccgaacccagacagaatattctcttagtgaggcccaaaggcacaaatttgtttacctctagagcataattctg

SEQ ID NO: 394798 - DNA, 487 bp, Homo sapiens
tgggagcctaaatgtctagttgagctctagcccctggtggtgatatagcttggcgcgtagttagtgcttggctcatgtcggctgttagtaaagactctcaagctctgcattggcttccctccgagggctctgcctggatccatcagcagcacttactctctctgagttgacaacacagatggcacttactccagagctgtttggcaggattccaggctatcgccacgttcttgagaaggtatcactggcttgggggaggggaaaagagaggacgatctaggcaaaagcaagatcaaggccctctccaagaattttccagcctggcaggccctgttaggtggcatggtaccgctgtgtgagtgggagcgccacctggagatggccacgatagggtctctgttcccacgagtatcattaacacgtctctctatgaatctgggtgataaccaattaccttggggtttttttttgacactaagacaccaac

SEQ ID NO: 394799 - DNA, 117 bp, Homo sapiens
gaactgaggtgttgtagaagttttctgagattttgcacctatgctagtccttaaattgaggtgtctataaagactgtatctagataaacacacaacaaagtagctgaaagcagttgt

SEQ ID NO: 394800 - DNA, 741 bp, Homo sapiens
gtcccagctacttgggaggctgaggcaggagaatggcatgaacttgggaggcggagcttgcaatgagccgagatcccgccactgcgctccagcctgagaaacagagcgagactccgtctcaaaaaaaacaaaaaaaaagaaaagaaatgagactcgtggctgcctagggcaggaacagggaaaaatgaatgcaataggatacaagatactttgagggagacggatacaatctgtatcttgattggggtagtagttatcaggtatacatctttgtcaaaacactaggatcatacatttaaaatatgtacattttatcatacgtaaaccacatctcaataaagtagaaaaaaaattaaaataacaagtatgcaaagatagtatctcaatttttattatttttataatagtgattaactcaaaaatgtccatcaacaaggaaattataagtccaatatagatgatattcctaatcacattaggcataatatgatctcatttttattaatacataatatgattccaatttacatgcacatgctcacagaaacaagtgtagaagataagttatggttctggatgatagacttcagaagatttaatgcctttttagccatttaaaaataatgaacgtggctgggcgcggtggctcatgcctgtaatcccagcactttggaaggccgaggtgagtggatcacctgaggtcaggggttcaagaccagcctgaccaacatggcaaaacct

SEQ ID NO: 394801 - DNA, 262 bp, Homo sapiens
atggccacaaaccatgaaacactggcagccaccaagagctgtaaaaggcaaggaatagctgctgccctggagcctccaggaatagcacagccgctcgacaccttgattttggctcaataaaactaatgttgaactgctagcctccagaaatatgataaaataaatttctgttgttataaaccaccaagcttgtggtgattcctcacggtatcctctaagaaatgatacaaccatcccaaatgtgcaccgcgcacccgttatg

SEQ ID NO: 394802 - DNA, 277 bp, Homo sapiens
  misc_feature (221)..(221): n is a, c, g, or t
tatagtgctaatcatgtttctaggcaggtgcagatggcaagggcagtgtcttggtgagctttttagcacgaagagccaggtctgtcgaagcctttgtgagagctggaaacgcaggtgtgctgggcatgcgcagtatggggtttcgggctcagggcttgccctttggcatcagacagacctggcttcgcatcctggatttgcttctgacgtgcacccttccnctttgggtctcgtgatgtgaaatggagatgttgtcatttgtgagggctccatgaag

SEQ ID NO: 394803 - DNA, 431 bp, Homo sapiens
gggtgcgtgggcagcagtccttccctggcctgtctgtgtttccactgttgctctccagccagttagcggctttcggctcctcccgccaccactgtggggagatacttggctgcacccctccttccaatgcacatctggcagaactgccctggggcctctgccttagatgacctggcccaccctggttcttgatctgatcttcctctcaattccctgcctctggagcctgtgaactcccagtcaagttagacttgcagttatgactgtgaatatgtattttggaagaagaggctgtagcttaattcaatttctcaaagggatctgggacccaagaaggctgaggaagtgatccctgagatccaaagctccttcaaagcgtcaggctctgtcctgccctccaactcaggccccagaaacccatcacgtctgcc

SEQ ID NO: 394804 - DNA, 528 bp, Homo sapiens
agaaggatcccttgctcccaggagattgaggctgcagtgagctaagatagcaccactgcactccagcatgggcaacagagttaagaccctgtctcgagaaaaaaaaagtaatttaaatttttaaaaatattgaaaaaaattatgataaagaaaatcgatttcatggttaaaatggtgaattttgtattgtatatattgccacggttaaaaaaaataaaagaaaaagaaacaaaacacatgtgggccaaataaaaaaacctatgtctagattagagtcaggtgcggtctccttatggtcagtgtctgctttcgtactaagggctcgtattgtccttctttccaatgctaatgcctatctctccccattgctaaaatttgcttaactcttggactccagaccaaggcctgagaccttgaaatctgccacagaactatggctatgttttagaagatctgagaacggtctggtcctggattttgctaaattgtcaaatgccttacttccttctgttgcatagaaaatatctg

SEQ ID NO: 394805 - DNA, 160 bp, Homo sapiens
tcatgaatattcataacatgttcctatatcctattgaatgtgtatgttctgcctccccacttagcataaataactacttcttctttctctcatttgaatcatggctttacattcaaggttggaggctcgctttccacctgcaggacataccccccttaga

SEQ ID NO: 394806 - DNA, 521 bp, Homo sapiens
ttactgctgttcaatctgggtaagtctttaactaccctgggctttggtttcccagcgagaaatgaggataataataccgtattacattccaaaagctagaataaagtaattgctgtgaaggctctaaacaaatataagtgaccgcttatatctggatccctcttgggtttaaacaatttctgtaatagttggccaggactgcggtgatggatttgaattcatcactgtcataataactcacttcaataggtcttaaccacatcatcatcatcttttttttttttttggagacaaagtcttgctctgtcgccaggctagagtgcagtggcacgatcttggctcactacaacctccacctcctgtgttcaagcaattctcctgcctcagcctcctaagtagctgggaatacaggcgtgtgccaccacgcccagctaattttttgtatttttagtagagatggggtttcaccatgttgcctaggatggtctcgatctcttgacctcgtgatctgcccgcctcag

SEQ ID NO: 394807 - DNA, 342 bp, Homo sapiens
ccagtacttacatttttctcataccacctcttagagcccctgaaagtgtagactccactatggagaagcaacacaaatgtgaaatactagcttgcgagccacgtgggtagctctttcctcttcaggaaaggggaatgctagtgtctagaagtgggagagattgaaatgattctgtaatgaggaaataagttacgttagggcacatatataaagaaacagcagaaaaaatgtaaaatctcaatcactctgtagccatgacatttataaaaatgaaaattttacaagagtatttctaaatgctttgaagttggcccccaaaaagcctgcctaccttcactttga

SEQ ID NO: 394808 - DNA, 250 bp, Homo sapiens
gatatacatgtgtttgtcataggaatcatcttttgtaccaggtggtttctgtgctctgagagtgggtacaaggtgataccatatgtgtttactgggctatgagtcctaaccaggtggcttcagcccaggaaagagatggagtagccaactgagactgctgctgggggtcttcaggaagttgcctgtagctaagtaaaaaatatgtcctatggtttttcctagaaaatgttgtatggtatggtcagctgag

SEQ ID NO: 394809 - DNA, 347 bp, Homo sapiens
gtcagcaccaccaccaggaggcagctcagatcctgggctatggggccttcaaaactgcatccaagcccttcacctccagtcggggacccttcacctccagctggggacccttcatctccagctggggaccctgaggccagacaggggcaatgacttgtgcaagggcaaacaaacagtctgtgacttcttttatgccagtgtgatgccaagataggagtgacgctgtagccacctcgcccagcccataagcatttttaataactgaataacagccagataacaccacccatgtatcattagggtcttgggaatcactgagacccaagatcccatcctgcttatctcct

SEQ ID NO: 394810 - DNA, 195 bp, Homo sapiens
ggagttattcctcctctatgtccaaaagtgacatagaaacaaaatttggtaggaaaatcaagaaatcttaattgaataatttttaaacagtttattatacaaaattataaagcataactttacagttatgctttattcaattcaactgagatgcatccttcaatatccactacatggtttggaacatgttaagct

SEQ ID NO: 394811 - DNA, 332 bp, Homo sapiens
cagacggcacctgagacgatgactcctcttctattagctactaatcactcaattttagttatgtgctgctgaagcaaacatgctactaatcatccagatacattgttttattgagtttatgcttatttcttccaagtatatcaagaagtcccaggaagactatgaaaacatttacatccccatgttggagacatgtgggtttcaatatttcatggtttctctggaatattggaaaccaccaatatttcgtggtttctctggaaaagaaaggaggtatgtgaaattaaggaatggcatggtgagttctaacaaactcaaaaccaatctaaatc

SEQ ID NO: 394812 - DNA, 317 bp, Homo sapiens
catggatttatggggaggagtgtctgtagctaatgttgctcagttacgacttttattatgcaaaaaaccccaacaaaaccttactattagctgcattttatgctgagccctttttctggaaaatgaatgcaacactgaaactctggctttagagttatatgtcaactgcataccatttgaaaatcccagccttactgataccactgaattttgagaaatatcaaatcttcctcaaagtgataacaggagactgcttcttttttatttttgaaaggctgtttctagtctaatctcattccattttgaccttatctttg

SEQ ID NO: 394813 - DNA, 443 bp, Homo sapiens
aggcattttggaaagtacagctagtaaaaatgtaaaaagaaagctattgctccaagttcattgtaggcacagcagaagttactaaagtattccgatatctaaagaaacaaaatttttaaggataataagtaacttccatccctgaccattccaatttatttcagctcagatccattccatgtgttttaatttagttcagttccgtttattagttactgagccccactagatcaagtgcactcaacatagtttgatggggaaatgcaagatgattcagataggggttttgccctcagtccagctgggagagccttgcatgtctacacaagacctgatggctctcccatgaaacatgccaaaaatgaagtatgaacacattatgtgtaagctattagtttgcccctccagccactataatcacattagctactttctcagacagt

SEQ ID NO: 394814 - DNA, 596 bp, Homo sapiens
tcaaaacctctgggatacagcaaaagtagtgctaagtggaaagttcatagcattaaatgcctatatcaaaaagtctgaaagagcacaaatagacaatctaaggccatacctcacagaactggagaaacaagaaccacccaaacccaaacccagcagaagaaaagaaataatgaagatcagagcagaactaaatgaaattgaaaccaaaaaaaaaaaaaggaaagataaatgaaacaaaaagctgctgctttgaaaaggtaaataacactgatagaccattagcaagattaaccaagaagagacaagatccaaataagctcaattagaaatgaaatgggagatattacaaatgatactacagaaatacaaaagattatccaaggctaatgtgaacacctttacgcacataaactagaaaacctagaggagatggataaactcctggaaatatccaaccctcctagattaaactaggaaggtatagaatctctgaacagaccattaacaagcagcaagattgaaatgataattttaaaaattgccagcaaataaaaagtccaggactggatagattcacagctgaattctatcaaaca

SEQ ID NO: 394815 - DNA, 887 bp, Homo sapiens
  misc_feature (735)..(735): n is a, c, g, or t
  misc_feature (780)..(780): n is a, c, g, or t
  misc_feature (842)..(842): n is a, c, g, or t
  misc_feature (862)..(862): n is a, c, g, or t
tcaggagttgtgtcccagccctcagtttatcgttggtggagccacgcgcacagacatttgtcagggtggtctagaaacgagatggatgagaattggcctggtgggcttcagaagcaactaggaggaactctgaaataatctgaacaagtttcttcagctgtgaagagtttgcttgcttttttttctttttctttttccttttcctctccactgaaaacttagaaggtgactgctggcttctggctgccattgcctccctgaccctgaatgaagagctgctttaccgggtggtccccagggaccaggacttccaggagaactatgcgggaatctttcactttcagttctggcagtacggagagtgggtggaggtggtcattgacgacaggctgcccaccatgaatggacagctgctcttcctacactcggaacaaggcaatgaattctggagtgccctgctggagaaagcctatgccaagcttaatggttgttatgaggctctcgctggaggttccacagtggaggggtttgaggatttcacaggtggcatctctgagttttatgacctgaagaaaccaccagccaatctatatcagatcatccggaaggccctctgtgcggggtctctgctgggctgctccattgatgtctccagtgcagccgaagccgagccatcaccaccagacgctggtaagagtcatgcgtactctgtcactggagtcgaagaggtgaatntccagggccatccagagaagctgatcagactcaggaatacatggnggtgaagtggaagtgtccgggagcctggaccgatgatgcaccaaagtggattccatagaccnccggccggaaggagaacctnacaagaaagttgagggatggagatt

SEQ ID NO: 394816 - DNA, 199 bp, Homo sapiens
taagagggttaggcctctggccccaagctgcctggagaactaggcagcctgccttgaatagctcacagactggcctctgtgttatgttcctgggactgctcttgaacagcttcttttcctcttagggataattgttacttcctcctgctgtgcgactccccttttagcagccttttcctcttactactcactgtttctt

SEQ ID NO: 394817 - DNA, 345 bp, Homo sapiens
gtgactctaaggatccctcagagggtaggtacactgttggggctgatctctaatgctagtaatcgaattaggtaaacaacaaagagttttttagtggaagtatatcccacgcaatagttttatttgctaaatctagtgactctagttgtatgcttattgttttattttgtcatgcttttttgtcattttgttttttattggcagaggtatgaaaagggtaaggaaggaatgaagagaaggagttattttgtatcctgtttttgatctggggttgaccgtttctgtcttcttatatagagatgtcataccaaggtttgaaggtcctttctatgaaatcttccaact

SEQ ID NO: 394818 - DNA, 261 bp, Homo sapiens
tccaacttgtgattctctgttttcatggatgtatatgaagacaatattttgtccgtggtgagaggccataatttttaagaagttaatatttgtttttttgcctcctactgagttctggcagagtccaggtgaaggagtgtccagcagagagaatgactgaatcacagaggctggctttctgttttacacgtggattgtccgaaaatggatttgatttctttcagttcattctgagaacaatgtatttgtgggataaaacca

SEQ ID NO: 394819 - DNA, 330 bp, Homo sapiens
cgtaaggaaccaagatgccatctgatggtcaatgcatttgaagtgggcctagaaaatctgcagaaagactaggttgtattttgtaaactaaagctattactgagaatgttcagctcaaaaatcacctgacaaattcatggaaaggatgtcataaataacataaaatgtgttccctggcttaaaataaaaagcacatcaacaatcatgctgatgtacaaactgtctgctccctctgttttgtgtgttttaccaggaaacaaaatgactagaaggcacccatgttaatggcaaaactaccaatagtcatttgcttgaactgttttatgatag

SEQ ID NO: 394820 - DNA, 415 bp, Homo sapiens
taactttttcccaaggcctgtgaccattgaagatgataaatgggaaaagagccgggcacacctcacacatcaaagcagtgcaatatgctgtagctgcccagccacacacctcggagtcgttttacaggagtgagcaaatacttctcttgctgaagtgaacaaggtgactggctaaaataagcctagtcatctgtaactgaggcataacacaagtttattcttagcatcccctttgcactcccagtcactggaaaagaaaggactcagaccaaggacccgtgaactttccaatacatttgaccccagtgaaccctgtgtttctcgtgactggccctgtactaaagacctcagtgttcttggtctccatttaggcaaggtcagaccagagatttagtcagaattggtttaaactatt

SEQ ID NO: 394821 - DNA, 426 bp, Homo sapiens
gatcacatggaactctcagtcatcaatcagggatatcagtcatgttaggtgaagtgccacttccatcttgaatgatactgaatttccatcttcacctggttgacatttgggtcattctttgtcatggggcgtcggccatgtgcatcctcaggcatttactggcatagctggtctccccacagatgctcccagttgtgacaaccaaaaatgtccccagacattaccagatgtcccctggggggtaaaatgccccggttgagaaattctactctccatttttattacagttatttctgttttttattgttgttattgtaaatggactctttaatattatatttttaagtggttaattttttatataggaaaacttgatttttatgttgcttttgtaattgactacctcattaaattctcctgttgtgt

SEQ ID NO: 394822 - DNA, 149 bp, Homo sapiens
ttcctaccaccaatgcatgaaagttctaatttcttcacatctgtgccaatatttgttatcatctgtctattttgatcacagtcaacctagtggcataaaggggcacctcattatggttttaatttgcattcccctggtgactaacgatg

SEQ ID NO: 394823 - DNA, 418 bp, Homo sapiens
tagtttctttcatatgtttccctagaggttttgctacttgttgatgagtgcttcaacttacacatttatgatgatgtgggagtatagccactatctcctgtttcttcaagcaatatctctattcctgctagataccttttcagtggagcaaagtgacaaggtattatggcattttgaaatggtgatttttaagaaaataaatgtatttatagcattgtatcttaaaacctctcttttcttcatccatacactcatatgggaaccccgatgcatacaatatttaagttatttggacagagagaagttaatataaattgttaaccaagtataaagtcattaacttgctaaacgaaagggtgatatgagcctgaaagtttcatagagatcgcaactgcagaaagcagttaactgctaggga

SEQ ID NO: 394824 - DNA, 331 bp, Homo sapiens
tagtttctttcatatgtttccctagaggttttgctacttgttgatgagtgcttcaacttacacatttatgatgatgtgggagtatagccactatctcctgtttcttcaagcaatatctctattcctgctagataccttttcagtggagcaaatgctgggattacaggcttgagccactgtgctcggccattcttatgattactttttaaattgttaattttttaacacctcacttctttgttcatatgatttttcctccacagctgaatgtgaagaaaggaagttttgtagctaaaataataaaagtgattaatttttacttggtgtgtac

SEQ ID NO: 394825 - DNA, 324 bp, Homo sapiens
aaagtacaattcaagatgagatttgggtggggacacagagccaaacaatatcaggaggcttcaggaaatttacaattatggcaaaaggtgaaggggaagcaagcacgtctttcatggcattaggaggaaaaagagggggagaaatgatacacgtttaaacaagcatgtcttgggagaaatctatcagaagacagcactagggggatggtgctaaaccataagaacaacctcagttattgaatcacctcccacaaggccctacttccaacattagatattacaatttaacatgagatttgggtggggacacagagccaaattata

SEQ ID NO: 394826 - DNA, 513 bp, Homo sapiens
tgaaagaaaaatgctttacaaaaaaccctcaggtttaaattatttacataaagttatgtattattattaacaagttatatgttattaagttatgtgcatacaaaaaatgctcaaatcttaaagacagctcaatgaatttttacatatgtatacacccatgaaaccacaacctaggtcaaaaaaacaacatttcaattaccccagaaggttccttcatgctacttctcagctaatacttcctctgccagtgaaatccttattctgacttctgtcaccatagattagttttgctggttcttgaattttgtacctttttgtgtctgtcttcttttactcaacaaatgctgtgagattcattcatgctgtcattatgtcagtagtttgttcatttttattactgtgtagtattctatgatatgtacaaactataatttattcattcacctatcgataaacaaggggattgtttctagtttttagcaataatgaataaagctatgaatgttcttgtat

SEQ ID NO: 394827 - DNA, 503 bp, Homo sapiens
acaggtcctttgtccaaagctccttgaggaggatgacatttagatgtattctctgtaattgataggccatccccaactggcgatggactcatatttttaaaaaaagacagctgaggattccatcagcattttgaagtaagctacctccaccaaagcccagctaacttcaaacctgcaataataacaatcggttaataatagtcataatttcactttagctctatattatgatgtattgttctaaaaagactttctcgcaaaaccaagaagagagcatttccaaatgtacaaagtattgtaaaagtacaaacggaaattatttctgtattgttatcatttccacctgatccgtatgagctcacagtgaagagggcagggcaaatctgattccattttacaactgagaagacgagccatttcatcagagtggtggtttccatgtcaaatgtacatagaggtattttgggaacacagcagggggcatctgatctggcgggggcatc

SEQ ID NO: 394828 - DNA, 159 bp, Homo sapiens
aaggagatgatacattaagaccagggttttcctagatgattctgaattattttaggtgacataagacaaaagcattaaataacatagaatcacagtgagcgagttatttccttttcaatcctcaatccaattcagttgattcagtccaggaaaagtctt

SEQ ID NO: 394829 - DNA, 355 bp, Homo sapiens
cgagatggggagagggatggaagaggcagctccgggcagctgcacagggccagctgcttccagctcttagcaggacaactggagcaggccctcgggccagcgtgagtcattgcacagggtggggcccctgggtaggcagtggtcctgagagccagacctcctggctatgaggttgtgggagggtatttcaccttcctgagcctgtgtctcaggctcaagatggttagtataaggctgaaattccaagagcattaaccagacacctactatgtgtatatcttgtgtaggggttaggagatactgccgttggctgagacacacagcccacatccttggtaggtccctcagagagcat

SEQ ID NO: 394830 - DNA, 384 bp, Homo sapiens
gaaggtctttgctcaggaggtcctgaacagatggcagagctggaagtttccatcctctcaggccgaatgggcaggttgctttcagggatagggtgcaggcaggctggggccacctgaatagtcaaagccctctgcttcagccaccttcagccaagggagcctgggctggggctgataaacacagccaaaggcatatccggtatgaatttcagcagcccctcctactaagacgccaaagcacgcaggtttgtggtgggaagccctggggagtggagaggaagagcttgggagaacatgtgggaaattgagccagccaagagaaatgaaaaacacattggctggtgtgaagggaagaggatgcagagacacaatccataactttaa

SEQ ID NO: 394831 - DNA, 177 bp, Homo sapiens
ctagcagagaacgctttcctaaattcagagaaaacaaaaaaccttccttgagcggggttggctggccttctaccacaacacgtgaagaaagctgtaggtggccagatttctcgagaataaatgggactaagaaaacttccactgggatttgatcagcacttgacctgccaccctagc

SEQ ID NO: 394832 - DNA, 344 bp, Homo sapiens
atgtccctagcgggctagcggggcgggatggtggaggttcgctgggctaggcaggcagtctgtcacttgtgcacttggacacccagttgctcctctctgtgggtgtgctgcttggctttgtgcctcaacctccaactctcatcttgatttctgcagctagagcagcactctcccactactgctgtggctgagggccctggtatcttcatttcttcagagggtttcaggagagagtttttgacatcagggagctctactaacttgcccagtaacacgtttgcagcactatattccagtagtggagtgcatgaatccagcatggtagcaagtctgcttggtggttg

SEQ ID NO: 394833 - DNA, 464 bp, Homo sapiens
cgaagtctttcactctataattggtacatatctttatactagaaaatttcttgaatgaatatgattgccttggcaaatataatcagttatgacttttttccccatagattttgtgggttttattattttttttctctgatgaaactctgagacattgccaaatgttgcagaaaatagaagtcagagtgccaaaataattctctggagctctcaggactttgggtgaccttgaaggaattcaatcctctcatacatagaaaccttgaagataatgaaggaaattcaccttatcacaggggaattaaaaccacatcttttctagcagataaatgcttccaagaatactagaaccccaaattttggctatttcagggggaagtatcatgtatttcacttgaaatgtgtagtagtttaatatatgtctataaagaaaggagcagtagcagctgttttaatgatcatcc

SEQ ID NO: 394834 - DNA, 276 bp, Homo sapiens
atagcatttattctgcactccttatgattgctgaatcaaagaaagactgttctggtgaagttaaaactgcatatgcacattcgtgtgtgtgtgcgtgggtgggtgggtgtctgtgtgtctgtgtgtccgtgtatagttcgcacttgtttagaagatagaatggggccgggcgcggtggctcacgcctgcaatcccagcactttgggggccgaggcaggcggatcacgaggtcaggagctcaagaccatcctggctaacacggtgaaaccccgtctc

SEQ ID NO: 394835 - DNA, 339 bp, Homo sapiens
aagctaccatgaacacctttacacacataaactagtggagatggataaattcctggaaatatatgaccctcgtagattaaaccaggaggatataaaatctctgaacagaccaataataagcagcaagcttgaaatgataatttaaaaactgtcaacaaaaaaagtttaggaccagatggattcacaactgaattctatcagacattcaaagaagaattggtcccaatcctgttgacactattctgaaagatagagaaagagggaatcctccttaaatcattctatgaagccagtatcaccctgataccaaaaccagggaaagacataacaaaagaaaac

SEQ ID NO: 394836 - DNA, 564 bp, Homo sapiens
caggacgggttgcagaggcctgggggcccctctgtttttcttagtctgtccttggttccagtgcttcgcgagaaaatccaacatggaggccagagcaaggccccctccctgctgtgtgcgggcagctccggctttggggttgggaatcaaaaccagggcccacgtgtacgtcgggagccatctgcgctccaccctgaccaggacggagccgcactcgggcgtctgggggaaagcccacggcgcggctttcttgcacgaagttgggtttgccgtgtaagcctccccatgcgaatgctcagaagaacacaggtgtcacatggccttgggaccaaccctgatctgcagcgtgggcctgttgtggtctgagtgagggtcctggcttttccttctgcttgggcagccttccgagggtcttgcaagaggagatggcgtggcagctggctcagcctcccctcccccagcccggagtgcaggcaggagggggtgtggcgggggaagtgttcggctagggggtgaaggcccgggcaagctcacccttcagtgttgatttaaagggatggggaa

SEQ ID NO: 394837 - DNA, 2368 bp, Homo sapiens
aggcggtgcgtcgcgggggcggggccgcgcaggcgtaccgggtgccccggctctggagcataaacaagagcggggacgggatgaggcggcggttgatcccagggtggcgagtggcggcgaccgaggcggcgagcggggcccggcgccgaccctgagtgcagcctgacccgccctcgcgcgcgcgccctccccggccgggcccactcgccgcgcgcccagccatgaacctggcgagccagagcggggaggccggcgccggccagctgctcttcgccaacttcaaccaggacaacacagaagtgaaaggggcatcaagagcagctggtcttggccgtcgcgctgttgtctggtccctagctgttggtagtaagtccggttataaatttttctccctttcttctgtggataagctggaacagatctatgaatgcaccgatacggaagatgtgtgcattgtagagagattgttctccagcagcctagtggccatcgtgagccttaaagcaccaaggaagctaaaggtttgccactttaagaagggaactgagatctgcaactacagctactccaacacgattctggctgtgaagctcaacaggcagaggctgatagtatgcctggaggagtccctgtacatccacaacattcgggacatgaaggtgctgcatacgatcagggagacgcctccaaaccctgcaggcctgtgtgcgctgtcaatcaacaacgacaactgctacttggcgtacccagggagcgcgaccatcggagaggtgcaggtcttcgataccattaatttgagagctgcaaacatgattccggctcacgacagtcctttagcggcactggcctttgacgcaagtggaactaaacttgccacggcttcggagaaggggaccgtgattagggtattttccattccagaaggacaaaaactctttgagtttcggagaggagtaaagaggtgcgtgagcatctgctccctggccttcagcatggacggcatgttcctctccgcctccagcaacactgagaccgtgcacatcttcaaactcgagactgtgaaagaaaaacccccagaggagcccaccacctggaccgggtacttcgggaaagtgctcatggcctccaccagctacctgccttcccaagtgacagaaatgttcaaccagggcagagccttcgccacggtccgcctgccattctgcggccacaaaaacatctgctcgctagccacaattcagaagatcccgcggttgttggtgggtgccgccgacgggtacctgtacatgtacaacctggacccccaggagggcggcgagtgtgccctgatgaagcagcaccggctggacggcagtctggaaacgaccaatgagatcttggactctgcctctcacgactgccccttagtcactcagacatacggcgcagctgcaggaaaaggtacttacgtgccttcatccccaacgagacttgcctacacagacgacctgggtgctgtgggtggcgcctgcctggaggacgaggccagcgccctgcgcctggatgaggacagcgagcacccgcccatgattcttcggactgactgaacttgacctgtgacctctgacccggggagcagagaacactggcttcacagaggactttgtgcattgctgctatgaactttgacctgagtcgggggagaggatggcagagactttattaaaaaaaaaaaaagattgtagtggtagtctaactccataacgctgaggaaatacatcattttcacttcagtggcttttaaatcctgcttatgaattttagctttttgtttgtttgttttctctttttgccaaaattaactgtttggtgaagcccgcaaaacctcctcgctttgcatgcatgaacgtgccaagccagcataggggagctagaagccactttccagccacctgccgttgggttttttcatatctgtacataatgccgagtgcgtaaggaaaccgtggcgtcgcgcacagtgggtctgcttgtcaaggccagttctgcagtgacaggcccaggggctgcccaccaggtgtgctgggcagacttcagctgggacagaagtccgatctccctagggccccacctggaccattttccctccgttttattttgttaattaaattctttccaaattggatcgctctgggatttcttccatggtggacttttgtttctgatcttgttttccctgtggatattggaggacagcgaggttctttctgatactaaaaacctttctttcaggcagcaaatgaacttgaaaggttgcctggactcgctggagcaaaggaaagcgattttgtttgtataattaaatgatctgttcttctacttcactctt

SEQ ID NO: 394838 - DNA, 2110 bp, Homo sapiens
aggcggtgcgtcgcgggggcggggccgcgcaggcgtaccgggtgccccggctctggagcataaacaagagcggggacgggatgaggcggcggttgatcccagggtggcgagtggcggcgaccgaggcggcgagcggggcccggcgccgaccctgagtgcagcctgacccgccctcgcgcgcgcgccctccccggccgggcccactcgccgcgcgcccagccatgaacctggcgagccagagcggggaggccggcgccggccagctgctcttcgccaacttcaaccaggacaacacgtccctagctgttggtagtaagtccggttataaatttttctccctttcttctgtggataagctggaacagatctatgaatgcaccgatacggaagatgtgtgcattgtagagagattgttctccagcagcctagtggccatcgtgagccttaaagcaccaaggaagctaaaggtttgccactttaagaagggaactgagatctgcaactacagctactccaacacgattctggctgtgaagctcaacaggcagaggctgatagtatgcctggaggagtccctgtacatccacaacattcgggacatgaaggtgctgcatacgatcagggagacgcctccaaaccctgcaggcctgtgtgcgctgtcaatcaacaacgacaactgctacttggcgtacccagggagcgcgaccatcggagaggtgcaggtcttcgataccattaatttgagagctgcaaacatgattccggctcacgacagtcctttagcggcactggcctttgacgcaagtggaactaaacttgccacggcttcggagaaggggaccgtgattagggtattttccattccagaaggacaaaaactctttgagtttcggagaggagtaaagaggtgcgtgagcatctgctccctggccttcagcatggacggcatgttcctctccgcctccagcaacactgagaccgtgcacatcttcaaactcgagactgtgaaagaaaaacccccagaggagcccaccacctggaccgggtacttcgggaaagtgctcatggcctccaccagctacctgccttcccaagtgacagaaatgttcaaccagggcagagccttcgccacggtccgcctgccattctgcggccacaaaaacatctgctcgctagccacaattcagaagatcccgcggttgttggtgggtgccgccgacgggtacctgtacatgtacaacctggacccccaggagggcggcgagtgtgccctgatgaagcagcaccggctggacggcagtctggaaacgaccaatgagatcttggactctgcctctcacgactgccccttagtcactcagacatacggcgcagctgcaggaaaaggtacttacgtgccttcatccccaacgagacttgcctacacagacgacctgggtgctgtgggtggcgcctgcctggaggacgaggccagcgccctgcgcctggatgaggacagcgagcacccgcccatgattcttcggactgactgaacttgacctgtgacctctgacccggggagcagagaacactggcttcacagaggactttgtgcattgctgctatgaactttgacctgagtcgggggagaggatggcagagactttattaaaaaaaaaaaaagattgtagtggtagtctaactccataacgctgaggaaatacatcattttcacttcagtggcttttaaatcctgcttatgaattttagctttttgtttgtttgttttctctttttgccaaaattaactgtttggtgaagcccgcaaaacctcctcgctttgcatgcatgaacgtgccaagccagcataggggagctagaagccactttccagccacctgccgttgggttttttcatatctgtacataatgccgagtgcgtaaggaaaccgtggcgtcgcgcacagtgggtctgcttgtcaaggccagttctgcagtgacaggcccaggggctgcccaccaggtgtgctgggcagacttcagctgggacagaagtccgatctccctagggccccacctggaccattttccctccgttttattttgttaattaaattctttccaaattgga

SEQ ID NO: 394839 - DNA, 962 bp, Homo sapiens
  misc_feature (825)..(825): n is a, c, g, or t
  misc_feature (832)..(834): n is a, c, g, or t
  misc_feature (837)..(837): n is a, c, g, or t
  misc_feature (849)..(849): n is a, c, g, or t
  misc_feature (858)..(858): n is a, c, g, or t
  misc_feature (860)..(860): n is a, c, g, or t
  misc_feature (867)..(869): n is a, c, g, or t
  misc_feature (871)..(871): n is a, c, g, or t
aggcggtgcgtcgcgggggcggggccgcgcaggcgtaccgggtgccccggctctggagcataaacaagagcggggacgggatgaggcggcggttgatcccagggtggcgagtggcggcgaccgaggcggcgagcggggcccggcgccgaccctgagtgcagcctgacccgccctcgcgcgcgcgccctccccggccgggcccactcgccgcgcgcccagccatgaacctggcgagccagagcggggaggccggcgccggccagctgctcttcgccaacttcaaccaggacaacacccgatacggaagatgtgtgcattgtagagagattgttctccagcagcctagtggccatcgtgagccttaaagcaccaaggaagctaaaggtttgccactttaagaagggaactgagatctgcaactacagctactccaacacgattctggctgtgaagctcaacaggcagaggctgatagtatgcctggaggagtccctgtacatccacaacattcgggacatgaaggtgctgcatacgatcagggagacgcctccaaaccctgcaggcctgtgtgcgctgtcaatcaacaacgacaactgctacttggcgtacccagggagcgcgaccatcggagaggtgcaggtcttcgataccattaatttgagagctgcaaacatgattccggctcacgacagtcctttagcggcactggcctttgacgcaagtggaactaaacttgccacggcttcggagaaggggaccgtgattagggtattttccattccagaaggacaaaaactctttgagtttcggagaggagtaaagagnggtcgtnnngcntctgccccctgngcttcagantngaccggnnntntcctctccggcttccaagaacctttgcgaccgggcactttctcagacccgcaactcggtccaagaaagcccaagaggggccacaccgtggc

SEQ ID NO: 394840 - DNA, 786 bp, Homo sapiens
gatccgcccaccttggcctcccaaagtgctgggattacaagcttgagccaccgtgcccggccctttgctctgttcttaaactttactgaggttgccgatttaccctctggtgtggaaagaatggctgtaacttaaattactgagttttcttttactcaccttaggactataaatccatcctacttcagctaaaagtggtttagtgaaatcctactccttttgtcatgtggaagcttgcagctgtgttaacgaattgttcttagtatttccttttgaacattttcctctctcaaggaaaatgtttgagaaggtggctagaggggaataaaacttaccagcaggcccaagtgtgcccgtgacaggaactcttctccgccacttgagttgaacccctggggcagctgctggctccggtggcccgccccaacctgtgcgtctccccaggtgcgtgagcatctgctccctggccttcagcatggacggcatgttcctctccgcctccagcaacactgagaccgtgcacatcttcaaactcgagactgtgaaagaaaagtgagttgcaaatatacgtttctttaaaaatgatgcaaaaccctttgtccccacttgctgccgggatgagaggtaagcacggacccgcccaccctctgacatcgttagccagtgaagaccccggagctggccatggagcgagcacctccgcatccaggctcggcagtgaggaggatgggcccccagcagatgagcttctcccacaggcagcacgcagggtagacagagccctcg

SEQ ID NO: 394841 - DNA, 4443 bp, Homo sapiens
aggcggtgcgtcgcgggggcggggccgcgcaggcgtaccgggtgccccggctctggagcataaacaagagcggggacgggatgaggcggcggttgatcccagggtggcgagtggcggcgaccgaggcggcgagcggggcccggcgccgaccctgagtgcagcctgacccgccctcgcgcgcgcgccctccccggccgggcccactcgccgcgcgcccagccatgaacctggcgagccagagcggggaggccggcgccggccagctgctcttcgccaacttcaaccaggacaacacgtccctagctgttggtagtaagtccggttataaatttttctccctttcttctgtggataagctggaacagatctatgaatgcaccgatacggaagatgtgtgcattgtagagagattgttctccagcagcctagtggccatcgtgagccttaaagcaccaaggaagctaaaggtttgccactttaagaagggaactgagatctgcaactacagctactccaacacgattctggctgtgaagctcaacaggcagaggctgatagtatgcctggaggagtccctgtacatccacaacattcgggacatgaaggtgctgcatacgatcagggagacgcctccaaaccctgcaggcctgtgtgcgctgtcaatcaacaacgacaactgctacttggcgtacccagggagcgcgaccatcggagaggtgcaggtcttcgataccattaatttgagagctgcaaacatgattccggctcacgacagtcctttagcggcactggcctttgacgcaagtggaactaaacttgccacggcttcggagaaggggaccgtgattagggtattttccattccagaaggacaaaaactctttgagtttcggagaggagtaaagaggtgcgtgagcatctgctccctggccttcagcatggacggcatgttcctctccgcctccagcaacactgagaccgtgcacatcttcaaactcgagactgtgaaagaaaaacccccagaggagcccaccacctggaccgggtacttcgggaaagtgctcatggcctccaccagctacctgccttcccaagtgacagaaatgttcaaccagggcagagccttcgccacggtccgcctgccattctgcggccacaaaaacatctgctcgctagccacaattcagaagatcccgcggttgttggtgggtgccgccgacgggtacctgtacatgtacaacctggacccccaggagggcggcgagtgtgccctgatgaagcagcaccggctggacggcagtctggaaacgaccaatgagatcttggactctgcctctcacgactgccccttagtcactcagacatacggcgcagctgcaggaaaaggtacttacgtgccttcatccccaacgagacttgcctacacagacgacctgggtgctgtgggtggcgcctgcctggaggacgaggccagcgccctgcgcctggatgaggacagcgagcacccgcccatgattcttcggactgactgaacttgacctgtgacctctgacccggggagcagagaacactggcttcacagaggactttgtgcattgctgctatgaactttgacctgagtcgggggagaggatggcagagactttattaaaaaaaaaaaaagattgtagtggtagtctaactccataacgctgaggaaatacatcattttcacttcagtggcttttaaatcctgcttatgaattttagctttttgtttgtttgttttctctttttgccaaaattaactgtttggtgaagcccgcaaaacctcctcgctttgcatgcatgaacgtgccaagccagcataggggagctagaagccactttccagccacctgccgttgggttttttcatatctgtacataatgccgagtgcgtaaggaaaccgtggcgtcgcgcacagtgggtctgcttgtcaaggccagttctgcagtgacaggcccaggggctgcccaccaggtgtgctgggcagacttcagctgggacagaagtccgatctccctagggccccacctggaccattttccctccgttttattttgttaattaaattctttccaaattggatcgctctgggatttcttccatggtggacttttgtttctgatcttgttttccctgtggatattggaggacagcgaggttctttctgatactaaaaacctttctttcaggcagcaaatgaacttgaaaggttgcctggactcgctggagcaaaggaaagcgattttgtttgtataattaaatgatctgttcttctacttcactcttcctgttgaaaaactgtgtgatttttttttttttttaagtaaagtttgtagctcctcccatgcccaggaaagcacagaactcaagtgtggtggccgtctgagctgtcctttcgctggccccgctgtccgcaggggcttcctacctgtgtgagaggtcgtagcgggagacagcaacagagagtaggcggctgggccacgtccttcacagggcgtcatgtgcctttctattttcatcttagaaaatttcctcagcaaaccgatgagagattgtggttgcaagcttcagtatttgcctcgcttcccttttcatatttacagaattaaaacaacctcaagtacctcagactctgcattccaaaccaaggcacccagcagccaaagtgtcgagggcatttaagtggcattaatggcaggagagatggttttagaatctatggagtggtggaagttacggatagaagggaaaaggcaaaaactatttaccctgcctttgcaggctggggtttttgaaccgaggaaggctgggacgcctgtttccagatggttgtcatggtcacgctgggcgaagagctggaggggagttgtcccctcagctgagcggctgcggtgaaatgccccagtgttcctgggttggctttacggcaaactaaatgcaggggacgctggagtccgactcacctacaccggcttcctcccagccgctggtgtgcggcacacacaacatctgcattaggcagaggtgcaagtgggctgattgaacttttccttcaaaacctgcttgtctgtcctggacctttgatgaaatgggatcccggtcacgcaggctgagacagtggggaccgccgaggccagagtgggctatgcttgagcagggatgagaagggccgcggcagcacgcagccttgacccacgcctgcgtcttgtggtgcaaggccagagggctctctctagaacctgaccgtgcactccatctcctgggagccacttttggcaagagtgagtgtggggggaaaaagtgtgcacaagagatacggaaccctgagctagggtttcctgtcaccaaagagtgagctgcatttccagttctgcgttaaagtatcgtttgttctggtgcctgcctgtggtggtgatttggagactcaaatttcctttgccaggtctcttttgtctttctttgggattggtagtatagaagatgctgggaattgtcttcctcgctcagcctcggcttcccgcactgtaagatgaggcagttgcagaggaggcctcggacgtcctgtgaccctcggcccacactcccccttgggtggccctggcagggctggctaggtgcgttccctgcagaccacgggaagccctgtgcttgcctgggtcagggctaagctgtgcgccctagaggagggaggaggactgcagattcttggtcgagaagaatgaagaggatttctgtgtttgctgagcagccattgtggagggttacccgcctccactttcccgttgcccatttcactgccaccagctcctcttcctctgctcgaacctatgagtcccagcctcactggcggcctcagacatgctcaggagtgacggggacagagggaggccgctgagttgcccgttagaactcttactgctgcgccagtgacccaggtggagagggaccctgaaccaaacagaacgtgtgctaattttccgaactccaaactgtacactcatattcatttttaaattgtatttttccaaacttcaaaaaggacgatgagcgtgggggataggaaacaaaacctgtaaacgttgtgaatgggctcagtggactctgggaccaaaccttctgtaatctctaaaacaatgggaccaagagctggatggaacctggagtcaaaaagaactgcttcagtccccgctgtaccgcctgcctagctgtgggagcaggcagggcgcctgggagcctgcgttttctggaccgttccatgggactcatccctacctcacagggctgttgtgaggtgttgtgtgactgcgtgtcctgcaaacgcccagctcggtgcccagccagcggtgggcacccaataaacgctacaacataaatgtgtcttctgcaattaaacacgatttttattcagttctggt

SEQ ID NO: 394842 - DNA, 4345 bp, Homo sapiens
aggcggtgcgtcgcgggggcggggccgcgcaggcgtaccgggtgccccggctctggagcataaacaagagcggggacgggatgaggcggcggttgatcccagggtggcgagtggcggcgaccgaggcggcgagcggggcccggcgccgaccctgagtgcagcctgacccgccctcgcgcgcgcgccctccccggccgggcccactcgccgcgcgcccagccatgaacctggcgagccagagcggggaggccggcgccggccagctgctcttcgccaacttcaaccaggacaacacgtccctagctgttggtagtaagtccggttataaatttttctccctttcttctgtggataagctggaacagatctatgaatgcaccgatacggaagatgtgtgcattgtagagagattgttctccagcagcctagtggccatcgtgagccttaaagcaccaaggaagctaaaggtttgccactttaagaagggaactgagatctgcaactacagctactccaacacgattctggctgtgaagctcaacaggcagaggctgatagtatgcctggaggagtccctgtacatccacaacattcgggacatgaaggtgctgcatacgatcagggagacgcctccaaaccctgcaggcctgtgtgcgctgtcaatcaacaacgacaactgctacttggcgtacccagggagcgcgaccatcggagaggtgcaggtcttcgataccattaatttgagagctgcaaacatgattccggctcacgacagtcctttagcggcactggcctttgacgcaagtggaactaaacttgccacggcttcggagaaggggaccgtgattagggtattttccattccagaaggacaaaaactctttgagtttcggagaggagtaaagaggtgcgtgagcatctgctccctggccttcagcatggacggcatgttcctctccgcctccagcaacactgagaccgtgcacatcttcaaactcgagactgtgaaagaaaaacccccagaggagcccaccacctggaccgggtacttcgggaaagtgctcatggcctccaccagctacctgccttcccaagtgacagaaatgttcaaccagggcagagccttcgccacggtccgcctgccattctgcggccacaaaaacatctgctcgctagccacaattcagaagatcccgcggttgttggtgggtgccgccgacgggtacctgtacatgtacaacctggacccccaggagggcggcgagtgtgccctgatgaagcagcaccggctggacggcagtctggaaacgaccaatgagatcttggactctgcctctcacgactgccccttagtcactcagacatacggcgcagctgcaggaaaaggtacttacgtgccttcatccccaacgagacttgcctacacagacgacctgggtgctgtgggtggcgcctgcctggaggacgaggccagcgccctgcgcctggatgaggacagcgagcacccgcccatgattcttcggactgactgaacttgacctgtgacctctgacccggggagcagagaacactggcttcacagaggactttgtgcattgctgctatgaactttgacctgagtcgggggagaggatggcagagactttattaaaaaaaaaaaaagattgtagtggtagtctaactccataacgctgaggaaatacatcattttcacttcagtggcttttaaatcctgcttatgaattttagctttttgtttgtttgttttctctttttgccaaaattaactgtttggtgaagcccgcaagccactttccagccacctgccgttgggttttttcatatctgtacataatgccgagtgcgtaaggaaaccgtggcgtcgcgcacagtgggtctgcttgtcaaggccagttctgcagtgacaggcccaggggctgcccaccaggtgtgctgggcagacttcagctgggacagaagtccgatctccctagggccccacctggaccattttccctccgttttattttgttaattaaattctttccaaattggatcgctctgggatttcttccatggtggacttttgtttctgatcttgttttccctgtggatattggaggacagcgaggttctttctgatactaaaaacctttctttcaggcagcaaatgaacttgaaaggttgcctggactcgctggagcaaaggaaagcgattttgtttgtataattaaatgatctgttcttctacttcactcttcctgttgaaaaactgtgtgatttttttttttttttaagtaaagtttgtagctcctcccatgcccaggaaagcacagaactcaagtgtggtggccgtctgagctgtcctttcgctggccccgctgtccgcaggggcttcctacctgtgtgagaggtcgtagcgggagacagcaacagagagtaggcggctgggccacgtccttcacagggcgtcatgtgcctttctattttcatcttagaaaatttcctcagcaaaccgatgagagattgtggttgcaagcttcagtatttgcctcgcttcccttttcatatttacagaattaaaacaacctcaagtacctcagactctgcattccaaaccaaggcacccagcagccaaagtgtcgagggcatttaagtggcattaatggcaggagagatggttttagaatctatggagtggtggaagttacggatagaagggaaaaggcaaaaactatttaccctgcctttgcaggctggggtttttgaaccgaggaaggctgggacgcctgtttccagatggttgtcatggtcacgctgggcgaagagctggaggggagttgtcccctcagctgagcggctgcggtgaaatgccccagtgttcctgggttggctttacggcaaactaaatgcaggggacgctggagtccgactcacctacaccggcttcctcccagccgctggtgtgcggcacacacaacatctgcattaggcagaggtgcaagtgggctgattgaacttttccttcaaaacctgcttgtctgtcctggacctttgatgaaatgggatcccggtcacgcaggctgagacagtggggaccgccgaggccagagtgggctatgcttgagcagggatgagaagggccgcggcagcacgcagccttgacccacgcctgcgtcttgtggtgcaaggccagagggctctctctagaacctgaccgtgcactccatctcctgggagccacttttggcaagagtgagtgtggggggaaaaagtgtgcacaagagatacggaaccctgagctagggtttcctgtcaccaaagagtgagctgcatttccagttctgcgttaaagtatcgtttgttctggtgcctgcctgtggtggtgatttggagactcaaatttcctttgccaggtctcttttgtctttctttgggattggtagtatagaagatgctgggaattgtcttcctcgctcagcctcggcttcccgcactgtaagatgaggcagttgcagaggaggcctcggacgtcctgtgaccctcggcccacactcccccttgggtggccctggcagggctggctaggtgcgttccctgcagaccacgggaagccctgtgcttgcctgggtcagggctaagctgtgcgccctagaggagggaggaggactgcagattcttggtcgagaagaatgaagaggatttctgtgtttgctgagcagccattgtggagggttacccgcctccactttcccgttgcccatttcactgccaccagctcctcttcctctgctcgaacctatgagtcccagcctcactggcggcctcagacatgctcaggagtgacggggacagagggaggccgctgagttgcccgttagaactcttactgctgcgccagtgacccaggtggagagggaccctgaaccaaacagaacgtgtgctaattttccgaactccaaactgtacactcatattcatttttaaattgtatttttccaaacttcaaaaaggacgatgagcgtgggggataggaaacaaaacctgtaaacgttgtgaatgggctcagtggactctgggaccaaaccttctgtaatctctaaaacaatgggaccaagagctggatggaacctggagtcaaaaagaactgcttcagtccccgctgtaccgcctgcctagctgtgggagcaggcagggcgcctgggagcctgcgttttctggaccgttccatgggactcatccctacctcacagggctgttgtgaggtgttgtgtgactgcgtgtcctgcaaacgcccagctcggtgcccagccagcggtgggcacccaataaacgctacaacata

SEQ ID NO: 394843 - DNA, 4335 bp, Homo sapiens
tcttaattaagggagcccctagaccttactctttcactttacctaggagtttggttcctaaactcaccattcaaatccagcaacagaacagagagaaaggaacctttgtctttcgtgtgaatgctcgtgaggggccatccttagagtggaaatgctcctgaggctccagcgaatcaagaccctcagacccccgggctgtccccaccccatgaccacatgttccgcaggcaccctcagcgctgtgccctgcgtgtcgcccaggcaggtgtttgtttttgagcgcagattctgcctgtggcatagccatgtggagatgttcacgcatgtacttccctttgtgatttcagccgatacggaagatgtgtgcattgtagagagattgttctccagcagcctagtggccatcgtgagccttaaagcaccaaggaagctaaaggtttgccactttaagaagggaactgagatctgcaactacagctactccaacacgattctggctgtgaagctcaacaggcagaggctgatagtatgcctggaggagtccctgtacatccacaacattcgggacatgaaggtgctgcatacgatcagggagacgcctccaaaccctgcaggcctgtgtgcgctgtcaatcaacaacgacaactgctacttggcgtacccagggagcgcgaccatcggagaggtgcaggtcttcgataccattaatttgagagctgcaaacatgattccggctcacgacagtcctttagcggcactggcctttgacgcaagtggaactaaacttgccacggcttcggagaaggggaccgtgattagggtattttccattccagaaggacaaaaactctttgagtttcggagaggagtaaagaggtgcgtgagcatctgctccctggccttcagcatggacggcatgttcctctccgcctccagcaacactgagaccgtgcacatcttcaaactcgagactgtgaaagaaaaacccccagaggagcccaccacctggaccgggtacttcgggaaagtgctcatggcctccaccagctacctgccttcccaagtgacagaaatgttcaaccagggcagagccttcgccacggtccgcctgccattctgcggccacaaaaacatctgctcgctagccacaattcagaagatcccgcggttgttggtgggtgccgccgacgggtacctgtacatgtacaacctggacccccaggagggcggcgagtgtgccctgatgaagcagcaccggctggacggcagtctggaaacgaccaatgagatcttggactctgcctctcacgactgccccttagtcactcagacatacggcgcagctgcaggaaaagcctacacagacgacctgggtgctgtgggtggcgcctgcctggaggacgaggccagcgccctgcgcctggatgaggacagcgagcacccgcccatgattcttcggactgactgaacttgacctgtgacctctgacccggggagcagagaacactggcttcacagaggactttgtgcattgctgctatgaactttgacctgagtcgggggagaggatggcagagactttattaaaaaaaaaaaaagattgtagtggtagtctaactccataacgctgaggaaatacatcattttcacttcagtggcttttaaatcctgcttatgaattttagctttttgtttgtttgttttctctttttgccaaaattaactgtttggtgaagcccgcaaaacctcctcgctttgcatgcatgaacgtgccaagccagcataggggagctagaagccactttccagccacctgccgttgggttttttcatatctgtacataatgccgagtgcgtaaggaaaccgtggcgtcgcgcacagtgggtctgcttgtcaaggccagttctgcagtgacaggcccaggggctgcccaccaggtgtgctgggcagacttcagctgggacagaagtccgatctccctagggccccacctggaccattttccctccgttttattttgttaattaaattctttccaaattggatcgctctgggatttcttccatggtggacttttgtttctgatcttgttttccctgtggatattggaggacagcgaggttctttctgatactaaaaacctttctttcaggcagcaaatgaacttgaaaggttgcctggactcgctggagcaaaggaaagcgattttgtttgtataattaaatgatctgttcttctacttcactcttcctgttgaaaaactgtgtgatttttttttttttttaagtaaagtttgtagctcctcccatgcccaggaaagcacagaactcaagtgtggtggccgtctgagctgtcctttcgctggccccgctgtccgcaggggcttcctacctgtgtgagaggtcgtagcgggagacagcaacagagagtaggcggctgggccacgtccttcacagggcgtcatgtgcctttctattttcatcttagaaaatttcctcagcaaaccgatgagagattgtggttgcaagcttcagtatttgcctcgcttcccttttcatatttacagaattaaaacaacctcaagtacctcagactctgcattccaaaccaaggcacccagcagccaaagtgtcgagggcatttaagtggcattaatggcaggagagatggttttagaatctatggagtggtggaagttacggatagaagggaaaaggcaaaaactatttaccctgcctttgcaggctggggtttttgaaccgaggaaggctgggacgcctgtttccagatggttgtcatggtcacgctgggcgaagagctggaggggagttgtcccctcagctgagcggctgcggtgaaatgccccagtgttcctgggttggctttacggcaaactaaatgcaggggacgctggagtccgactcacctacaccggcttcctcccagccgctggtgtgcggcacacacaacatctgcattaggcagaggtgcaagtgggctgattgaacttttccttcaaaacctgcttgtctgtcctggacctttgatgaaatgggatcccggtcacgcaggctgagacagtggggaccgccgaggccagagtgggctatgcttgagcagggatgagaagggccgcggcagcacgcagccttgacccacgcctgcgtcttgtggtgcaaggccagagggctctctctagaacctgaccgtgcactccatctcctgggagccacttttggcaagagtgagtgtggggggaaaaagtgtgcacaagagatacggaaccctgagctagggtttcctgtcaccaaagagtgagctgcatttccagttctgcgttaaagtatcgtttgttctggtgcctgcctgtggtggtgatttggagactcaaatttcctttgccaggtctcttttgtctttctttgggattggtagtatagaagatgctgggaattgtcttcctcgctcagcctcggcttcccgcactgtaagatgaggcagttgcagaggaggcctcggacgtcctgtgaccctcggcccacactcccccttgggtggccctggcagggctggctaggtgcgttccctgcagaccacgggaagccctgtgcttgcctgggtcagggctaagctgtgcgccctagaggagggaggaggactgcagattcttggtcgagaagaatgaagaggatttctgtgtttgctgagcagccattgtggagggttacccgcctccactttcccgttgcccatttcactgccaccagctcctcttcctctgctcgaacctatgagtcccagcctcactggcggcctcagacatgctcaggagtgacggggacagagggaggccgctgagttgcccgttagaactcttactgctgcgccagtgacccaggtggagagggaccctgaaccaaacagaacgtgtgctaattttccgaactccaaactgtacactcatattcatttttaaattgtatttttccaaacttcaaaaaggacgatgagcgtgggggataggaaacaaaacctgtaaacgttgtgaatgggctcagtggactctgggaccaaaccttctgtaatctctaaaacaatgggaccaagagctggatggaacctggagtcaaaaagaactgcttcagtccccgctgtaccgcctgcctagctgtgggagcaggcagggcgcctgggagcctgcgttttctggaccgttccatgggactcatccctacctcacagggctgttgtgaggtgttgtgtgactgcgtgtcctgcaaacgcccagctcggtgcccagccagcggtgggcacccaataaacgctacaacata
